United States Patent Application Publication US 2018/0126003 A1 - sequence listing, part 103

SEQ ID NO: 184408 - protein, 3662 aa, Artificial Sequence
  derived and/or modified sequence
MSRRAPGSRLSSGGGGGGTKYPRSWNDWQPRTDSASADPDNLKYSSSRDRGGSSSYGLQPSNSAVVSRQRHDDTRVHADIQNDEKGGYSVNGGSGENTYGRKSLGQELRVNNVTSPEFTSVQHGSRALATKDMRKSQERSMSYSDESRLSNLLRRITREDDRDRRLATVKQLKEFIQQPENKLVLVKQLDNILAAVHDVLNESSKLLQELRQEGACCLGLLCASLSYEAEKIFKWIFSKFSSSAKDEVKLLYLCATYKALETVGEKKAFSSVMQLVMTSLQSILENVDTPELLCKCVKCILLVARCYPHIFSTNFRDTVDILVGWHIDHTQKPSLTQQVSGWLQSLEPFWVADLAFSTTLLGQFLEDMEAYAEDLSHVASGESVDEDVPPPSVSLPKLAALLRVFSTVVRSIGERFSPIRGPPITEAYVTDVLYRVMRCVTAANQVFFSEAVLTAANECVGVLLGSLDPSMTIHCDMVITYGLDQLENCQTCGTDYIISVLNLLTLIVEQINTKLPSSFVEKLFIPSSKLLFLRYHKEKEVVAVAHAVYQAVLSLKNIPVLETAYKLILGEMTCALNNLLHSLQLPEACSEIKHEAFKNHVFNVDNAKFVVIFDLSALTTIGNAKNSLIGMWALSPTVFALLSKNLMIVHSDLAVHFPAIQYAVLYTLYSHCTRHDHFISSSLSSSSPSLFDGAVISTVTTATKKHFSIILNLLGILLKKDNLNQDTRKLLMTWALEAAVLMKKSETYAPLFSLPSFHKFCKGLLANTLVEDVNICLQACSSLHALSSSLPDDLLQRCVDVCRVQLVHSGTRIRQAFGKLLKSIPLDVVLSNNNHTEIQEISLALRSHMSKAPSNTFHPQDFSDVISFILYGNSHRTGKDNWLERLFYSCQRLDKRDQSTIPRNLLKTDAVLWQWAIWEAAQFTVLSKLRTPLGRAQDTFQTIEGIIRSLAAHTLNPDQDVSQWTTADNDEGHGNNQLRLVLLLQYLENLEKLMYNAYEGCANALTSPPKVIRTFFYTNRQTCQDWLTRIRLSIMRVGLLAGQPAVTVRHGFDLLTEMKTTSLSQGNELEVTIMMVVEALCELHCPEAIQGIAVWSSSIVGKNLLWINSVAQQAEGRFEKASVEYQEHLCAMTGVDCCISSFDKSVLTLANAGRNSASPKHSLNGESRKTVLSKPTDSSPEVINYLGNKACECYISIADWAAVQEWQNAIHDLKKSTSSTSLNLKADFNYIKSLSSFESGKFVECTEQLELLPGENINLLAGGSKEKIDMKKLLPNMLSPDPRELQKSIEVQLLRSSVCLATALNPIEQDQKWQSITENVVKYLKQTSRIAIGPLRLSTLTVSQSLPVLSTLQLYCSSALENTVSNRLSTEDCLIPLFSEALRSCKQHDVRPWMQALRYTMYQNQLLEKIKEQTVPIRSHLMELGLTAAKFARKRGNVSLATRLLAQCSEVQLGKTTTAQDLVQHFKKLSTQGQVDEKWGPELDIEKTKLLYTAGQSTHAMEMLSSCAISFCKSVKAEYAVAKSILTLAKWIQAEWKEISGQLKQVYRAQHQQNFTGLSTLSKNILTLIELPSVNTMEEEYPRIESESTVHIGVGEPDFILGQLYHLSSVQAPEVAKSWAALASWAYRWGRKVVDNASQGEGVRLLPREKSEVQNLLPDTITEEEKERIYGILGQAVCRPAGIQDEDITLQITESEDNEEDDMVDVIWRQLISSCPWLSELDESATEGVIKVWRKVVDRIFSLYKLSCSAYFTFLKLNAGQIPLDEDDPRLHLSHRVEQSTDDMIVMATLRLLRLLVKHAGELRQYLEHGLETTPTAPWRGIIPQLFSRLNHPEVYVRQSICNLLCRVAQDSPHLILYPAIVGTISLSSESQASGNKFSTAIPTLLGNIQGEELLVSECEGGSPPASQDSNKDEPKSGLNEDQAMMQDCYSKIVDKLSSANPTMVLQVQMLVAELRRVTVLWDELWLGVLLQQHMYVLRRIQQLEDEVKRVQNNNTLRKEEKIAIMREKHTALMKPIVFALEHVRSITAAPAETPHEKWFQDNYGDAIENALEKLKTPLNPAKPGSSWIPFKEIMLSLQQRAQKRASYILRLEEISPWLAAMTNTEIALPGEVSARDTVTIHSVGGTITILPTKTKPKKLLFLGSDGKSYPYLFKGLEDLHLDERIMQFLSIVNTMFATINRQETPRFHARHYSVTPLGTRSGLIQWVDGATPLFGLYKRWQQREAALQAQKAQDSYQTPQNPGIVPRPSELYYSKIGPALKTVGLSLDVSRRDWPLHVMKAVLEELMEATPPNLLAKELWSSCTTPDEWWRVTQSYARSTAVMSMVGYIIGLGDRHLDNVLIDMTTGEVVHIDYNVCFEKGKSLRVPEKVPFRMTQNIETALGVTGVEGVFRLSCEQVLHIMRRGRETLLTLLEAFVYDPLVDWTAGGEAGFAGAVYGGGGQQAESKQSKREMEREITRSLFSSRVAEIKVNWFKNRDEMLVVLPKLDGSLDEYLSLQEQLTDVEKLQGKLLEEIEFLEGAEGVDHPSHTLQHRYSEHTQLQTQQRAVQEAIQVKLNEFEQWITHYQAAFNNLEATQLASLLQEISTQMDLGPPSYVPATAFLQNAGQAHLISQCEQLEGEVGALLQQRRSVLRGCLEQLHHYATVALQYPKAIFQKHRIEQWKTWMEELICNTTVERCQELYRKYEMQYAPQPPPTVCQFITATEMTLQRYAADINSRLIRQVERLKQEAVTVPVCEDQLKEIERCIKVFLHENGEEGSLSLASVIISALCTLTRRNLMMEGAASSAGEQLVDLTSRDGAWFLEELCSMSGNVTCLVQLLKQCHLVPQDLDIPNPMEASETVHLANGVYTSLQELNSNFRQIIFPEALRCLMKGEYTLESMLHELDGLIEQTTDGVPLQTLVESLQAYLRNAAMGLEEETHAHYIDVARLLHAQYGELIQPRNGSVDETPKMSAGQMLLVAFDGMFAQVETAFSLLVEKLNKMEIPIAWRKIDIIREARSTQVNFFDDDNHRQVLEEIFFLKRLQTIKEFFRLCGTFSKTLSGSSSLEDQNTVNGPVQIVNVKTLFRNSCFSEDQMAKPIKAFTADFVRQLLIGLPNQALGLTLCSFISALGVDIIAQVEAKDFGAESKVSVDDLCKKAVEHNIQIGKFSQLVMNRATVLASSYDTAWKKHDLVRRLETSISSCKTSLQRVQLHIAMFQQWQHEDLLINRPQAMSVTPPPRSAILTSMKKKLHTLSQIETSIATVQEKLAALESSIEQRLKWAGGANPALAPVLQDFEATIAERRNLVLKESQRASQVTFLCSNIIHFESLRTRTAEALNLDAALFELIKRCQQMCSFASQFNSSVSELELRLLQRVDTGLEHPIGSSEWLLSAHKQLTQDMSTQRAIQTEKEQQIETVCETIQNLVDNIKTVLTGHNRQLGDVKHLLKAMAKDEEAALADGEDVPYENSVRQFLGEYKSWQDNIQTVLFTLVQAMGQVRSQEHVEMLQEITPTLKELKTQSQSIYNNLVSFASPLVTDATNECSSPTSSATYQPSFAAAVRSNTGQKTQPDVMSQNARKLIQKNLATSADTPPSTVPGTGKSVACSPKKAVRDPKTGKAVQERNSYAVSVWKRVKAKLEGRDVDPNRRMSVAEQVDYVIKEATNLDNLAQLYEGWTAWV

SEQ ID NO: 184409 - protein, 3661 aa, Artificial Sequence
  derived and/or modified sequence
MSRRAPGSRLSSGGGGGGTKYPRSWNDWQPRTDSASADPDNLKYSSSRDRGGSSSYGLQPSNSAVVSRQRHDDTRVHADIQNDEKGGYSVNGGSGENTYGRKSLGQELRVNNVTSPEFTSVQHGSRALATKDMRKSQERSMSYSDESRLSNLLRRITREDDRDRRLATVKQLKEFIQQPENKLVLVKQLDNILAAVHDVLNESSKLLQELRQEGACCLGLLCASLSYEAEKIFKWIFSKFSSSAKDEVKLLYLCATYKALETVGEKKAFSSVMQLVMTSLQSILENVDTPELLCKCVKCILLVARCYPHIFSTNFRDTVDILVGWHIDHTQKPSLTQQVSGWLQSLEPFWVADLAFSTTLLGQFLEDMEAYAEDLSHVASGESVDEDVPPPSVSLPKLAALLRVFSTVVRSIGERFSPIRGPPITEAYVTDVLYRVMRCVTAANQVFFSEAVLTAANECVGVLLGSLDPSMTIHCDMVITYGLDQLENCQTCGTDYIISVLNLLTLIVEQINTKLPSSFVEKLFIPSSKLLFLRYHKEKEVVAVAHAVYQAVLSLKNIPVLETAYKLILGEMTCALNNLLHSLQLPEACSEIKHEAFKNHVFNVDNAKFVVIFDLSALTTIGNAKNSLIGMWALSPTVFALLSKNLMIVHSDLAVHFPAIQYAVLYTLYSHCTRHDHFISSSLSSSSPSLFDGAVISTVTTATKKHFSIILNLLGILLKKDNLNQDTRKLLMTWALEAAVLMKKSETYAPLFSLPSFHKFCKGLLANTLVEDVNICLQACSSLHALSSSLPDDLLQRCVDVCRVQLVHSGTRIRQAFGKLLKSIPLDVVLSNNNHTEIQEISLALRSHMSKAPSNTFHPQDFSDVISFILYGNSHRTGKDNWLERLFYSCQRLDKRDQSTIPRNLLKTDAVLWQWAIWEAAQFTVLSKLRTPLGRAQDTFQTIEGIIRSLAAHTLNPDQDVSQWTTADNDEGHGNNQLRLVLLLQYLENLEKLMYNAYEGCANALTSPPKVIRTFFYTNRQTCQDWLTRIRLSIMRVGLLAGQPAVTVRHGFDLLTEMKTTSLSQGNELEVTIMMVVEALCELHCPEAIQGIAVWSSSIVGKNLLWINSVAQQAEGRFEKASVEYQEHLCAMTGVDCCISSFDKSVLTLANAGRNSASPKHSLNGESRKTVLSKPTDSSPEVINYLGNKACECYISIADWAAVQEWQNAIHDLKKSTSSTSLNLKADFNYIKSLSSFESGKFVECTEQLELLPGENINLLAGGSKEKIDMKKLLPNMLSPDPRELQKSIEVQLLRSSVCLATALNPIEQDQKWQSITENVVKYLKQTSRIAIGPLRLSTLTVSQSLPVLSTLQLYCSSALENTVSNRLSTEDCLIPLFSEALRSCKQHDVRPWMQALRYTMYQNQLLEKIKEQTVPIRSHLMELGLTAAKFARKRGNVSLATRLLAQCSEVQLGKTTTAQDLVQHFKKLSTQGQVDEKWGPELDIEKTKLLYTAGQSTHAMEMLSSCAISFCKSVKAEYAVAKSILTLAKWIQAEWKEISGQLKQVYRAQHQQNFTGLSTLSKNILTLIELPSVNTMEEEYPRIESESTVHIGVGEPDFILGQLYHLSSVQAPEVAKSWAALASWAYRWGRKVVDNASQGEGVRLLPREKSEVQNLLPDTITEEEKERIYGILGQAVCRPAGIQDEDITLQITESEDNEEDDMVDVIWRQLISSCPWLSELDESATEGVIKVWRKVVDRIFSLYKLSCSAYFTFLKLNAGQIPLDEDDPRLHLSHRVEQSTDDMIVMATLRLLRLLVKHAGELRQYLEHGLETTPTAPWRGIIPQLFSRLNHPEVYVRQSICNLLCRVAQDSPHLILYPAIVGTISLSSESQASGNKFSTAIPTLLGNIQGEELLVSECEGGSPPASQDSNKDEPKSGLNEDQAMMQDCYSKIVDKLSSANPTMVLQVQMLVAELRRVTVLWDELWLGVLLQQHMYVLRRIQQLEDEVKRVQNNNTLRKEEKIAIMREKHTALMKPIVFALEHVRSITAAPAETPHEKWFQDNYGDAIENALEKLKTPLNPAKPGSSWIPFKEIMLSLQQRAQKRASYILRLEEISPWLAAMTNTEIALPGEVSARDTVTIHSVGGTITILPTKTKPKKLLFLGSDGKSYPYLFKGLEDLHLDERIMQFLSIVNTMFATINRQETPRFHARHYSVTPLGTRSGLIQWVDGATPLFGLYKRWQQREAALQAQKAQDSYQTPQNPGIVPRPSELYYSKIGPALKTVGLSLDVSRRDWPLHVMKAVLEELMEATPPNLLAKELWSSCTTPDEWWRVTQSYARSTAVMSMVGYIIGLGDRHLDNVLIDMTTGEVVHIDYNVCFEKGKSLRVPEKVPFRMTQNIETALGVTGVEGVFRLSCEQVLHIMRRGRETLLTLLEAFVYDPLVDWTAGGEAGFAGAVYGGGGQQAESKQSKREMEREITRSLFSSRVAEIKVNWFKNRDEMLVVLPKLDGSLDEYLSLQEQLTDVEKLQGKLLEEIEFLEGAEGVDHPSHTLQHRYSEHTQLQTQQRAVQEAIQVKLNEFEQWITHYQAAFNNLEATQLASLLQEISTQMDLGPPSYVPATAFLQNAGQAHLISQCEQLEGEVGALLQQRRSVLRGCLEQLHHYATVALQYPKAIFQKHRIEQWKTWMEELICNTTVERCQELYRKYEMQYAPQPPPTVCQFITATEMTLQRYAADINSRLIRQVERLKQEAVTVPVCEDQLKEIERCIKVFLHENGEEGSLSLASVIISALCTLTRRNLMMEGAASSAGEQLVDLTSRDGAWFLEELCSMSGNVTCLVQLLKQCHLVPQDLDIPNPMEASETVHLANGVYTSLQELNSNFRQIIFPEALRCLMKGEYTLESMLHELDGLIEQTTDGVPLQTLVESLQAYLRNAAMGLEEETHAHYIDVARLLHAQYGELIQPRNGSVDETPKMSAGQMLLVAFDGMFAQVETAFSLLVEKLNKMEIPIAWRKIDIIREARSTQVNFFDDDNHRQVLEEIFFLKRLQTIKEFFRLCGTFSKTLSGSSSLEDQNTVNGPVQIVNVKTLFRNSCFSEDQMAKPIKAFTADFVRQLLIGLPNQALGLTLCSFISALGVDIIAQVEAKDFGAESKVSVDDLCKKAVEHNIQIGKFSQLVMNRATVLASSYDTAWKKHDLVRRLETSISSCKTSLQRVQLHIAMFQWQHEDLLINRPQAMSVTPPPRSAILTSMKKKLHTLSQIETSIATVQEKLAALESSIEQRLKWAGGANPALAPVLQDFEATIAERRNLVLKESQRASQVTFLCSNIIHFESLRTRTAEALNLDAALFELIKRCQQMCSFASQFNSSVSELELRLLQRVDTGLEHPIGSSEWLLSAHKQLTQDMSTQRAIQTEKEQQIETVCETIQNLVDNIKTVLTGHNRQLGDVKHLLKAMAKDEEAALADGEDVPYENSVRQFLGEYKSWQDNIQTVLFTLVQAMGQVRSQEHVEMLQEITPTLKELKTQSQSIYNNLVSFASPLVTDATNECSSPTSSATYQPSFAAAVRSNTGQKTQPDVMSQNARKLIQKNLATSADTPPSTVPGTGKSVACSPKKAVRDPKTGKAVQERNSYAVSVWKRVKAKLEGRDVDPNRRMSVAEQVDYVIKEATNLDNLAQLYEGWTAWV

SEQ ID NO: 184410 - DNA, 10989 bp, Artificial Sequence
  derived and/or modified sequence
atgtctaggcgagcccctggcagcaggctctcttcgggaggcggaggcggggggaccaaatacccccgtagctggaatgactggcagccccgcactgacagcgctagcgccgatcccgacaacttgaagtacagctcttcccgagaccgcggtggtagctcctcctatggacttcagccaagcaactcggccgtggtgtctcggcagcgccatgatgatacacgcgtgcatgccgacatccagaatgatgaaaaaggaggatacagcgtgaatggagggagtggagagaacacatacggcagaaaatcactgggacaggagctgagggtcaacaacgttacatccccggaatttacctccgttcagcacggcagcagagccctcgccacaaaagatatgagaaaatctcaggagcgatctatgagctatagtgatgagagccgactctcgaatctcctgcgccgaattactagagaggacgatcgggatcggcgactggcaaccgtcaagcaactgaaggaattcatacagcagccagaaaacaaactggtcctggtgaaacagctggacaacatcttggcagccgtgcatgacgtgcttaacgagtccagcaaactgctccaggagttgcgacaggaaggtgcctgctgtctagggctactctgtgcctccctttcttacgaggctgagaaaattttcaagtggatctttagcaagttctcctcgagcgcgaaggatgaggtaaagctgctctacctgtgtgctacctacaaggcattggaaaccgttggagaaaaaaaggcattctcatctgtgatgcagttagtgatgaccagtctccagagcatcttagagaacgtcgacacacccgagctcctgtgtaagtgtgttaagtgtatactcttagtggcgaggtgctatccccatattttctctacaaacttccgcgacacggttgatatactggttggttggcacattgaccatacccagaaaccaagtctgacacaacaagtgtccgggtggctccagtcattggagccgttctgggtagcggacctcgctttctcaaccacattactggggcagttccttgaggacatggaagcctacgcagaagacctttctcacgtggcctccggggagtccgtggatgaagatgtgcctcctccctcagtctccctccccaagctggcagccttactgcgggtatttagcaccgtcgtgcggtcaatcggcgagaggttcagtcccataaggggtcctccgatcacagaggcgtacgtgacagacgtgctgtatcgagttatgcgctgcgtaaccgctgcaaatcaggtatttttctccgaagctgtgttgacagcagcaaacgagtgtgtaggcgtgctgcttggttcactggaccccagcatgaccatccactgcgacatggtgatcacctatgggctcgaccagctggagaattgccagacgtgcggaaccgactacataatcagcgtactgaatctcttgaccctaattgttgagcagattaacaccaagctgcccagtagctttgtagagaagctgtttataccatcgagtaagctgttattcttaagataccataaggagaaggaggtcgtggcagtcgctcacgcggtctaccaggccgtcttaagccttaaaaacatccctgtcctagaaaccgcatacaagctcatcctaggtgagatgacgtgcgcactgaataacctactgcacagtctgcagctcccggaagcttgcagcgagatcaagcacgaagcatttaaaaatcatgtttttaacgttgacaatgctaagttcgtagtgatcttcgaccttagtgccctgaccacaatagggaatgccaagaattctttgatcggaatgtgggcactcagccctaccgtcttcgctctacttagtaaaaatctgatgatcgtgcatagtgatcttgcagttcattttcccgccatccagtatgcagtgctttacaccctgtatagccattgtacccgacacgaccactttatcagctcctcactgagtagtagttccccctcactcttcgatggcgccgtcattagtacggtgacaactgcaaccaaaaaacatttttctattatccttaacctgctggggatccttctcaaaaaagacaatctcaaccaagatacccggaagctcctgatgacctgggctctggaggcagcggtgcttatgaagaaatcagaaacctacgcacccctgttctcactgcctagctttcataaattttgtaagggactgctggccaacacactggtggaggacgtgaacatttgcctccaggcgtgttcctccctgcacgcactctcctcatccctccccgacgacttactgcaacgctgtgtggacgtgtgccgcgtccagctcgtgcacagcggaacacgaatacgacaggccttcggtaagcttttgaaatcaattcctctggatgtggtcttgagcaataataaccatactgaaatccaggagatttctctagctctgcgctcccacatgtccaaagctccatcaaacacgttccatccacaggatttcagcgatgtgatctcttttatcctgtatgggaacagtcaccgaacaggtaaagacaattggctcgagcggctgttctatagctgccagcgcctggacaagagagaccagtcaacaataccgcgcaaccttctgaagaccgatgcagtactctggcagtgggccatttgggaggctgcacagttcaccgtgctgtcaaaactgagaactcccctggggagggcacaggacacattccagacaatcgagggcattatacgatcgctggctgctcatacactgaacccagatcaggacgtcagtcagtggactaccgccgacaacgacgaaggacacggcaataaccagttgaggctcgtgctgttgctgcagtatctggaaaatctcgagaaactgatgtataacgcttacgaggggtgtgctaatgccctgacgagtccgcctaaagtgatccgcacctttttctacaccaaccggcagacttgccaagactggttgactcggatcaggctgtcaattatgcgcgttgggctgctggctggacagccagcggttaccgttcggcacgggttcgatttgctcacggagatgaagaccacaagtctgtcccaggggaatgaactagaggtcaccatcatgatggtggtcgaagctctgtgtgagttgcactgccccgaggctatccaggggattgcagtgtggagctctagcattgtcggaaaaaatctgctgtggatcaattccgttgctcagcaggccgagggccggttcgagaaggcctctgtggaatatcaggagcacctgtgcgcaatgacaggcgtagactgttgcatcagctctttcgataaatcggttttaactctggctaatgccggccgtaattccgcttcccccaagcacagccttaacggtgaatccagaaagacggtgctgagcaagcccactgacagttcgcccgaggtgattaactacctgggaaataaggcctgtgagtgttacatcagtatagccgactgggctgccgttcaggaatggcaaaacgccatccatgatctcaaaaagtctacctcatctaccagcctcaatctcaaggccgacttcaactatattaagtctttaagttctttcgagagcggcaagtttgttgagtgtacagagcagctggaactgctgccgggcgagaacatcaatctccttgcaggaggatctaaggagaaaattgatatgaagaagctgctgcccaatatgctgtcccccgacccccgcgagctccagaagtcgattgaagtgcaacttctccgtagtagcgtttgccttgcaaccgccttaaatcctatcgagcaggaccaaaaatggcaaagcatcacggagaatgtcgttaagtatttaaaacagactagtcgtattgctataggaccgttgcgcctctccactctcacagtgtcgcagtcgctgcccgtcctttccacgctgcagttatattgctcttctgctctcgagaacaccgtgagtaacagattgtctactgaagattgcctcatccctctcttttccgaggcgctgcggtcctgcaaacagcatgatgttagaccttggatgcaggcgctgaggtatacaatgtaccagaaccagctccttgagaagatcaaggagcagacagtgcccatacggtcccaccttatggagcttggattgactgctgctaaattcgcacgtaaaaggggaaatgtgtccctcgcaacccgccttcttgcccaatgcagcgaagtgcagttaggcaaaacaaccacggcgcaagatcttgtacagcactttaaaaagctgtccactcaggggcaggttgatgagaagtggggacccgaactggatatagagaaaaccaagttgctttataccgctggacagagtacacacgcaatggagatgctgtccagctgcgcaataagcttttgtaaatccgtgaaagccgagtacgctgtagctaaaagcattctgacgctggccaagtggattcaggccgaatggaaagagattagtggccagctaaaacaggtataccgcgcccagcatcagcagaacttcaccggactcagcacattgtctaagaatatcctgacactaatcgagttgccatcggttaacactatggaggaggaatacccacggatagagagcgaatcgaccgtacatataggggtgggcgagcccgattttatcctgggacagctgtaccacctttcttctgttcaagcacccgaagtggccaagtcttgggccgccctcgcaagttgggcctaccgctggggacgcaaggtggtggacaacgcctcacagggcgaaggcgtgagactgctccccagggagaagtccgaggtccagaatctgttgcccgatacgattactgaagaggagaaggagaggatctacggcatactgggccaggccgtatgtcgcccagcaggtattcaggatgaggatattactttgcagataaccgagtccgaggataacgaggaagatgatatggtagatgttatctggaggcagctaatttcctcctgcccctggctctccgagcttgatgagagtgctacagagggcgtcatcaaggtctggaggaaagtggtcgacaggatcttctcactgtataagctgtcatgctctgcttacttcactttcctgaagctgaatgctggacagatccccctggacgaggacgacccacgactgcatctgagccaccgggtggaacagtcaaccgatgacatgattgtgatggccacactacgactgctccggttgctggtaaagcacgccggcgagttacgccagtatttagagcatggactcgaaaccaccccaactgccccttggaggggtataatccctcaattattttccagactgaaccatcccgaagtttatgtacgccagagcatttgcaacttactgtgtagggtggcccaggactcgccacacctgatcttataccccgcaatagtggggacaatttccctgagcagtgaaagccaagctagcggcaataaattctcaactgcaatccccacattattaggcaacatccagggcgaggagctgctagtatcggaatgcgaaggcggctcaccaccagcgagtcaagatagcaataaggacgaaccaaaatccggactaaatgaggatcaagcaatgatgcaagattgttactcaaagatcgtggacaaactcagcagcgcaaatcccaccatggtactgcaggtgcaaatgcttgtggctgagttgcggcgcgtcaccgttctttgggacgaattatggctcggcgtgttgcttcagcagcacatgtacgtcctgaggcgaatccagcagttggaagatgaagtcaagcgcgttcaaaacaacaacactctacgaaaggaggagaaaatcgccataatgcgagagaagcacactgctctgatgaaacccattgtattcgcactcgagcatgtaaggagtatcaccgctgcacccgcagaaacccctcacgaaaagtggtttcaggataattatggggatgccattgagaatgcgcttgaaaagctcaagacccccctcaaccctgctaaaccagggagtagctggattcctttcaaagaaatcatgttgagcctccagcagagagctcagaaacgagcctcctatatactccggctggaggagatctccccttggctggctgccatgaccaataccgagatcgctctcccaggagaggtgagtgcccgtgatactgtaaccatccatagtgtcggaggaaccatcacaatcctccctaccaagactaaacccaaaaagctacttttcctgggcagcgacggtaaatcatacccctatctgttcaaggggttagaggaccttcatctggacgagcgcatcatgcaatttttaagcatagtgaacaccatgttcgcaactataaatagacaagaaacaccacgatttcacgctcggcactactcggttacgccacttggcaccagaagtggcctgattcagtgggtggacggcgcgacacccttgttcgggctgtataaacggtggcaacagcgggaagcagcccttcaggcccagaaagcccaggattcctaccagactccccagaatcctggcatcgtgcctaggccaagcgaactgtactactcaaagatcggcccagcccttaagactgtgggcctctctctcgacgtctcacggcgggactggccattgcatgtgatgaaggccgtcctggaagaacttatggaagccactccccctaatttgctggccaaggagttgtggtccagttgtaccacacctgatgagtggtggcgcgtgacccaatcatacgccaggtctaccgcggtcatgtctatggttggctacatcatcggtcttggggacagacacctcgataatgtgctgatcgacatgactacaggggaggttgtgcatatcgactacaatgtttgcttcgaaaaaggcaagtcactgagggtcccagagaaggtgcctttcagaatgacacagaacattgaaactgcacttggggtgaccggagtggagggggtgtttcggctgtcatgtgagcaagtgctgcacatcatgagaagaggtcgcgagaccttgctgacactgctggaagcattcgtatacgaccctctcgtggattggactgccggtggtgaggcaggttttgctggggccgtttatggcggagggggccagcaagcagagagcaaacagagtaaaagggagatggaacgagagatcacgaggagtcttttttcctccagagtcgccgaaatcaaggtgaactggtttaaaaaccgggatgagatgctggtagtgctgccgaaactggacggctctctggacgaatacctgagccttcaggagcaacttaccgatgtcgagaagctgcagggaaagctcctggaggagatcgagttcttagaaggggctgagggcgtggatcacccttcccatactctacagcatagatactccgagcacacccagttgcagacccagcaaagggccgtgcaggaggcaattcaggtaaagctgaacgagttcgagcagtggattacacattatcaggccgcttttaacaatctggaagcgacccaactagcaagcttgctgcaagaaatctccacacagatggatctgggcccgccgtcttatgtccccgctaccgccttccttcagaacgcggggcaggcccacttgatttctcagtgtgaacaactggagggggaggtgggagctctgctgcagcagcgtcgctcggtgctccgaggttgccttgaacagttgcatcactacgcaaccgtggccctgcagtatcctaaagccatctttcagaagcaccgaatagagcaatggaagacatggatggaagagctcatctgtaatacaacagtcgagcgatgtcaggagctttatcgtaagtacgagatgcagtatgcaccccagccaccacccacggtctgtcaatttattacagcaactgagatgaccttacagcggtatgccgcggacatcaatagccgtctgattcgccaggtcgaacgcctgaagcaagaggccgtaacagtgccagtgtgcgaagatcagctgaaggagatcgaacggtgtatcaaagtttttctgcacgaaaatggggaggagggaagccttagcctagcctctgtgataattagcgccctttgtacgctgactcggaggaatctaatgatggaaggcgctgcatctagcgctggcgagcagttggtcgatctcacgagccgagatggggcatggttcctggaggaactgtgttctatgtcaggaaacgtgacctgcctggttcagctgctgaagcagtgtcacctggtgccgcaggacctggatatcccaaaccctatggaggcatctgagactgtgcatttagccaacggagtctatacctcacttcaggagctcaatagtaactttagacagattatcttccctgaggccctacgctgcctcatgaagggagaatacaccctcgagtcaatgttacatgaactggacgggcttatcgagcaaacaaccgatggcgtgccccttcagaccctagtggagtccctgcaagcatacttgcggaacgctgccatggggctggaggaggagacccatgcacattacattgatgtggcacgtctgttgcacgcccaatatggcgagctgatacagccccgcaacggttcagtagacgagacgcctaaaatgtctgccggccaaatgctgctggtggcgtttgacggcatgtttgcccaggttgagactgcatttagcttgttagtcgagaaactgaataaaatggaaatcccaatcgcctggaggaaaatcgatatcatcagggaggctaggtctacacaggtgaactttttcgatgatgacaatcatcggcaagtgctcgaagagatcttctttctgaaacggctgcagactatcaaggaatttttccgcctgtgcggcacgttctcaaaaaccctctcaggctctagttctctggaggatcagaatacagtgaacggtcccgtgcagatcgttaacgtaaaaacgctgtttagaaatagctgtttcagtgaggaccaaatggctaagccgatcaaagccttcacggcagattttgtacgtcaactactgataggactcccgaatcaggctttaggcctgacactgtgttcttttatctctgcactgggggtggatataatcgcccaagtagaggcgaaggattttggagccgagtctaaggtttcagtggatgacctgtgtaaaaaagcagtagaacataacatccagatagggaagttttcgcagttggtgatgaaccgggcaacagtgttggcctccagctatgacaccgcctggaagaaacatgaccttgtgcggcggctggagacatcaatctcttcatgtaagacttccctgcaacgcgtgcagctgcacattgccatgtttcaacagtggcagcatgaagacctgttgataaaccgacctcaggcaatgagcgtgaccccccctcctaggagcgccatcctgacgtccatgaaaaaaaagttgcacacgctcagccagatagagacctcaatcgccaccgtccaggaaaagctggccgccctcgaaagcagcatcgaacaaagactcaagtgggctgggggagcgaacccagccctggcccctgtgctgcaagattttgaggctacgatcgctgaaagaaggaaccttgtgcttaaggagtcccagagggccagccaggtgacattcctctgttcgaacatcatccactttgagagtctgcggactcgaacagcagaagccctgaatctggacgccgccctattcgagcttatcaaacgatgccagcaaatgtgctcttttgcgtctcagtttaatagttccgtcagtgagctggaactgcggcttctccagagggtggacactggacttgagcacccaattggctccagtgaatggctgttgtctgcgcacaaacaactcacacaggacatgtcaactcagcgggcaatacaaacggaaaaggagcaacagattgagaccgtgtgtgagacaatccagaatcttgtggataacataaagaccgttttgaccggacacaataggcaattgggggatgttaaacacttactgaaagccatggctaaagacgaagaggctgcacttgccgatggcgaagatgtcccatacgaaaactcggtaaggcagttcctgggagagtacaaaagctggcaagacaatatccagaccgtgctgttcactctggtgcaagctatgggacaagtacggagtcaggagcacgtcgagatgctgcaggagattacacccaccttgaaggagctgaagacacagtcccagagcatctataacaatttggtgagcttcgcgtccccactcgtcaccgacgccactaacgaatgcagctcacctacttcatctgctacttaccagcctagctttgccgctgctgtacgctctaatacaggccagaaaacccaacctgatgtgatgagtcagaatgctaggaagctcatccagaaaaatttagctacttctgccgatacccctccaagtacagtgcctgggacaggaaagagcgtggcctgcagccctaagaaggccgtcagagatcctaaaactggtaaggctgttcaggaacgcaactcctatgctgtgagcgtgtggaagcgggtcaaggccaagcttgaaggccgggatgtggatccaaatcgcagaatgagcgtggccgaacaagtggattacgtcatcaaagaagcgactaacctggataatttggcccagctgtacgagggctggacagcatgggtgtag

SEQ ID NO: 184411 - DNA, 10986 bp, Artificial Sequence
  derived and/or modified sequence
atgagccggcgcgctcctggaagccgcctgtcgtcaggggggggcggaggcggaactaagtaccctcgcagctggaatgactggcagccccgaaccgattctgcatctgccgaccctgacaacttaaagtactcttccagcagggaccgcgggggatcatcttcttacggtctccagccaagcaattccgcagtagtgtcaaggcagcgccacgatgacactcgggtccacgccgacatccagaacgatgagaagggcgggtactctgttaatggcggttccggggaaaatacatacggccgaaagagcttgggacaggagttgcgcgtgaacaacgtgaccagtccggaatttacctcagtacaacacgggtcaagggccctggctacaaaggacatgcgcaagtcccaggagcggtctatgtcatactccgacgaatcccgtctgagtaatttactgcgcaggatcactagggaggatgaccgagatcgacgccttgccactgtcaaacagttaaaggagttcattcagcagccagagaataaattggtactggtgaagcagctcgacaatatcctagcggctgtacacgacgttctgaacgagtcatcgaaacttctccaagagctgcggcaggaaggggcctgctgccttggcctgctctgtgcgtccttgtcttacgaggctgagaagatcttcaaatggatcttttccaagttctcctccagtgctaaggatgaagtgaagttgttatacttatgtgccacgtacaaggccctggagaccgtgggcgagaaaaaagccttcagtagcgtgatgcaacttgtgatgacctccctacaatctattctcgagaatgtcgataccccggagctcctgtgcaagtgcgtgaagtgcattcttttagtcgcccgatgttatccccatatattctctacgaacttccgagacacagtggacatcctggtaggttggcacattgatcatacccagaaaccttcgttgacccagcaagtttcgggctggctacagagcctggagccgttctgggttgctgaccttgccttctcgaccacacttctggggcaattcctggaggacatggaggcctatgccgaagatcttagccacgtggccagtggagaaagtgtggacgaggatgtgccccccccgagtgtgtctctgcccaagttggcagcgctgctgagggtgttctccactgtggtccgtagcataggcgaaagattctcaccaatcagggggcctcctataaccgaggcatatgtgacagacgtcttataccgggtaatgagatgcgttactgctgcaaaccaagtgtttttctcagaagccgtgcttaccgctgctaacgaatgtgtgggggtcttgctcgggtcacttgatccaagtatgacaatccactgtgatatggtaatcacttacggcctggatcagctcgagaactgccaaacttgtggaactgattacatcatatcagtcctgaatctgttgacactcattgtcgaacagatcaatactaaactcccttcgtcatttgtggagaagctgttcattccctcttccaagttactattccttcgctatcataaagagaaggaggtggttgctgtcgctcacgcggtctaccaagcggtgctctcgctcaagaacattcccgtgctcgaaactgcctataagctcatattaggcgaaatgacttgcgccctcaacaacctactgcattcactgcaactgcctgaggcctgctccgaaatcaaacacgaggcttttaagaaccacgtgttcaacgtggataacgccaaatttgtcgttatttttgacctgagtgcccttacaacaatagggaatgctaagaactcattgattgggatgtgggcgctaagccctaccgtgtttgctcttctcagcaagaacttgatgatcgtccattctgacctcgcagtgcacttcccagcaatccagtatgcggtcttgtatacgctgtatagtcattgtacaaggcacgatcattttatttcctcaagtctgtcttcctcctccccctcactgtttgacggcgcggttattagtaccgtgaccaccgccacaaaaaagcacttctcaattattctaaacctgttggggatcttgctcaagaaggataacctcaaccaagatacccgtaagctactgatgacatgggctctggaggcggccgtgctaatgaaaaagagcgagacctacgcacccctgttctctcttcccagctttcacaaattctgtaaaggactgcttgctaacacgctcgtcgaagacgtgaacatctgcttgcaagcctgcagctcactgcatgcactctcttcatcactccccgatgacctgctccagagatgtgtggatgtgtgtcgcgtgcaacttgtgcatagtggcacaaggataagacaggccttcggcaaactactgaaatcaatcccgctggatgtcgtgctgtctaataacaatcatacggaaattcaagaaatttcactggcgttacgatctcacatgagcaaggccccgtccaacactttccacccacaggacttttcggacgttataagctttatcttatacggaaactcacatcgcacaggaaaggacaattggttagaacgccttttttactcatgccagcggctggataaacgggaccaaagcacaatcccccgcaatctgcttaaaaccgacgcggtgctttggcaatgggccatctgggaggccgcccagttcaccgtgctgagcaaattgcgcaccccactgggccgggcccaggacactttccagactattgagggcatcatccgcagcttagcagctcatacacttaaccccgatcaggacgtcagtcagtggaccaccgccgataacgacgaggggcacggtaacaatcagctcaggctggtccttctgctccaatacctggaaaacctggaaaagctgatgtacaacgcgtacgagggatgtgcgaacgctctaacatcgccccccaaggtaattaggacattcttttatactaatcggcagacatgccaggattggctgaccaggattcgattgtcaatcatgcgggtcggccttctggccggacaaccggctgtgactgtacggcacggatttgatttgctgaccgagatgaagacgacatcattgagccaaggcaacgagctcgaagttactatcatgatggtcgtggaggcactgtgcgagctccactgtccggaagctatccaaggcatcgcagtttggtcatccagcatagtgggtaagaatctgctctggatcaactccgtagcccagcaggccgaggggcgctttgaaaaggcttccgtggaataccaagaacacctgtgtgccatgactggggtggactgctgcatctcctccttcgacaagtccgtgcttaccttggcaaatgccgggcgcaactccgcctcacctaagcactcgctcaacggtgagagtaggaaaacggtcctgtcaaagcccaccgacagttctccggaggttatcaattatctgggcaataaggcctgcgaatgctacatatcgattgctgattgggccgcagtccaggaatggcagaacgcgattcacgatctcaaaaagagtacttcatccaccagcttgaatcttaaagcagacttcaactacatcaagtccctgagctcgttcgagtcagggaagtttgtggagtgtactgagcagctggagctcctgccaggtgagaatatcaatctgctcgctggaggatcaaaggaaaagatcgatatgaagaagctattgcctaacatgttgagtcccgatcccagggaactccagaaaagcatagaggtgcagttgctgcggtccagcgtatgtcttgctacagcccttaatccaattgagcaggaccagaagtggcagtctatcactgaaaacgtggtgaagtatctcaagcagacgagtagaattgctatcggaccgctgcgattaagcaccctcaccgtgagccagtccctgccggtcttgagcacacttcagctgtattgcagcagcgccctggagaacacagtttccaaccgactgtctacggaagactgcctgattcctctttttagcgaggcactgaggtcgtgtaagcaacatgatgtacggccatggatgcaggctctgcgctatactatgtatcaaaatcagctgctagagaaaatcaaagaacaaaccgtgcccatcaggagccatctaatggagttagggctcactgccgctaaattcgcaagaaaaagggggaacgtatccctggccacccgattattggcccaatgcagtgaggtgcagctgggaaagacaacaaccgcacaggacctggtgcagcactttaagaagctatcaacacagggccaggtggatgagaaatgggggccagagctcgacatcgagaagacaaagctgttgtacactgccggccagagtacccacgccatggaaatgcttagtagctgcgcaatctcgttctgtaagtcggtgaaagcagagtacgccgttgctaagtccatcctgacattagctaaatggattcaggctgaatggaaagaaataagcggtcagctgaagcaggtgtatagagctcaacatcaacagaatttcaccggcttgtccacactgtccaaaaatatcctcaccctgatcgaactcccgagcgttaacactatggaggaggagtatcccaggatcgagagcgagagtacggttcacattggggtcggagaaccagacttcattctcggccagctgtatcacctgtccagcgttcaagcgccggaggtggctaaaagttgggcagctctagcgtcctgggcataccggtggggccgtaaagtagtggataacgcaagccagggagagggggtccggctattgcctcgcgaaaagtctgaagtgcagaacctcctgccagatactatcaccgaggaggaaaaagaacgcatatacggtatcctgggacaggcagtctgcagacccgccggcattcaggatgaggatataacattgcaaattacagagagcgaagataacgaggaggacgatatggtggatgtgatatggcgacaactcattagtagctgcccctggctttctgagctggatgaatccgccaccgaaggagtgattaaagtctggcgcaaggttgtagataggatcttcagcttgtacaagctgtcctgtagtgcatacttcacattccttaaattgaacgccggacagatccccctcgacgaggacgatccgagactgcatctgtcacaccgggtcgaacaaagtaccgatgacatgatcgtaatggccactttacggctgctccgactgctcgtcaagcacgctggtgaactgaggcagtatttggaacacggactcgagaccacacccacagccccctggcggggcattattccgcagctcttctctcggcttaaccaccctgaggtttacgtgcggcagagcatctgtaatcttctctgccgtgtcgcacaggacagcccgcatctcattctatatcctgcaatcgtgggcaccattagccttagctccgagtcccaggctagcggcaataagtttagtactgcaattccaaccctgctagggaacatccagggcgaggagctcctggtgtccgagtgcgagggcggctccccaccggcatcacaggactcgaataaggatgagccaaagtctgggctcaacgaagatcaagcaatgatgcaggactgttattccaaaatagtggacaagcttagcagtgctaatcctactatggtgctgcaggtgcagatgcttgtggcagaattgaggcgggtgacagtgttatgggacgaactttggctgggagtgcttctgcagcaacacatgtatgtgctgaggaggattcagcagcttgaggacgaggtcaaaagagtacagaataataatacactcagaaaggaggaaaagatcgcaattatgagagagaaacataccgccctgatgaaacccatcgtgttcgccctggagcatgtcaggagtattactgccgcacccgccgaaacccctcatgagaagtggttccaggacaactacggagacgcaatcgaaaatgcgctggaaaaacttaaaactcctctcaatccagcgaaaccaggcagctcatggattccattcaaggaaattatgctctcgcttcaacagcgcgctcagaaacgggcatcctacattctgaggctagaagaaatcagtccctggctcgctgctatgacgaacaccgagatagctctgccaggcgaagtgtcagccagggataccgtcacaatacatagtgtggggggcacaatcactattttacctactaaaacaaaacccaaaaagctgctgtttctaggttcagatggcaaaagttatccgtaccttttcaagggcctcgaagacttgcatctggatgagcgcattatgcagttcttgtctattgtcaataccatgttcgcgaccatcaatcgccaagaaacccctcggtttcacgctcgacactactccgtgactcccctagggacgaggtcggggctcatccagtgggtggatggtgccactccactgtttggtttgtacaagaggtggcagcaacgagaagcggcattacaggcccagaaggctcaggactcctatcagaccccacagaatccagggatagttcctcggcctagtgaattatattatagtaaaatcggccctgccctgaaaaccgtcggcctgtcactggacgtgtctcgccgagattggcctctccatgttatgaaggctgtcttagaggagctcatggaggctactccccccaaccttctggctaaggagctgtggagttcttgcacgactcccgacgagtggtggcgggtaactcaatcatacgccagatccacagctgtgatgtccatggtgggctatattatcggccttggcgatcggcaccttgacaacgttttgattgacatgacgacaggagaggttgtgcacatagattataatgtttgctttgagaaagggaagtctcttagggtgcctgaaaaggtacctttccgcatgacacagaacattgaaaccgcactcggggttacaggcgtggaaggtgtattccgtctttcctgcgaacaggtgctgcacatcatgcggcgagggcgcgaaacacttctcaccctgttagaagcttttgtttatgatcctctcgttgattggacagccgggggcgaagcaggattcgccggagctgtgtacggaggtggaggacagcaggcagagagcaaacaatctaaaagagaaatggagcgggagattacccgctccctgttctcttcccgtgtggccgaaattaaggtgaactggttcaaaaacagagatgagatgttggtggtcctgcctaagttggacgggagtttagacgagtatctctctctgcaggagcagctgactgacgtggaaaaactccaggggaagttgctggaggagatcgagtttctcgagggggctgaaggggtagatcacccgtctcatacattgcagcatcggtattctgaacacacacagctccagacccagcaaagggcagtccaggaggccattcaagttaagctgaacgaatttgagcagtggatcacccactatcaggcagcttttaataacctagaggcaacccagctcgcttctctgctgcaggaaatcagtacccagatggacttgggtccaccaagctatgtccccgctaccgcatttttgcagaatgcaggtcaggctcacctgatctctcagtgcgagcaactggagggagaagtcggagccctattacaacaacgccgctccgtcctgcgggggtgcttggaacaattacatcattacgctacagttgccctgcagtacccgaaggccatcttccagaagcaccggatcgaacagtggaaaacttggatggaagagttaatctgtaacacaaccgtggaaaggtgtcaggaactctatcggaagtacgagatgcagtatgcgccgcaacctccaccgactgtgtgccagttcatcacagccaccgagatgacactgcagcggtacgccgccgacatcaactccagacttataagacaggtcgagagactcaaacaggaggcagtaaccgtgcctgtctgcgaggaccaattgaaagagatagagagatgcatcaaggtgttcctgcatgaaaacggtgaagagggaagtctttccctggcttcagtgattatcagtgccttatgcacactgacccgcaggaacctgatgatggaaggcgccgccagttcggctggggagcagttagtggatttgaccagtagagatggcgcctggtttcttgaagaattgtgcagtatgtctggcaatgtgacctgcctggtgcagctgctgaaacagtgtcacctggtgccccaggacctcgatattcccaatccaatggaagcatctgagactgtgcacttggcgaatggggtatatacgtcactgcaggagctgaactccaactttagacaaattattttccctgaagccttgaggtgcctcatgaagggtgagtacacactggagtcaatgctgcacgaactagacggactgatcgagcagactaccgacggcgtacctctgcagactctggtggagtcactccaggcttacttgagaaacgctgccatggggcttgaggaggaaactcatgcacattacattgatgtggccaggctactgcatgcgcagtatggagagctgattcagccccgcaatgggtctgtggatgagactcccaagatgtctgccggtcagatgctcctcgttgcattcgatggtatgttcgcccaagtagaaacagctttctccttactggtagagaaattaaacaaaatggagatcccaatcgcctggcgcaagattgacatcattagagaagctaggtctacccaggtaaacttctttgatgacgataaccacaggcaggtgctcgaagagatctttttcctcaaacgactccagactataaaagagtttttccgattgtgtggcacattctctaagaccttgtcagggtcaagctctctcgaggatcagaacaccgtgaatgggcccgtccagatcgttaacgtgaagaccctctttcgtaacagttgcttctcagaagaccagatggctaaacctatcaaggccttcacagctgattttgtgcgccaattacttattgggctgcctaatcaggccctgggactcaccctttgttcttttatctcagcactgggggtcgacattatagcgcaggtagaagctaaagactttggcgccgagtctaaagtttccgttgacgatctctgcaagaaggcagtggagcacaacattcagataggaaaattcagccaactagtgatgaatagagccacggtcctggctagttcctacgatacagcatggaagaagcatgacctggtgcgtagactggagacttctattagctcctgtaagaccagcctgcagagggtgcaactccatatagctatgttccagtggcagcacgaagatcttttaatcaacagacctcaagccatgagcgtgacccccccccccaggtcagccattctgaccagcatgaaaaagaagctccacactctgtcccaaatagagactagcattgccacggtccaagaaaagctggcagcattggagagtagtatcgaacagcggttaaaatgggccggaggtgctaatccggccctagcccctgtcctgcaggattttgaggcaactatcgccgagagaaggaacctggtcctgaaggagagccaacgtgctagtcaggtgacttttctgtgctccaatattatccacttcgaatctctgaggacccgaacggctgaagctctcaacttggatgctgcgctgtttgagctgatcaagcgctgtcaacaaatgtgctcttttgcaagtcagtttaactctagcgtgagcgaactggagctccgattactccaacgtgtcgacacaggtctggaacaccccatcgggtccagtgagtggctgctgtccgcacacaagcagctgacacaggacatgtctacgcagagggccatccagactgaaaaggagcagcagattgaaactgtctgcgagactatccaaaaccttgtcgataatattaaaactgttctcactggtcacaacagacagctgggggacgtgaagcatctgctcaaggctatggcaaaggacgaggaggcagctctggcggatggcgaggacgtgccctacgaaaattccgtgcgtcagtttctgggggaatacaaatcatggcaggacaatatacagaccgtgctgttcaccctggtgcaagccatggggcaggtcagatcgcaggaacatgttgagatgctccaggagatcacccccacattgaaagagctgaagacccagtcacagtccatctataacaatctggtttccttcgcctcccccctggtgactgacgccaccaacgagtgcagcagtcctacaagcagcgccacgtaccaaccttcctttgcagcagcagttagaagcaacaccgggcagaagacacaacccgatgttatgtctcagaatgcacggaagctcatccaaaagaatctagctacgtccgccgacactccgccttccaccgttccgggtacgggtaagagcgttgcatgttcccccaaaaaggcggttagagaccccaagactggtaaggcagtccaggaacgcaacagctacgctgtgtccgtttggaaaagagtgaaggccaagttagagggtagagacgtggatccaaacaggcgaatgtcagtggccgagcaggttgattacgtgatcaaagaagccacaaacctggataacctcgctcagctctatgagggctggacggcttgggtctag

SEQ ID NO: 184412 - DNA, 10989 bp, Artificial Sequence
  derived and/or modified sequence
atgagcagaagagcccctggcagccggctgagcagcggcggcggcggcggcggcaccaagtaccccaggtcctggaatgactggcagcccaggacagacagcgccagcgctgaccctgacaacctgaagtacagcagcagccgggacagaggaggcagcagcagctatggcctgcagcccagcaacagcgctgtggtgtcccggcagagacatgatgacaccagggtgcacgccgacatccagaatgatgagaagggcggctacagcgtgaatggaggcagcggggagaacacctacggcaggaagagcctgggccaggagctgcgggtgaacaacgtgaccagccctgagttcacctctgtgcagcacggcagccgggccctggccaccaaggacatgaggaagagccaggagaggtccatgagctacagtgatgagagccggctgagcaacctgctgcggcgcatcaccagagaagatgaccgggaccggcggctggccaccgtgaagcagctgaaggagttcatccagcagcctgagaacaagctggtgctggtgaagcagctggacaacatcctggccgctgtgcatgatgtgctgaatgaaagcagcaagctgctgcaggagctgcggcaggagggcgcctgctgcctgggcctgctgtgtgccagcctgtcctatgaagctgagaagatcttcaagtggatcttcagcaagttcagcagcagcgccaaggatgaggtgaagctgctgtacctgtgtgccacctacaaggccctggagaccgtgggggagaagaaggccttcagctctgtgatgcagctggtgatgaccagcctgcagagcatcctggagaatgtggacaccccagagctgctgtgcaagtgtgtgaagtgcatcctgctggtggcccgctgctacccccacatcttcagcaccaacttccgggacacagtggacatcctggtgggctggcacatcgaccacacccagaagcccagcctgacccagcaggtgtctggctggctgcagagcctggagcccttctgggtggccgacctggccttcagcaccaccctgctgggccagttcctggaggacatggaggcctatgcagaggacctgagccacgtggccagcggggagagcgtggatgaagatgtgcccccacccagcgtgtccctgcccaagctggccgccctgctgcgggtcttcagcacagtggtgcgcagcatcggggagcgcttcagccccatccggggcccccccatcacagaggcctacgtgacagatgtgctgtacagagtgatgagatgtgtgacagctgccaaccaggtgttcttcagcgaggccgtgctgacagctgccaatgaatgtgtgggcgtgctgctgggcagcctggaccccagcatgaccatccactgtgacatggtgatcacctacggcctggaccagctggagaactgccagacctgtggcacagactacatcatctctgtgctgaacctgctgaccctgattgtggagcagatcaacaccaagctgcccagcagctttgtggagaagctgttcatccccagcagcaagctgctcttcctgcgctaccacaaggagaaggaggtggtggccgtggcccatgctgtgtaccaggccgtgctgagcctgaagaacatccctgtgctggagacagcctacaagctgatcctgggggagatgacctgtgccctgaacaacctgctgcacagcctgcagctgcctgaggcctgcagcgagatcaagcatgaggccttcaagaaccacgtgttcaacgtggacaatgccaagtttgtggtgatctttgacctgagcgccctgaccaccatcggaaatgccaagaacagcctgattggcatgtgggccctgagccccaccgtgtttgccctgctgagcaagaacctgatgattgtgcacagcgacctggccgtgcacttccctgccatccagtatgctgtgctgtacaccctgtacagccactgcaccaggcatgaccacttcatcagcagcagcctgagcagcagcagccccagcctgtttgatggagctgtgatcagcacagtgaccacagccaccaagaagcacttcagcatcatcctgaacctgctgggcatcctgctgaagaaggacaacctgaaccaggacaccaggaagctgctgatgacctgggccctggaggccgctgtgctgatgaagaagtctgagacctacgcccccctcttcagcctgcccagcttccacaagttctgcaagggcctgctggccaacaccctggtggaggatgtgaacatctgcctgcaggcctgcagcagcctgcacgccctgagcagcagcctgcctgatgacctgctgcagagatgtgtggatgtgtgccgggtgcagctggtgcacagcggcacccgcatccggcaggccttcggcaagctgctgaagagcatccccctggatgtggtgctgagcaacaacaaccacacagagatccaggagatcagcctggccctgcggagccacatgagcaaggcccccagcaacaccttccacccccaggacttcagtgatgtgatctccttcatcctgtatggcaacagccacaggacaggcaaggacaactggctggagcggctcttctacagctgccagaggctggacaagagggaccagagcaccatccccaggaacctgctgaagacagatgctgtgctgtggcagtgggccatctgggaggccgcccagttcaccgtgctgagcaagctgcggacccccctgggccgggcccaggacaccttccagaccatcgagggcatcatccgcagcctggccgcccacaccctgaacccagaccaggatgtgtcccagtggaccacagctgacaatgatgagggccacggcaacaaccagctgcggctggtgctgctgctgcagtacctggagaacctggagaagctgatgtacaatgcctatgagggctgtgccaatgccctgaccagcccccccaaggtgatccgcaccttcttctacaccaaccggcagacctgccaggactggctgacccgcatccggctgagcatcatgagggtgggcctgctggccggccagcctgctgtgacagtgcgccacggctttgacctgctgacagagatgaagaccaccagcctgagccagggcaatgagctggaggtgaccatcatgatggtggtggaggccctgtgtgagctgcactgcccagaggccatccagggcattgctgtgtggagcagcagcatcgtgggcaagaacctgctgtggatcaacagcgtggcccagcaggccgagggccgctttgagaaggcctctgtggagtaccaggagcacctgtgtgccatgactggagtggactgctgcatcagcagctttgacaagtctgtgctgaccctggccaatgccggcaggaacagcgccagccccaagcacagcctgaatggagagagcaggaagacagtgctgagcaagcccacagacagcagccctgaggtgatcaactacctgggcaacaaggcctgtgagtgctacatcagcattgctgactgggccgctgtgcaggagtggcagaatgccatccatgacctgaagaagagcaccagcagcaccagcctgaacctgaaggctgacttcaactacatcaagagcctgagcagctttgaaagtggcaagtttgtggagtgcacagagcagctggagctgctgcctggagagaacatcaacctgctggccggcggcagcaaggagaagattgacatgaagaagctgctgcccaacatgctgagcccagacccccgggagctgcagaagagcattgaggtgcagctgctgcggagctctgtgtgcctggccacagccctgaaccccatcgagcaggaccagaagtggcagagcatcacagaaaatgtggtgaagtacctgaagcagaccagccgcatcgccatcggccccctgcggctgagcaccctgactgtgtcccagagcctgcctgtgctgagcaccctgcagctgtactgcagcagcgccctggagaacacagtgagcaaccggctgagcacagaggactgcctgatccccctcttcagcgaggccctgcggagctgcaagcagcatgatgtgcggccctggatgcaggccctgcgctacaccatgtaccagaaccagctgctggagaagatcaaggagcagacagtgcccatccgcagccacctgatggagctgggcctgacagctgccaagtttgccaggaagagaggaaatgtgtccctggccacccggctgctggcccagtgcagcgaggtgcagctgggcaagaccaccacagcccaggacctggtgcagcacttcaagaagctgagcacccagggccaggtggatgagaagtggggccctgagctggacatcgagaagaccaagctgctgtacacagctggccagagcacccacgccatggagatgctgagcagctgtgccatctccttctgcaagtctgtgaaggccgagtatgctgtggccaagagcatcctgaccctggccaagtggatccaggccgagtggaaggagatcagcggccagctgaagcaggtgtaccgggcccagcaccagcagaacttcaccggcctgagcaccctgagcaagaacatcctgaccctgattgagctgcccagcgtgaacaccatggaggaggagtacccccgcatcgagagcgagagcacagtgcacatcggcgtgggggagccagacttcatcctgggccagctgtaccacctgagctctgtgcaggcccctgaggtggccaagtcctgggccgccctggcctcctgggcctaccgctggggcaggaaggtggtggacaatgccagccagggcgagggcgtgcggctgctgccccgggagaagtctgaggtgcagaacctgctgcctgacaccatcacagaggaggagaaggagcgcatctacggcatcctgggccaggccgtgtgcaggcctgctggcatccaggatgaggacatcaccctgcagatcacagaaagtgaggacaatgaggaggatgacatggtggatgtgatctggaggcagctgatcagcagctgcccctggctgtctgagctggatgagagcgccacagagggcgtcatcaaggtgtggaggaaggtggtggaccgcatcttcagcctgtacaagctgagctgcagcgcctacttcaccttcctgaagctgaatgccggccagatccccctggatgaagatgacccccggctgcacctgagccaccgggtggagcagagcacagatgacatgattgtgatggccaccctgcggctgctgcggctgctggtgaagcacgccggggagctgcggcagtacctggagcacggcctggagaccacccccacagccccctggaggggcatcatcccccagctgttcagccggctgaaccaccctgaggtgtatgtgcggcagagcatctgcaacctgctgtgccgggtggcccaggacagcccccacctgatcctgtacccagccatcgtgggcaccatcagcctgagcagcgagagccaggccagcggcaacaagttcagcacagccatccccaccctgctgggcaacatccagggcgaggagctgctggtgtctgaatgtgagggcggcagccccccagccagccaggacagcaacaaggatgagcccaagagcggcctgaatgaagaccaggccatgatgcaggactgctacagcaagatcgtggacaagctgagcagcgccaaccccaccatggtgctgcaggtgcagatgctggtggccgagctgcggcgggtgacagtgctgtgggatgagctgtggctgggcgtgctgctgcagcagcacatgtatgtgctgcggcgcatccagcagctggaggatgaggtgaagagggtgcagaacaacaacaccctgaggaaggaggagaagatcgccatcatgagggagaagcacacagccctgatgaagcccatcgtgtttgccctggagcacgtgcgcagcatcacagctgccccagctgagacccctcatgagaagtggttccaggacaactatggagatgccattgaaaatgccctggagaagctgaagacccccctgaacccagccaagccaggcagctcctggatccccttcaaggagatcatgctgagcctgcagcagagggcccagaagagggccagctacatcctgcggctggaggagatcagcccctggctggccgccatgaccaacacagaaattgccctgcccggggaggtgtctgcccgggacacagtgaccatccacagcgtgggcggcaccatcaccatcctgcccaccaagaccaagcccaagaagctgctcttcctgggcagtgatggcaagagctacccctacctgttcaagggcctggaggacctgcacctggatgagcgcatcatgcagttcctgagcatcgtgaacaccatgtttgccaccatcaaccggcaggagaccccccgcttccacgcccggcactacagcgtgacccccctgggcaccaggagcggcctcatccagtgggtggatggagccacccccctgtttggcctgtacaagcgctggcagcagcgggaggccgccctgcaggcccagaaggcccaggacagctaccagaccccccagaaccctggcatcgtgccccggcccagcgagctgtactacagcaagattggccctgccctgaagacagtgggcctgagcctggatgtgtcccggcgggactggcccctgcacgtgatgaaggctgtgctggaggagctgatggaggccaccccacccaacctgctggccaaggagctgtggagcagctgcaccaccccagatgagtggtggagggtgacccagagctatgcccggagcacagctgtgatgtccatggtgggctacatcatcggcctgggggacagacacctggacaacgtgctgattgacatgaccactggagaggtggtgcacatcgactacaacgtgtgctttgagaagggcaagagcctgcgggtgcctgagaaggtgcccttcaggatgacccagaacattgaaacagccctgggcgtgactggagtggagggcgtcttccggctgagctgtgagcaggtgctgcacatcatgaggcggggccgggagaccctgctgaccctgctggaggcctttgtgtatgaccccctggtggactggacagctggaggagaggccggctttgctggagctgtgtatggaggcggcggccagcaggccgagagcaagcagagcaagcgggagatggagcgggagatcaccaggagcctcttcagcagccgggtggccgagatcaaggtgaactggttcaagaacagagatgagatgctggtggtgctgcccaagctggatggcagcctggatgagtacctgagcctgcaggagcagctgacagatgtggagaagctgcagggcaagctgctggaggagattgagttcctggagggcgctgagggcgtggaccaccccagccacaccctgcagcaccgctacagcgagcacacccagctgcagacccagcagagagctgtgcaggaggccatccaggtgaagctgaatgaatttgagcagtggatcacccactaccaggccgccttcaacaacctggaggccacccagctggccagcctgctgcaggagatcagcacccagatggacctgggcccccccagctatgtgcctgccacagccttcctgcagaatgccggccaggcccacctgatcagccagtgtgagcagctggagggggaggtgggcgccctgctgcagcagaggagatctgtgctgcggggctgcctggagcagctgcaccactacgccaccgtggccctgcagtaccccaaggccatcttccagaagcacagaattgagcagtggaagacctggatggaggagctgatctgcaacaccaccgtggagcgctgccaggagctgtacagaaaatatgagatgcagtatgccccccagcccccacccaccgtgtgccagttcatcacagccacagagatgaccctgcagagatatgctgctgacatcaacagccgcctcatccggcaggtggagcggctgaagcaggaggccgtgacagtgcctgtgtgtgaggaccagctgaaggagattgagcgctgcatcaaggtgttcctgcatgaaaatggagaggagggcagcctgagcctggccagcgtcatcatcagcgccctgtgcaccctgaccaggaggaacctgatgatggagggcgccgccagcagcgctggggagcagctggtggacctgaccagcagagatggagcctggttcctggaggagctgtgcagcatgtctggaaatgtgacctgcctggtgcagctgctgaagcagtgccacctggtgccccaggacctggacatccccaaccccatggaggccagcgagaccgtgcacctggccaacggggtgtacaccagcctgcaggagctgaacagcaacttccggcagatcatcttccctgaggccctgcgctgcctgatgaagggggagtacaccctggagagcatgctgcacgagctggatggcctgattgagcagaccacagatggagtgcccctgcagaccctggtggagagcctgcaggcctacctgagaaatgctgccatgggcctggaggaggagacccacgcccactacattgatgtggcccggctgctgcacgcccagtatggagagctgatccagcccagaaatggatctgtggatgagacccccaagatgtctgctggccagatgctgctggtggcctttgatggcatgtttgcccaggtggagacagccttcagcctgctggtggagaagctgaacaagatggagatccccatcgcctggaggaagattgacatcatccgggaggcccggagcacccaggtgaacttctttgatgatgacaaccaccggcaggtgctggaggagatcttcttcctgaagaggctgcagaccatcaaggagttcttccggctgtgtggcaccttcagcaagaccctgagcggcagcagcagcctggaggaccagaacacagtgaatggacctgtgcagatcgtgaatgtgaagaccctcttcaggaacagctgcttcagcgaggaccagatggccaagcccatcaaggccttcaccgctgactttgtgcggcagctgctgattggcctgcccaaccaggccctgggcctgaccctgtgcagcttcatcagcgccctgggcgtggacatcatcgcccaggtggaggccaaggactttggagctgagagcaaggtgtctgtggatgacctgtgcaagaaggctgtggagcacaacatccagatcggcaagttcagccagctggtgatgaacagagccaccgtgctggccagcagctatgacacagcctggaagaagcatgacctggtgcggcggctggagaccagcatcagcagctgcaagaccagcctgcagagggtgcagctgcacatcgccatgttccagcagtggcagcacgaggacctgctgatcaaccggccccaggccatgtctgtgaccccaccacccaggtctgccatcctgacctccatgaagaagaagctgcacaccctgagccagatcgagaccagcatcgccaccgtgcaggagaagctggccgccctggagagcagcattgagcagaggctgaagtgggccggcggggccaacccagccctggcccctgtgctgcaggactttgaggccaccatcgccgagaggaggaacctggtgctgaaggagagccagagggccagccaggtgaccttcctgtgcagcaacatcatccactttgagagcctgcggaccaggacagctgaggccctgaacctggatgctgccctgtttgagctgatcaagcgctgccagcagatgtgcagctttgccagccagttcaacagctctgtgtctgagctggagctgcggctgctgcagagggtggacaccggcctggagcaccccatcggcagcagcgagtggctgctgagcgcccacaagcagctgacccaggacatgagcacccagagggccatccagacagagaaggagcagcagatcgagaccgtgtgtgagaccatccagaacctggtggacaacatcaagacagtgctgaccggccacaaccggcagctgggagatgtgaagcacctgctgaaggccatggccaaggatgaggaggccgccctggctgatggagaagatgtgccctatgagaacagcgtgcggcagttcctgggggagtacaagtcctggcaggacaacatccagacagtgctcttcaccctggtgcaggccatgggccaggtgcgcagccaggagcacgtggagatgctgcaggagatcacccccaccctgaaggagctgaagacccagagccagagcatctacaacaacctggtgtcctttgccagccccctggtgacagatgccaccaatgaatgtagcagccccaccagcagcgccacctaccagcccagctttgctgctgctgtgcgcagcaacacaggccagaagacccagccagatgtgatgagccagaatgccaggaagctgatccagaagaacctggccaccagcgctgacaccccacccagcacagtgcccggcaccgggaagtctgtggcctgcagccccaagaaggctgtgcgggaccccaagacaggcaaggctgtgcaggagaggaacagctatgctgtgtctgtgtggaagagggtgaaggccaagctggagggcagagatgtggaccccaacagaaggatgtctgtggccgagcaggtggactatgtgatcaaggaggccaccaacctggacaacctggcccagctgtatgagggctggacagcctgggtgtag

SEQ ID NO: 184413 - DNA, 10986 bp, Artificial Sequence
  derived and/or modified sequence
atgagcagaagagcccctggcagccggctgagcagcggcggcggcggcggcggcaccaagtaccccaggtcctggaatgactggcagcccaggacagacagcgccagcgctgaccctgacaacctgaagtacagcagcagccgggacagaggaggcagcagcagctatggcctgcagcccagcaacagcgctgtggtgtcccggcagagacatgatgacaccagggtgcacgccgacatccagaatgatgagaagggcggctacagcgtgaatggaggcagcggggagaacacctacggcaggaagagcctgggccaggagctgcgggtgaacaacgtgaccagccctgagttcacctctgtgcagcacggcagccgggccctggccaccaaggacatgaggaagagccaggagaggtccatgagctacagtgatgagagccggctgagcaacctgctgcggcgcatcaccagagaagatgaccgggaccggcggctggccaccgtgaagcagctgaaggagttcatccagcagcctgagaacaagctggtgctggtgaagcagctggacaacatcctggccgctgtgcatgatgtgctgaatgaaagcagcaagctgctgcaggagctgcggcaggagggcgcctgctgcctgggcctgctgtgtgccagcctgtcctatgaagctgagaagatcttcaagtggatcttcagcaagttcagcagcagcgccaaggatgaggtgaagctgctgtacctgtgtgccacctacaaggccctggagaccgtgggggagaagaaggccttcagctctgtgatgcagctggtgatgaccagcctgcagagcatcctggagaatgtggacaccccagagctgctgtgcaagtgtgtgaagtgcatcctgctggtggcccgctgctacccccacatcttcagcaccaacttccgggacacagtggacatcctggtgggctggcacatcgaccacacccagaagcccagcctgacccagcaggtgtctggctggctgcagagcctggagcccttctgggtggccgacctggccttcagcaccaccctgctgggccagttcctggaggacatggaggcctatgcagaggacctgagccacgtggccagcggggagagcgtggatgaagatgtgcccccacccagcgtgtccctgcccaagctggccgccctgctgcgggtcttcagcacagtggtgcgcagcatcggggagcgcttcagccccatccggggcccccccatcacagaggcctacgtgacagatgtgctgtacagagtgatgagatgtgtgacagctgccaaccaggtgttcttcagcgaggccgtgctgacagctgccaatgaatgtgtgggcgtgctgctgggcagcctggaccccagcatgaccatccactgtgacatggtgatcacctacggcctggaccagctggagaactgccagacctgtggcacagactacatcatctctgtgctgaacctgctgaccctgattgtggagcagatcaacaccaagctgcccagcagctttgtggagaagctgttcatccccagcagcaagctgctcttcctgcgctaccacaaggagaaggaggtggtggccgtggcccatgctgtgtaccaggccgtgctgagcctgaagaacatccctgtgctggagacagcctacaagctgatcctgggggagatgacctgtgccctgaacaacctgctgcacagcctgcagctgcctgaggcctgcagcgagatcaagcatgaggccttcaagaaccacgtgttcaacgtggacaatgccaagtttgtggtgatctttgacctgagcgccctgaccaccatcggaaatgccaagaacagcctgattggcatgtgggccctgagccccaccgtgtttgccctgctgagcaagaacctgatgattgtgcacagcgacctggccgtgcacttccctgccatccagtatgctgtgctgtacaccctgtacagccactgcaccaggcatgaccacttcatcagcagcagcctgagcagcagcagccccagcctgtttgatggagctgtgatcagcacagtgaccacagccaccaagaagcacttcagcatcatcctgaacctgctgggcatcctgctgaagaaggacaacctgaaccaggacaccaggaagctgctgatgacctgggccctggaggccgctgtgctgatgaagaagtctgagacctacgcccccctcttcagcctgcccagcttccacaagttctgcaagggcctgctggccaacaccctggtggaggatgtgaacatctgcctgcaggcctgcagcagcctgcacgccctgagcagcagcctgcctgatgacctgctgcagagatgtgtggatgtgtgccgggtgcagctggtgcacagcggcacccgcatccggcaggccttcggcaagctgctgaagagcatccccctggatgtggtgctgagcaacaacaaccacacagagatccaggagatcagcctggccctgcggagccacatgagcaaggcccccagcaacaccttccacccccaggacttcagtgatgtgatctccttcatcctgtatggcaacagccacaggacaggcaaggacaactggctggagcggctcttctacagctgccagaggctggacaagagggaccagagcaccatccccaggaacctgctgaagacagatgctgtgctgtggcagtgggccatctgggaggccgcccagttcaccgtgctgagcaagctgcggacccccctgggccgggcccaggacaccttccagaccatcgagggcatcatccgcagcctggccgcccacaccctgaacccagaccaggatgtgtcccagtggaccacagctgacaatgatgagggccacggcaacaaccagctgcggctggtgctgctgctgcagtacctggagaacctggagaagctgatgtacaatgcctatgagggctgtgccaatgccctgaccagcccccccaaggtgatccgcaccttcttctacaccaaccggcagacctgccaggactggctgacccgcatccggctgagcatcatgagggtgggcctgctggccggccagcctgctgtgacagtgcgccacggctttgacctgctgacagagatgaagaccaccagcctgagccagggcaatgagctggaggtgaccatcatgatggtggtggaggccctgtgtgagctgcactgcccagaggccatccagggcattgctgtgtggagcagcagcatcgtgggcaagaacctgctgtggatcaacagcgtggcccagcaggccgagggccgctttgagaaggcctctgtggagtaccaggagcacctgtgtgccatgactggagtggactgctgcatcagcagctttgacaagtctgtgctgaccctggccaatgccggcaggaacagcgccagccccaagcacagcctgaatggagagagcaggaagacagtgctgagcaagcccacagacagcagccctgaggtgatcaactacctgggcaacaaggcctgtgagtgctacatcagcattgctgactgggccgctgtgcaggagtggcagaatgccatccatgacctgaagaagagcaccagcagcaccagcctgaacctgaaggctgacttcaactacatcaagagcctgagcagctttgaaagtggcaagtttgtggagtgcacagagcagctggagctgctgcctggagagaacatcaacctgctggccggcggcagcaaggagaagattgacatgaagaagctgctgcccaacatgctgagcccagacccccgggagctgcagaagagcattgaggtgcagctgctgcggagctctgtgtgcctggccacagccctgaaccccatcgagcaggaccagaagtggcagagcatcacagaaaatgtggtgaagtacctgaagcagaccagccgcatcgccatcggccccctgcggctgagcaccctgactgtgtcccagagcctgcctgtgctgagcaccctgcagctgtactgcagcagcgccctggagaacacagtgagcaaccggctgagcacagaggactgcctgatccccctcttcagcgaggccctgcggagctgcaagcagcatgatgtgcggccctggatgcaggccctgcgctacaccatgtaccagaaccagctgctggagaagatcaaggagcagacagtgcccatccgcagccacctgatggagctgggcctgacagctgccaagtttgccaggaagagaggaaatgtgtccctggccacccggctgctggcccagtgcagcgaggtgcagctgggcaagaccaccacagcccaggacctggtgcagcacttcaagaagctgagcacccagggccaggtggatgagaagtggggccctgagctggacatcgagaagaccaagctgctgtacacagctggccagagcacccacgccatggagatgctgagcagctgtgccatctccttctgcaagtctgtgaaggccgagtatgctgtggccaagagcatcctgaccctggccaagtggatccaggccgagtggaaggagatcagcggccagctgaagcaggtgtaccgggcccagcaccagcagaacttcaccggcctgagcaccctgagcaagaacatcctgaccctgattgagctgcccagcgtgaacaccatggaggaggagtacccccgcatcgagagcgagagcacagtgcacatcggcgtgggggagccagacttcatcctgggccagctgtaccacctgagctctgtgcaggcccctgaggtggccaagtcctgggccgccctggcctcctgggcctaccgctggggcaggaaggtggtggacaatgccagccagggcgagggcgtgcggctgctgccccgggagaagtctgaggtgcagaacctgctgcctgacaccatcacagaggaggagaaggagcgcatctacggcatcctgggccaggccgtgtgcaggcctgctggcatccaggatgaggacatcaccctgcagatcacagaaagtgaggacaatgaggaggatgacatggtggatgtgatctggaggcagctgatcagcagctgcccctggctgtctgagctggatgagagcgccacagagggcgtcatcaaggtgtggaggaaggtggtggaccgcatcttcagcctgtacaagctgagctgcagcgcctacttcaccttcctgaagctgaatgccggccagatccccctggatgaagatgacccccggctgcacctgagccaccgggtggagcagagcacagatgacatgattgtgatggccaccctgcggctgctgcggctgctggtgaagcacgccggggagctgcggcagtacctggagcacggcctggagaccacccccacagccccctggaggggcatcatcccccagctgttcagccggctgaaccaccctgaggtgtatgtgcggcagagcatctgcaacctgctgtgccgggtggcccaggacagcccccacctgatcctgtacccagccatcgtgggcaccatcagcctgagcagcgagagccaggccagcggcaacaagttcagcacagccatccccaccctgctgggcaacatccagggcgaggagctgctggtgtctgaatgtgagggcggcagccccccagccagccaggacagcaacaaggatgagcccaagagcggcctgaatgaagaccaggccatgatgcaggactgctacagcaagatcgtggacaagctgagcagcgccaaccccaccatggtgctgcaggtgcagatgctggtggccgagctgcggcgggtgacagtgctgtgggatgagctgtggctgggcgtgctgctgcagcagcacatgtatgtgctgcggcgcatccagcagctggaggatgaggtgaagagggtgcagaacaacaacaccctgaggaaggaggagaagatcgccatcatgagggagaagcacacagccctgatgaagcccatcgtgtttgccctggagcacgtgcgcagcatcacagctgccccagctgagacccctcatgagaagtggttccaggacaactatggagatgccattgaaaatgccctggagaagctgaagacccccctgaacccagccaagccaggcagctcctggatccccttcaaggagatcatgctgagcctgcagcagagggcccagaagagggccagctacatcctgcggctggaggagatcagcccctggctggccgccatgaccaacacagaaattgccctgcccggggaggtgtctgcccgggacacagtgaccatccacagcgtgggcggcaccatcaccatcctgcccaccaagaccaagcccaagaagctgctcttcctgggcagtgatggcaagagctacccctacctgttcaagggcctggaggacctgcacctggatgagcgcatcatgcagttcctgagcatcgtgaacaccatgtttgccaccatcaaccggcaggagaccccccgcttccacgcccggcactacagcgtgacccccctgggcaccaggagcggcctcatccagtgggtggatggagccacccccctgtttggcctgtacaagcgctggcagcagcgggaggccgccctgcaggcccagaaggcccaggacagctaccagaccccccagaaccctggcatcgtgccccggcccagcgagctgtactacagcaagattggccctgccctgaagacagtgggcctgagcctggatgtgtcccggcgggactggcccctgcacgtgatgaaggctgtgctggaggagctgatggaggccaccccacccaacctgctggccaaggagctgtggagcagctgcaccaccccagatgagtggtggagggtgacccagagctatgcccggagcacagctgtgatgtccatggtgggctacatcatcggcctgggggacagacacctggacaacgtgctgattgacatgaccactggagaggtggtgcacatcgactacaacgtgtgctttgagaagggcaagagcctgcgggtgcctgagaaggtgcccttcaggatgacccagaacattgaaacagccctgggcgtgactggagtggagggcgtcttccggctgagctgtgagcaggtgctgcacatcatgaggcggggccgggagaccctgctgaccctgctggaggcctttgtgtatgaccccctggtggactggacagctggaggagaggccggctttgctggagctgtgtatggaggcggcggccagcaggccgagagcaagcagagcaagcgggagatggagcgggagatcaccaggagcctcttcagcagccgggtggccgagatcaaggtgaactggttcaagaacagagatgagatgctggtggtgctgcccaagctggatggcagcctggatgagtacctgagcctgcaggagcagctgacagatgtggagaagctgcagggcaagctgctggaggagattgagttcctggagggcgctgagggcgtggaccaccccagccacaccctgcagcaccgctacagcgagcacacccagctgcagacccagcagagagctgtgcaggaggccatccaggtgaagctgaatgaatttgagcagtggatcacccactaccaggccgccttcaacaacctggaggccacccagctggccagcctgctgcaggagatcagcacccagatggacctgggcccccccagctatgtgcctgccacagccttcctgcagaatgccggccaggcccacctgatcagccagtgtgagcagctggagggggaggtgggcgccctgctgcagcagaggagatctgtgctgcggggctgcctggagcagctgcaccactacgccaccgtggccctgcagtaccccaaggccatcttccagaagcacagaattgagcagtggaagacctggatggaggagctgatctgcaacaccaccgtggagcgctgccaggagctgtacagaaaatatgagatgcagtatgccccccagcccccacccaccgtgtgccagttcatcacagccacagagatgaccctgcagagatatgctgctgacatcaacagccgcctcatccggcaggtggagcggctgaagcaggaggccgtgacagtgcctgtgtgtgaggaccagctgaaggagattgagcgctgcatcaaggtgttcctgcatgaaaatggagaggagggcagcctgagcctggccagcgtcatcatcagcgccctgtgcaccctgaccaggaggaacctgatgatggagggcgccgccagcagcgctggggagcagctggtggacctgaccagcagagatggagcctggttcctggaggagctgtgcagcatgtctggaaatgtgacctgcctggtgcagctgctgaagcagtgccacctggtgccccaggacctggacatccccaaccccatggaggccagcgagaccgtgcacctggccaacggggtgtacaccagcctgcaggagctgaacagcaacttccggcagatcatcttccctgaggccctgcgctgcctgatgaagggggagtacaccctggagagcatgctgcacgagctggatggcctgattgagcagaccacagatggagtgcccctgcagaccctggtggagagcctgcaggcctacctgagaaatgctgccatgggcctggaggaggagacccacgcccactacattgatgtggcccggctgctgcacgcccagtatggagagctgatccagcccagaaatggatctgtggatgagacccccaagatgtctgctggccagatgctgctggtggcctttgatggcatgtttgcccaggtggagacagccttcagcctgctggtggagaagctgaacaagatggagatccccatcgcctggaggaagattgacatcatccgggaggcccggagcacccaggtgaacttctttgatgatgacaaccaccggcaggtgctggaggagatcttcttcctgaagaggctgcagaccatcaaggagttcttccggctgtgtggcaccttcagcaagaccctgagcggcagcagcagcctggaggaccagaacacagtgaatggacctgtgcagatcgtgaatgtgaagaccctcttcaggaacagctgcttcagcgaggaccagatggccaagcccatcaaggccttcaccgctgactttgtgcggcagctgctgattggcctgcccaaccaggccctgggcctgaccctgtgcagcttcatcagcgccctgggcgtggacatcatcgcccaggtggaggccaaggactttggagctgagagcaaggtgtctgtggatgacctgtgcaagaaggctgtggagcacaacatccagatcggcaagttcagccagctggtgatgaacagagccaccgtgctggccagcagctatgacacagcctggaagaagcatgacctggtgcggcggctggagaccagcatcagcagctgcaagaccagcctgcagagggtgcagctgcacatcgccatgttccagtggcagcacgaggacctgctgatcaaccggccccaggccatgtctgtgaccccaccacccaggtctgccatcctgacctccatgaagaagaagctgcacaccctgagccagatcgagaccagcatcgccaccgtgcaggagaagctggccgccctggagagcagcattgagcagaggctgaagtgggccggcggggccaacccagccctggcccctgtgctgcaggactttgaggccaccatcgccgagaggaggaacctggtgctgaaggagagccagagggccagccaggtgaccttcctgtgcagcaacatcatccactttgagagcctgcggaccaggacagctgaggccctgaacctggatgctgccctgtttgagctgatcaagcgctgccagcagatgtgcagctttgccagccagttcaacagctctgtgtctgagctggagctgcggctgctgcagagggtggacaccggcctggagcaccccatcggcagcagcgagtggctgctgagcgcccacaagcagctgacccaggacatgagcacccagagggccatccagacagagaaggagcagcagattgaaacagtgtgtgagaccatccagaacctggtggacaacatcaagacagtgctgaccggccacaaccggcagctgggagatgtgaagcacctgctgaaggccatggccaaggatgaggaggccgccctggctgatggagaagatgtgccctatgaaaattctgtgcggcagttcctgggggagtacaagtcctggcaggacaacatccagacagtgctcttcaccctggtgcaggccatgggccaggtgcgcagccaggagcacgtggagatgctgcaggagatcacccccaccctgaaggagctgaagacccagagccagagcatctacaacaacctggtgtcctttgccagccccctggtgacagatgccaccaatgaatgtagcagccccaccagcagcgccacctaccagcccagctttgctgctgctgtgcgcagcaacacaggccagaagacccagccagatgtgatgagccagaatgccaggaagctgatccagaagaacctggccaccagcgctgacaccccacccagcacagtgcccggcaccgggaagtctgtggcctgcagccccaagaaggctgtgcgggaccccaagacaggcaaggctgtgcaggagagaaattcctatgctgtgtctgtgtggaagagggtgaaggccaagctggagggcagagatgtggaccccaacagaaggatgtctgtggccgagcaggtggactatgtgatcaaggaggccaccaacctggacaacctggcccagctgtatgagggctggacagcctgggtgtag

SEQ ID NO: 184414 - DNA, 10989 bp, Artificial Sequence
  derived and/or modified sequence
atgagccggcgggcccccggcagccggctgagcagcggcggcggcggagggggaactaagtatccccgtagctggaacgattggcagccccgtacggattcagcgtccgccgacccagataatttaaaatattctagttccagagatcgcggcggttccagttcttatgggctacaaccatcaaactccgccgtagtgtcccgccagagacacgacgatacccgggtacacgccgacattcaaaatgatgaaaagggaggctactccgttaatggcggatccggggagaatacctatgggcgtaaatccctgggccaagagcttagagtgaacaatgtgacttcccctgaatttacatctgtgcagcacgggtctagggcattagcaaccaaggatatgagaaagtcccaggagcggagcatgtcctattctgatgagtcgaggcttagtaatttgctgagacgcattacccgggaggacgaccgtgaccggcggcttgccaccgttaagcagctgaaggaatttattcagcaacccgaaaataagctggttttagtcaagcaactggataatatactcgctgcggttcacgacgttttaaatgaaagctctaaactgttgcaggaactgagacaagaaggagcgtgctgcttaggacttctgtgtgcctccctgagctacgaagcggagaaaatttttaagtggattttttccaagttcagctctagtgcgaaggacgaggtaaagttgttgtacttgtgtgcgacgtacaaggcattggagaccgtcggcgagaagaaagccttctcttcagtcatgcagctcgttatgacttctttgcaatccattctggagaacgtggatacacccgaattgctgtgcaaatgcgtaaaatgcattttattagtcgcacgatgctatccgcatatcttttctactaacttcagggatacagtggacatccttgtgggatggcacattgatcacactcagaagccatccctgacgcagcaagtgtccggatggcttcagtcactcgaaccattctgggtagctgatcttgccttctccacaaccctgctgggccagtttctggaagatatggaggcttacgctgaggacctgagtcatgtcgcatcaggcgagtccgttgacgaggatgtccctccaccctcagtgagcctccctaaactggcggctttactacgcgttttctccactgtcgttagaagcattggagaacgatttagtccgatccggggccctccgattaccgaagcatacgtcacagatgtattataccgtgttatgcggtgcgtgactgccgcaaaccaggtttttttctcggaggctgtgctgacggccgcgaatgagtgcgtcggagtgttgctaggctccttagatccaagcatgacaatccactgtgacatggtgatcacatacggacttgaccaattagagaactgccagacatgtggaaccgattacatcatctccgtgctgaacctcctgacactcatcgtcgagcagataaataccaaactaccatcgtcctttgttgagaagttgtttatcccaagctcaaaactgctcttcctgcgatatcataaggagaaagaggttgtggccgtcgcccatgcggtgtatcaagctgtactatcactgaagaatattccagtgctggaaacggcctacaaacttatcctgggtgaaatgacctgtgcactaaacaatttgctgcactctctgcagctgccggaggcctgcagtgaaattaagcatgaagcgtttaagaatcacgtgtttaacgtcgacaacgccaagtttgttgtgattttcgatctgagcgctctcacgaccataggaaacgctaagaattcgctgatcggcatgtgggccctgtcccccacagtgtttgccttactgagcaaaaacttgatgatcgtgcacagtgatctggcagtacacttcccggccattcagtacgctgtgctatacactttgtatagtcactgcaccaggcacgatcactttataagttctagcctttcatcctccagcccctccttatttgacggggcggtaattagcaccgtgacgactgctacaaaaaagcactttagcatcatcctgaacttactcggaatcctgctgaagaaggataacctcaaccaagacacgcgaaagttactcatgacttgggcgctcgaggcagcagtcctgatgaaaaaaagcgagacctacgctccactcttttcactcccttcatttcataagttctgtaagggcttactggccaacaccttggtagaggatgtgaacatctgtttacaggcttgcagctctctgcatgcactcagtagcagcctgccggatgatctgcttcagcgctgtgtagatgtgtgcagagtacagctggtccatagtggaacaaggatccgccaggcattcgggaaactcctgaagtccatcccgctagacgtggtactgtcaaacaacaaccacaccgagattcaagagatcagtctcgctctgcgcagccacatgagtaaagcccctagcaacacctttcaccctcaagatttctccgacgtcattagttttatattatacggcaattctcataggaccggaaaggacaactggctggagagactgttttacagctgccagcgcctggacaagagagatcagtccacaatcccccggaatctgctcaagaccgacgccgtgctgtggcaatgggccatttgggaagcagctcaattcactgtgctcagcaagcttcgcacgcctcttggtcgagcccaagatacatttcagaccatcgaagggatcatacgttccctggccgcacacacactgaatccagatcaggatgtgtcccagtggaccactgcggacaatgatgaagggcacggaaacaaccagctcagacttgtcctgttgcttcagtacctcgaaaatctcgaaaagcttatgtacaatgcttacgaaggctgcgctaatgctctgaccagtccccccaaagtgataaggacattcttttacaccaacagacagacatgccaagattggttaacccggattcggttgagcataatgagagtaggtctgctagccggccaacccgccgttacagtgcgacatggattcgacctgcttaccgagatgaagaccacgagtttaagccagggcaacgaactggaagttacaattatgatggtggtcgaggcactctgcgagctgcattgtcccgaggctatacagggcatagcagtgtggtcatcatcgattgtgggaaaaaacttactctggatcaactccgtggcacagcaggccgaaggccgcttcgagaaagcctcagtggaatatcaggaacacctttgcgcgatgacgggagtggattgctgtatctcgtcctttgacaaatcagtgctgacactagctaacgccggccgtaatagtgctagtcctaagcatagcctgaacggggagtcaagaaagactgtcctatccaagccgactgattcctcacctgaagtgatcaattatcttggtaataaagcttgcgagtgttacatctccatcgctgactgggcggcggtgcaggaatggcagaacgcaattcacgatctgaaaaagagtaccagttcaacttcacttaatttaaaggcagactttaactacatcaaatcccttagcagcttcgagagcgggaagttcgtggagtgtaccgaacagctcgaattgctgcccggggagaatatcaaccttttggctggcggtagtaaagagaaaatcgatatgaaaaaactgctgccgaacatgctctctcccgacccccgcgagctgcaaaagtctatcgaagtgcagctgttgcggtcgagtgtgtgtcttgccacagcactcaaccccatcgagcaagatcagaaatggcagtctatcacagagaatgtagtgaaatacctgaaacagaccagtaggattgcaatcggacccctccggctgtctaccctgactgtgagccagagcctgccagtgctctccacacttcagctgtattgcagcagcgccctagaaaataccgtttctaataggctatctaccgaggattgtctcatcccactcttctctgaagcccttcggagttgtaaacagcatgatgtacggccctggatgcaggctttacgctacaccatgtatcagaaccaactgctggagaagattaaagagcagaccgtgcccataagatcacacctgatggagctgggcttgacggccgccaagtttgcccgtaagagaggaaatgttagccttgctacacggttactggcacagtgctctgaggtgcaacttggtaagaccacaactgcacaggatcttgtgcagcatttcaagaagctaagcacacagggacaggtggatgagaagtggggaccggagctggatattgaaaaaacaaagctcctttacaccgcaggacagtctacccatgctatggaaatgctatcctcctgcgctatcagtttctgtaagtccgtgaaagcggagtacgctgtggccaagagtatcttgaccttggcgaaatggatacaggccgagtggaaggaaataagtgggcaacttaagcaagtgtatcgagcccagcatcagcagaacttcactggtctttcgactcttagcaagaacatcctgacattaatcgaactcccctcggtcaataccatggaagaggagtatccgcgcatagaatcagagtccactgtccatattggcgtcggagagcccgacttcattctgggacaactgtatcacctctcttctgtccaggcccctgaggtggccaagtcctgggccgcattggcttcctgggcctacagatggggccgcaaagtcgtggataacgctagccagggcgaaggggtaagactcctacctagagagaaaagtgaagtgcagaacctcctgcctgacactatcacagaagaggaaaaggagcgcatttatggtatcctaggccaggcagtgtgtcggccagcggggattcaagacgaagacatcacactgcagattaccgagtccgaggataacgaggaggatgacatggtggatgttatatggcggcaacttataagctcctgcccatggcttagcgaactggacgaatccgccacagaaggggtcatcaaagtctggcgaaaggtcgtggatagaatattttcactatacaaattgtcatgctcagcttactttaccttcctaaaactcaacgcaggccagattcctttagatgaagatgatcctagactgcacctgtcacatcgcgtcgagcagagtaccgatgatatgatcgtgatggctactctccgtctactgaggctccttgtgaaacacgctggggagctcagacagtacctggagcacggactcgagacgacgccgacagctccttggagagggattattccacagctgttttctcgattgaaccatcccgaagtgtacgtgcgacaaagcatctgcaatttactgtgtagagtagcccaggattccccccatctgatcctatatccagccatcgtaggtacaatctccctgtcttcggagagccaggcatctgggaataaattcagtaccgccatcccaactctccttgggaacatacaaggagaggaattgctggtgagcgagtgcgaaggaggctctccgcccgcctcccaggatagcaacaaagatgagccgaagtctggcctaaacgaggaccaggctatgatgcaggattgctactccaagattgtggacaagctatcctccgcaaaccctacaatggtgctccaggtgcagatgttagtcgctgagctgcgacgtgtgaccgtgttgtgggacgaactgtggctcggagttcttctccagcaacacatgtacgtgctgcggagaatccagcaactggaagatgaggtcaagcgcgtgcagaacaataatacattgagaaaggaggaaaaaatcgctatcatgagggaaaaacacaccgcccttatgaagcccatcgtgttcgcactggagcacgttcggtctattaccgccgcgccagcagagacacctcatgagaagtggttccaggacaactatggagatgccattgagaacgcccttgagaaattgaagacacctctgaatcccgctaaacccggtagtagctggattccctttaaggaaatcatgctgtctctgcagcagcgcgcacagaagagagcatcgtatattcttcgcctggaggaaatctccccatggctggctgcgatgaccaacaccgagatcgctctgcccggggaggtgtctgctagagataccgtgaccatccactcggtaggcggaacaattacaatcctgccgaccaaaactaaaccaaagaaacttttgttcttaggcagtgacggcaagtcctacccatacttgtttaaagggttagaggacctgcacctagacgaaaggatcatgcagttcctgtccattgtcaacactatgttcgccactatcaatcggcaggaaacgccccggtttcacgcccgtcattactctgtcactccccttggcacgcgttcgggacttatccagtgggtggacggagctaccccactttttgggctgtataaaagatggcagcaaagggaggcagccctgcaggcacagaaggctcaggactcgtatcaaacaccccagaaccctggaattgtacccagacccagtgagctgtattacagcaaaataggacccgccctgaagaccgtcggcttgagcctagatgtgtcccgacgcgactggccactgcatgtgatgaaagcagtattggaggaactgatggaggcgactccccctaatctcctagctaaagaactgtggtcctcatgtaccacgcccgacgagtggtggcgcgtcactcagtcctatgcgagatcaaccgcagtaatgagtatggtgggatatatcataggcttaggcgatcgccacctagataatgttctcatcgacatgaccacaggagaagtcgttcacattgactacaatgtctgttttgagaaaggcaaatctttgcgggtgccggagaaagtaccattccggatgacacagaatatcgagacagcccttggcgtcactggtgtcgagggcgtttttcggttgagctgcgaacaggtcttgcatatcatgcggcgggggagggagaccctgttgacgctgctcgaagcattcgtgtacgacccacttgtggattggaccgccggcggcgaagctggatttgcgggcgcagtgtacggaggaggtggccagcaggcagagagcaaacagtccaaaagagaaatggagcgcgagattacccggtccctcttttcaagccgggtggctgagatcaaagtaaattggttcaaaaatcgcgatgagatgctggtggtgctcccaaaactagacggctcactggacgaatatctcagtttacaggaacagcttacagatgtggagaagctgcagggcaagttgctcgaggagatcgaattcctggagggggccgagggggtcgatcatccttcacacactctccagcatagatatagcgagcacactcagttgcagacgcagcaaagggccgtacaggaggcaatccaagtgaagctgaatgagtttgagcaatggataacacactatcaggcagctttcaataacctcgaagcgacccagctggcctcactgcttcaagaaatatcaacacaaatggatctgggaccgccttcttacgtaccagctacagcctttttgcagaacgccgggcaggcacacctcattagccagtgtgaacaactggagggcgaagttggcgccttgcttcagcagaggaggagcgtgctgcggggctgtctggagcagctgcatcactatgctacagttgcactccagtatccgaaggctatcttccaaaagcacagaatcgagcagtggaagacctggatggaggagttgatctgtaatacaactgtggagcggtgccaggaactatatagaaagtacgaaatgcaatatgctccccagccccctccaactgtgtgccaatttatcacagctaccgaaatgaccctccagcgctacgctgcagacatcaactcacggcttatacgccaggtggagcgcctgaagcaggaagcggttacagtgcccgtgtgcgaggaccagctgaaagaaattgagcgttgcattaaggtttttcttcatgagaacggggaagaaggctctttatctctcgcctcggttataatatcggctctatgtactctgacaaggcgaaacttgatgatggagggagctgccagcagtgccggggaacagctggtagacctgacttcccgggacggcgcctggttcctggaggaactatgcagcatgtcaggcaacgtcacatgtttggtgcaactcctgaagcaatgtcaccttgtgcctcaggatctggacataccgaatcccatggaagccagcgaaaccgtgcatctggcaaatggggtttatacttccctccaggagctaaactctaatttcagacaaatcatttttcctgaggcactgaggtgtctaatgaaaggagagtacactttggagagcatgcttcacgagctggacggcctaatcgagcagacgaccgatggcgtgcccctgcagactctggtggaaagcttacaagcctacctgagaaacgcggccatgggactggaagaagaaacacatgctcattacattgatgtggcccgcctgctccacgcccagtatggggagctgatacaaccaagaaatgggtcagtggacgaaaccccaaagatgtccgccggtcagatgcttctggtggccttcgatgggatgtttgcacaggtcgagaccgcatttagcctcttggtggagaagctgaataagatggaaattcctatcgcctggaggaagattgacatcatccgagaagcgagatccacacaggttaacttcttcgacgatgacaatcacaggcaggtcctggaggagatcttcttcctgaagcggctccagacaatcaaagagtttttccggctttgcggcacattctccaaaacgctaagtggctccagctctctggaggatcagaatactgtgaatggcccggttcagattgtgaacgttaagacgctgttccgcaacagttgcttttctgaagaccagatggccaagcctatcaaagcttttacagcagatttcgtgcgacaactcctcattgggttgccaaaccaggcactcggactgaccttatgctctttcatctccgcccttggagtcgacatcatcgcccaagtggaggccaaggatttcggtgccgaaagcaaagtttccgtggatgacctttgtaaaaaggcagttgaacataacattcagatcggcaagtttagccagcttgtgatgaaccgggctaccgttctagcaagttcctacgacacggcatggaaaaagcatgatttggtgagacgtctcgagacgagcataagtagttgcaaaacctcacttcagagagtgcaactgcatatagcaatgttccagcagtggcaacacgaggatctactcatcaaccggcctcaggccatgtcagttactcccccaccaagaagcgccattctgacctctatgaagaaaaagctccatacactgagccaaatagaaacctccatcgctactgttcaggagaagctagcggcactcgaatctagcattgagcaacgcctcaagtgggcaggaggtgccaatcctgctttggcaccagtgctgcaggattttgaagccacaatcgcagagagacgaaacctcgtgctcaaggagtctcagcgtgcaagccaagtgaccttcttgtgttccaatatcattcattttgaatccctgagaacccgtacagcagaggccctgaacctagacgccgccctgttcgagcttatcaagagatgccaacagatgtgttcctttgcttcccagttcaactcatctgtgtcggaactcgaactgcggctgctccagcgggttgacacgggcctggaacacccaatcgggtcctccgagtggttgctctcagctcataagcagctgacgcaggatatgagcacccagagggccatacagacagagaaagagcagcagattgagactgtctgcgagactattcagaacctcgtcgacaatatcaaaacagtgttgactggacacaaccgtcagttgggcgacgtcaagcatctgctgaaggccatggccaaagatgaagaggcggctctggccgacggggaggacgtgccgtacgaaaactctgttcggcagttcttgggggaatataagtcctggcaagataatattcagacagtgctgtttacattggtccaggccatggggcaggtgcgctcacaagaacacgtggaaatgctccaggaaatcactcctacactcaaagaacttaaaactcaaagccagagcatttataacaacttggtctccttcgccagtccactcgttacagacgctactaacgagtgctcttctccaacttcttcagcgacttatcaaccttcattcgcagccgccgtgagatcaaatacagggcagaaaactcagcctgatgtcatgtcccagaacgcccgaaaactgattcaaaagaatctggccaccagcgccgacacgccaccctcaacagtgcccgggacaggcaagtccgtcgcttgcagtccaaagaaggctgtccgcgaccctaagactggcaaggcagtacaagagaggaattcctatgccgtgtccgtgtggaagcgggttaaggcaaagctcgagggtcgtgacgtggacccaaatcgccgaatgtccgtggcagaacaagtggattacgttattaaagaggcaaccaatcttgacaatctggcccagctgtacgaggggtggacagcttgggtctag

SEQ ID NO: 184415 - DNA, 10986 bp, Artificial Sequence
  derived and/or modified sequence
atgagccggcgggcccccggcagccggctgagcagcggcggcggcggaggaggtacgaagtaccctcggtcttggaacgactggcaaccacgcactgattccgctagcgcggatccagataacttgaaatattcgagtagcagggatcgcggcggcagctccagctatggcctccaaccttctaacagcgccgtcgtctctaggcaaaggcatgacgatactcgcgtgcacgctgacatacagaatgatgagaaggggggttatagcgtgaatgggggaagcggggaaaatacatacggaaggaagagtttggggcaagaattgcgtgttaataacgtgaccagccccgagtttacgtcagtgcagcacgggagtcgagcactggctaccaaagacatgcgtaaatcgcaggaaagatccatgtcctactcagatgaaagccggctaagcaacctcctccgcagaatcacgcgcgaagatgatcgagatcggaggctggccaccgtcaagcagttgaaggaattcattcaacaacctgagaataagctggttctcgtgaagcagttggacaatattttagctgccgtgcatgacgtcctaaacgagtccagcaagctgctccaagagttacgccaggagggagcttgttgcctgggtctgctctgtgcctcgctctcttacgaagccgagaaaatattcaaatggatcttttcgaagttcagctcatctgccaaagacgaggtgaaactgttatatctatgcgcaacttacaaggccctggaaacagtaggcgagaagaaggctttttccagtgtgatgcagttagtgatgacatcgctgcagagcatacttgagaacgtggatactccagagctcttgtgtaaatgtgttaagtgcatccttctagtggcccggtgttatccccacatattcagtactaacttccgagatactgtggacatcttagtgggttggcacattgaccacacccagaagccctcactgactcagcaggtttccggctggttgcagtcactggaacctttctgggtggccgacctggctttctctacaaccttgctggggcagtttcttgaggatatggaagcctacgctgaggatttgtcccacgtggcctccggggagagcgtagacgaagacgtgccccccccttccgtgtctctccccaagttagccgctttgctgcgagttttttctacggtggtgaggagtatcggggagcgtttttctcccattcggggccctcccattaccgaggcctacgtgactgacgtgttataccgagtcatgagatgtgtcaccgctgctaaccaggtgttcttcagcgaggcagttctgaccgccgccaatgaatgtgtcggggtgctgctgggcagcctagacccctccatgacaatccattgcgatatggttatcacctatggccttgaccagctagagaattgtcagacatgcggcacagactacatcatcagcgtcctcaacctactgactctcattgtggaacagatcaacacaaagcttccaagtagcttcgtggaaaagttgttcatccctagtagcaaactgctgtttctgaggtatcacaaggagaaagaagtggtcgcggtggcacacgccgtttatcaggcagttttaagcttgaaaaacattcccgtattagagacggcctataagttgatactgggcgagatgacttgtgccctgaataatcttcttcatagtctgcagctccccgaggcttgttccgaaattaagcacgaggccttcaaaaatcacgttttcaacgtggataacgcgaagttcgtggtaattttcgacctgtcagctctgaccacaattggaaacgcgaaaaatagcctgatcggaatgtgggctctctctccaacagtatttgctttgctttctaagaacctgatgatcgtccattccgacctcgccgtccacttccctgccatacagtatgcggtgctgtacacattgtacagtcactgcaccaggcatgaccattttatcagctcgtccctgtcatcttcgtctccaagcctgttcgacggggcagtaattagtacagttaccactgccaccaaaaaacacttttccatcattctgaatctgctcggcattctgttgaagaaagataacctgaatcaggatactaggaaactcctcatgacatgggctttggaagcagcggtgttgatgaagaaatctgagacatatgcccccctgtttagccttcccagtttccataagttttgcaaaggactccttgctaataccctggtagaggatgtgaatatctgcttacaggcttgcagttccttgcatgcccttagttcctctctccccgatgatcttctgcagcgatgtgttgatgtttgcagagtccagcttgttcattccggaacccgcattagacaggcctttggtaaattattgaagtcgataccgctggacgtggtgctgagtaataataaccacaccgagattcaagaaatttccttggcgttaagaagccatatgagcaaagcccccagcaacaccttccatccccaggacttctctgacgtaatatccttcattttatacggtaactctcataggacaggcaaagacaattggctggagcgactgttctacagttgtcagaggttggataagagagaccaatccactattcctcgcaatctcctgaaaacagacgccgtcctctggcagtgggccatctgggaggcagcgcagttcaccgttctctccaagctgcgcacccctctgggccgggcccaggataccttccagacaatagaaggtatcatcaggagtctggctgctcacactttaaacccagatcaggatgtcagccagtggaccactgcggacaacgacgaaggccacggcaacaaccagctgcgtctggtcttgctcctgcagtatctggaaaatctggagaaactaatgtacaacgcatatgaaggttgcgccaacgcgctgacctcgcctcctaaggtgattcggactttcttttacacaaacaggcagacgtgccaggactggcttacaagaatacggctgtccatcatgcgcgtgggcctgttggctggccagccagctgtaaccgttagacatgggtttgacctgctcacagaaatgaaaaccacttcgctgagccagggcaacgagctggaagtgacaatcatgatggtggtggaggcactctgtgagctgcactgtcctgaggcaatccagggcatcgccgtctggagttcaagcatcgtggggaaaaacctactgtggattaattcagtagcccagcaggctgaaggtcgattcgaaaaagcctctgttgagtaccaggagcacctttgcgccatgacaggcgttgactgttgtatcagctcatttgacaagtcagtgctgacactagctaacgccggacgcaactcagcatcaccaaagcatagcctcaacggggagtctcgaaagactgtgctcagcaagccgacagactcatctccagaagtaatcaactatctcggcaataaggcttgcgaatgttacatcagtatcgccgattgggctgcagttcaggagtggcagaacgctattcacgaccttaagaagtccacaagttccacatccctgaacctgaaggcagatttcaactacataaaatccctctctagttttgagagcggtaaattcgtggaatgtacggaacagctggagcttcttcctggtgagaacataaatttgcttgcgggcggaagcaaggagaagatcgatatgaagaagctgctgcccaatatgttgtctccagatcccagggaactccagaaatctatcgaggtgcaattgctccggtcctctgtctgtctcgccaccgccttaaaccctattgaacaggatcagaagtggcaatctattacagagaacgtagtaaagtacctgaagcagacctcccgaatcgcgattgggccactacgactgtccaccttaactgtaagccagtccctgccggtactctccacattacaactttactgtagcagcgctctcgaaaacacagttagtaatcggctttccactgaggattgtctgatcccgctcttctctgaggcactaaggtcctgcaagcaacacgatgtccggccctggatgcaggcactccgatatacaatgtatcaaaatcaacttctggagaagatcaaagagcaaaccgttcctataagaagtcatctcatggagctgggccttacagcggccaagttcgcgcgcaaacgggggaacgtaagcctggccacacgattattggcccaatgtagcgaggttcagcttgggaagacaacaaccgcgcaggatctagtgcagcattttaagaaactgagcactcaggggcaggtggacgagaaatggggaccggagctagatatcgagaagactaagcttttatatacggcgggccagtctactcacgcaatggagatgcttagcagctgcgccatctcattctgcaaatctgtgaaggccgagtacgctgttgctaaaagtatcttgacccttgcaaagtggatacaggctgagtggaaggagatcagcggacagctaaagcaggtctacagggctcagcaccagcagaattttacaggcctttccacactgtccaagaacatcctcactctgatcgagctgcctagcgtgaacaccatggaggaggagtaccctcgaattgagagcgaatctaccgtccatatcggcgtgggtgaacctgactttatcctgggccagctctatcacttgtcttctgtgcaagcacctgaggtcgctaaatcttgggcagcactggcatcttgggcctaccgctggggccggaaggtagtggacaacgcctcacagggcgaaggggtgcgattgctaccccgcgagaaatcggaggtgcagaatcttttacctgataccatcacagaggaggagaaggagcggatctatggcattcttggccaggccgtatgcagacctgcagggattcaagacgaggatatcactcttcaaataaccgagtctgaggacaatgaggaggatgatatggtagacgtgatttggagacagctcatctcctcgtgcccatggctgagtgagcttgacgaatctgccacggagggcgtgatcaaggtgtggagaaaagtggtcgaccggattttctctttgtacaagctcagctgctccgcctactttaccttcttgaaactgaatgccggccaaatcccactggacgaagacgaccctcgtctacacttatctcatagggtggagcaatccactgatgacatgatcgtgatggcgacacttcgactattacggctactcgtcaagcacgccggtgagctaagacagtacctggaacacggactggagacaacaccaaccgccccatggcgggggatcattcctcagctgttcagtcggctaaaccatcccgaagtgtatgttagacagtcaatctgtaacctgctatgtcgtgtggcgcaggatagccctcatctgattctctatcccgcaatcgtcgggaccatctctctctccagtgagagtcaagcgtcaggcaacaaattttccaccgctatccctaccctccttggtaacattcagggggaggagctgctcgtgtccgaatgtgaaggcgggagtccccctgccagccaggactcgaataaagatgaaccgaagtcgggattaaatgaggatcaggccatgatgcaggactgctactccaagattgttgataaattgagcagcgctaatccaacaatggtcctgcaggtccaaatgctcgtcgcggagttgagacgcgtgacggttctgtgggatgagctctggctcggcgtcttgctgcagcaacacatgtatgtactcagacgtattcagcaacttgaggacgaagtaaagcgggtgcagaataacaacacccttaggaaggaagagaaaatagccattatgcgcgaaaagcacacagccctgatgaaaccgattgtcttcgccctcgaacacgtcaggagtatcactgccgccccagccgagacacctcatgaaaaatggtttcaagacaattatggcgacgccatagagaatgcactcgagaaactgaagacgccgctgaaccccgccaaacccggctcttcctggataccttttaaagaaataatgttaagtttacagcagcgcgcccagaaaagggcctcatatatcctgcggctagaggagatctcgccttggttggccgctatgacaaatactgaaatagcacttcctggtgaagtgagcgcccgggacacggttactatccacagcgtgggcgggaccattactatattgccaacaaaaaccaagccaaaaaaattactttttctggggtcggacggaaaaagttatccgtacctctttaagggcttagaggacctgcatctcgatgagcgcatcatgcagtttctgagcatcgttaacaccatgttcgccaccattaatcggcaggaaacacctaggtttcatgccaggcactactcagttacccctctaggaacaaggtctggccttattcagtgggtggacggagccacccccctgttcgggctctataaaagatggcagcagagagaagcggctctacaggcccagaaggcccaggattcctatcagacgcctcagaacccaggaatcgtacctagaccttctgagctgtactatagtaagattggccctgcgctgaaaactgttggactgagcctggacgtctcgaggagagactggcctctgcacgtcatgaaagccgtgctcgaggaattgatggaggcgactcctccgaatctgctcgcgaaagaactgtggagcagctgcactaccccggacgaatggtggcgtgtgacacagagctacgctaggtctaccgctgtgatgtccatggtgggctatataatcggcctaggggatcggcatctggacaacgtccttattgacatgacaaccggcgaggtcgtacatatcgactacaatgtctgcttcgaaaagggcaagagccttcgggtgccggagaaggttcccttccgcatgactcagaatatagaaactgcactcggcgtgaccggggttgaaggcgtgttccgcctctcatgcgagcaagtcctgcacatcatgaggagggggcgcgaaaccttgctgactctactcgaggcgttcgtgtatgatccactggtcgattggacagccggaggcgaggctggattcgccggagccgtttatgggggcggtggacagcaggccgagtcaaaacagagcaagagagaaatggagcgagagattacaagatcactcttttcatctcgtgtcgccgagatcaaggtgaactggtttaaaaatcgggatgaaatgctggtcgtcctgcccaaactggacggctctctggatgagtacctctccctccaggagcagctgaccgatgtcgagaagctccaggggaagctactcgaggagatcgaatttctggagggcgctgagggcgtagatcacccatcccatacgctgcagcaccgttattccgaacacactcagttacagacccaacaaagggcggttcaggaggccatccaggttaaattaaacgagtttgagcagtggattacacactaccaggccgcatttaacaatctcgaagccacccagctggctagcctgctgcaagaaataagtacccagatggatctgggtccaccgtcctacgttcccgctactgcttttcttcaaaacgccggacaagcccatttgatctctcaatgtgagcagctcgagggggaagtgggggccctcctccagcagaggcgctctgttttgcggggttgcttagaacaattacaccactacgcaaccgtggcactgcagtatccaaaggctatttttcagaaacatagaatagagcagtggaagacttggatggaggaactgatctgcaatacgaccgtcgagaggtgccaggagctctatcgaaaatatgaaatgcagtacgccccgcagccaccccctactgtttgccagtttattaccgccacagaaatgaccttgcagaggtacgccgccgatatcaactcgcgcttgattcggcaggtggaacggctcaagcaagaggccgtcacggttccagtgtgtgaggaccagctcaaggaaatagagcggtgcataaaagttttcttgcacgaaaacggagaagagggttccctgagcctggcctccgtcattatctcagcactgtgcacactgacaagacggaacctcatgatggaaggtgccgcgagctccgcgggtgaacagctagttgatctgaccagtcgcgacggtgcctggttcctcgaggaactctgctcaatgtcaggcaatgttacttgcctcgtccagctgctgaagcagtgccatttagtcccccaggacttagatattcctaacccaatggaagcctcagagacagtgcacctggctaatggcgtatacactagtttgcaggaactgaattctaatttcaggcagatcatttttcctgaagcgctgaggtgcctcatgaaaggagaatatacattggaatccatgctccatgagctcgacggtttgattgagcagactaccgatggggtgccccttcaaaccttggtcgagagtctccaggcctatctgcgtaacgctgccatgggactcgaggaggagactcacgctcactacattgacgtagcaaggttactacacgcacagtacggcgagctgatacagccacggaatggatcggtggatgagacacccaagatgtctgctggacagatgctcttggttgctttcgatgggatgttcgcacaggtggagacggcttttagtctgctggttgaaaagcttaacaagatggagatacccatagcgtggcgcaaaattgatatcatccgggaggcaagaagcacccaggtcaacttcttcgatgatgataatcatagacaagtgctggaagagatctttttcctaaagagactgcagaccatcaaggagttcttccgtctgtgtgggaccttctcgaaaactcttagcggatcttcctccttggaggatcagaacacagtcaacggccccgttcaaatcgtgaacgtgaagacgctgtttaggaattcttgcttctcagaagatcagatggcaaagccgataaaggctttcacagctgacttcgtgagacaactgctaatcggcctgcctaaccaggcgcttggcctcactctgtgttcattcatctcggcccttggtgtggatatcattgctcaggtagaggcaaaagatttcggagctgaatcaaaagtttcagttgatgacttatgtaagaaggccgtggagcacaacatccaaattggcaagttctcccagcttgtcatgaacagagccaccgtgctagctagttcctacgacaccgcatggaagaagcacgacctcgtaagaagactcgagacatctataagctcttgcaaaacatcactgcagcgggtccagcttcatattgccatgtttcagtggcagcacgaggatctgctcatcaacagacctcaggctatgagcgtcacccctcctcctaggagcgcaatcctaactagcatgaaaaagaagctgcataccttgtctcagattgagacttctattgccaccgtgcaagagaaactggccgccctggagtcttctatcgagcaacgtctgaagtgggcaggcggtgctaaccccgcactcgcaccagtgctgcaagacttcgaggccacaattgccgaaagaagaaacctggttctcaaagaatcacaacgagcgtctcaggtcacttttctgtgcagcaacatcattcacttcgagtctcttagaactaggacagctgaagccctgaatctagacgccgcactcttcgagttgattaagagatgccagcaaatgtgttcctttgctagtcagttcaatagttccgttagcgaacttgagctcagactactgcagcgggttgataccggcttagaacacccgatcggaagttctgagtggctcctgtcagcacataaacaactgactcaggatatgagcacacagagagctatccagacagagaaggaacagcagatcgaaaccgtctgtgagacaatccagaacctggtggataacattaagaccgtgctgacaggacataacaggcaactcggcgacgtgaaacaccttctgaaggctatggccaaggatgaggaggctgctctggccgatggggaggacgtgccttacgaaaattcagtgaggcagttcctgggcgaatataaatcctggcaggacaacatccaaacagtgctcttcactttagttcaggccatgggtcaggttcgatctcaagaacacgtcgagatgctacaggaaatcactcctacgcttaaagaactgaaaacccagtcccaatctatttataacaacctggtctcttttgcatcgcccctggtgaccgacgctactaatgaatgtagtagtccgacgagtagcgccacataccagccctcctttgcagccgccgtacggtcgaatactgggcaaaaaacccagccagatgtcatgagtcagaacgctcgaaagctgattcagaagaatttagcaaccagtgcagacacccccccatcgacagtgcccggtaccggtaagtctgtcgcttgctctcctaaaaaagctgtaagagaccctaagaccggcaaggctgtgcaagaaagaaatagttacgccgttagcgtatggaaaagagtgaaagcaaaactagaggggagagacgtggatccgaaccgcagaatgtccgttgctgagcaggtggactacgtcatcaaagaagcgacgaacctcgacaatctggcgcagctctatgaaggatggacagcgtgggtctag

SEQ ID NO: 184416 - DNA, 10989 bp, Artificial Sequence
  derived and/or modified sequence
atgtcaaggcgagcacctgggtcccgcttgtctagtggcggtggtgggggtggcactaaataccccagatcttggaacgattggcagccaagaaccgacagcgcatctgccgatccggacaacctgaagtactctagttccagggacagggggggatctagcagctacggcttacaaccttcaaattctgccgtggtaagcaggcagagacacgatgacacccgggtgcatgccgacatccagaacgatgagaagggaggctattcggtcaacggcggaagcggagagaacacttatggaaggaagtcccttggccaagagctgcgggtcaataacgtgaccagccctgagtttacctcagtacagcacggctctagggcactggccactaaggatatgaggaaatctcaggaacggagcatgagctactccgatgagagccgcttgagcaacctgctgcgcagaatcacccgggaagacgacagagacaggcgattagctacggtaaagcagcttaaagagttcatccaacagccggagaacaaactggtgctcgtcaaacagcttgacaacattctggccgctgtccatgatgtccttaacgaatcatccaaactactgcaagagctgaggcaggaaggagcctgttgtctgggcctactgtgcgccagccttagctatgaagccgaaaaaatctttaaatggattttttcaaagttttcttcatctgcgaaggatgaagtgaaactgctgtatctgtgtgccacttacaaagcgctcgagaccgttggggaaaaaaaggcctttagctccgtgatgcaactagttatgacgtctctgcagtcaatactcgaaaacgtcgacacaccagaattactctgtaaatgtgtaaagtgtatactactggtggccaggtgctacccgcacatcttctcgacaaatttcagggatacagtggatatccttgttgggtggcacatcgaccacacacagaagccatctttaactcagcaggttagcggatggctgcaaagcctcgagccattttgggtggctgatttggcattctcaacaaccctactgggacagttcctcgaggacatggaggcttacgcagaggacctgtcgcatgtcgcttctggggagagtgtagacgaggacgtgccgccaccatcagtgtccttgcctaagcttgccgctctcctgcgtgtgttcagtaccgttgtcaggagtatcggagagcgcttctcccccatccgcggtccgcctataaccgaagcttatgtcacagacgtgctgtatcgcgttatgcgctgtgtgaccgccgctaaccaagttttcttcagcgaagccgtccttacagctgctaatgaatgcgttggggtccttcttggctccctcgacccatcgatgactatccactgtgacatggtgatcacgtacggactagaccagctcgagaactgtcagacatgcggcactgactacattataagcgtcttgaaccttttgactctgattgtggagcagataaatactaagttgccgagctctttcgtcgaaaaattgttcatcccttccagtaaattgctgtttcttcgataccataaagagaaagaggttgtcgcagtggcacacgcagtgtaccaggcagtcttatctctaaaaaacatccctgtcctcgagactgcatataaactgattctcggcgagatgacttgcgctctgaacaatctgctgcacagcctccagctgcctgaggcctgtagtgagattaaacacgaagcttttaaaaaccatgtgttcaatgtggacaatgctaagttcgttgttatttttgacctgagcgccctcaccacaatcggcaatgcaaagaattcgttgataggaatgtgggccctgtccccaacagtgttcgccttactttccaagaatctcatgattgtgcattccgaccttgcagttcattttccggcaattcagtatgctgtgctgtatactctctattctcattgcactcgccacgaccattttatttccagctctctgtcctcctcaagtccgtcgctctttgatggggcagtcatcagcacagtaacaactgcgacaaaaaagcactttagcattattctcaatctgctggggatactcctgaagaaggataacctgaaccaggacactagaaagctcctaatgacctgggcgctggaagcagctgtgcttatgaaaaaaagtgaaacctacgcgcctctgtttagtctgcccagtttccataaattttgtaaaggcctgctcgcaaacacgcttgtcgaggacgtgaatatctgcctgcaggcatgttcatccctgcacgccttgtcttctagcctccccgacgatctgctgcaacggtgcgtggatgtgtgccgagtgcagttggttcactctggcactcggatccgtcaggcatttggcaagcttctgaagtcaatccctctcgacgtcgtactgtctaataacaatcacacagaaattcaggaaataagcttggcactccgcagccacatgagcaaagcccctagtaacacgtttcatcctcaagacttcagcgatgtgatttcgttcattctttacggtaactcccatcgcactggaaaggataattggttggagagactcttttatagttgccaacggctcgataagcgcgaccagtccactatcccaaggaatctccttaagactgacgctgtcttgtggcagtgggccatatgggaggctgcacaatttacagtcctctcgaaacttcgaacaccactggggagagctcaggacactttccagaccatcgaaggcatcataaggtccctggctgcccacactctgaaccctgaccaggatgttagccagtggacgacggccgacaacgatgaaggtcacggcaataaccagttgcgactggtactcctgctccagtaccttgagaatctagaaaagctgatgtataacgcttatgaagggtgcgctaatgccttgacgtcccccccaaaagtcattagaaccttcttctacacgaatagacagacatgccaagactggcttacgaggatcaggctgtctattatgcgagtcggcctgctggctggtcagccggcagttactgtgcgacacggcttcgatctgttgacagagatgaagacaacatcactcagccagggtaatgagctggaggttaccatcatgatggttgtcgaagccctatgtgagctacattgccctgaggcgatccaagggatcgcagtgtggtctagtagtatcgtgggtaagaacctcttgtggattaactctgttgctcaacaagcagagggccgatttgagaaagcatctgtggagtaccaggagcacctgtgtgccatgacaggtgtggactgctgcatttccagctttgacaagtccgtgctgacgctcgctaacgctggcaggaactctgccagtcctaaacatagccttaatggtgaatcgagaaagactgtgttaagtaagcccacggacagttccccagaagtgataaattacctgggtaataaggcttgcgagtgttacatttccattgccgattgggccgctgtccaagaatggcagaatgcgattcacgatttgaagaaaagtacctcttcaacaagtctcaatctcaaggctgacttcaactatatcaagtccttgagttcgttcgaatcagggaagttcgtcgaatgtacagaacagctggagttacttcctggtgaaaatatcaacttgctggctgggggatctaaggaaaaaatcgatatgaagaagcttttacctaatatgctgagccctgacccacgggaactccagaagagcattgaggtgcagctcctcaggtcgtcggtgtgtctggcgaccgctctcaatcctatcgagcaagaccagaaatggcaaagtatcacagagaacgttgttaaatatcttaaacagacaagccgcatcgccatcggccctttgaggctgtctaccctcacagtgtcacagtcattacctgtgctctctacactgcaactgtactgtagctcagcacttgagaacactgtgagtaatagattatcaacagaggactgcctcatcccgctcttttcggaagcccttaggagctgtaaacagcacgatgtccgcccatggatgcaggctttaaggtacaccatgtatcagaaccaactccttgagaaaatcaaagagcagacagtacccatccgatcccatcttatggagctaggattaaccgctgccaaattcgcgagaaagagggggaacgtctcactggcaacccgactgttggcacagtgttcggaggtgcagcttggcaaaactacaaccgcacaagatctagtgcaacacttcaagaaactgtcaacacaggggcaagtcgatgaaaaatggggcccagagctggatattgaaaaaaccaaactgctgtacacagcagggcagagcactcatgccatggagatgctcagtagctgcgctattagcttctgcaaatctgttaaagctgagtacgccgtcgccaaaagtattctgactctggctaagtggattcaagcagaatggaaggagatctctggccagttgaaacaggtctaccgggctcagcatcagcaaaatttcactggactaagtacactgagcaaaaacatcctgacgctgattgagctgccctctgttaacactatggaggaagagtacccgaggatcgaaagtgagtcaacagtgcatatcggagtgggggagcccgactttatccttgggcagttgtatcatctgagttcagtacaggcccctgaggtcgcaaaatcttgggcggcactggccagctgggcttatagatggggtagaaaagtagtcgacaacgctagtcagggggaaggcgtgaggttactgccgcgagaaaagtctgaggtgcaaaatctattaccagacactatcactgaggaggaaaaagagaggatttacggtatcttaggacaggcggtatgccgccctgcgggtattcaagatgaggacatcacgctgcaaatcaccgaatccgaggataatgaagaggacgacatggtagacgtgatctggcggcaactcatctcttcctgtccttggttgtcagaactggatgagtcagccaccgaaggcgttattaaggtttggcgaaaagtggtggacagaattttttctctgtacaagttatcctgttccgcatacttcacctttctaaaactcaacgcaggacagattcctcttgatgaggacgacccaagactgcatctcagccaccgggtggaacagtcaactgatgacatgatcgtaatggctacgctgcgcctgctgaggttacttgtaaagcacgctggggaactgagacagtacttggaacatggactggagaccacccctactgcaccatggcgaggcataattcctcagcttttctcaagactcaaccaccctgaggtctacgtccggcaatctatatgcaatctcctgtgccgcgtggcacaggactctcctcaccttatcttgtacccggcaatagttgggaccatttctctgtctagcgaatcccaggcctccggtaataaattctccaccgccatcccgacactgcttggtaacatccaaggcgaagaattactcgtgtccgaatgtgaaggcggatcccctcccgcaagccaggacagcaacaaagacgaacccaaatccggcttaaacgaagaccaagccatgatgcaggattgctacagcaagattgtggataagctgtccagtgccaatccaaccatggtgctgcaggtgcagatgctcgtggccgagctgagacgtgtcacggtgctgtgggatgagctctggctcggagtgttactccagcagcatatgtacgttctgagaagaattcagcagttagaggatgaagtgaagagagtgcaaaataacaacacgctcaggaaagaagaaaagattgcgattatgagggagaaacatactgctctgatgaagccaatcgtttttgccttggagcatgtcagatccatcacagcggcaccagcggagaccccacacgagaaatggttccaagacaactatggggatgctatagaaaacgcactcgaaaaactaaagacccctcttaaccccgctaaaccaggctccagctggatacccttcaaggaaataatgctgagcctgcaacagagggcacaaaagcgcgcatcttatattttgaggcttgaagagatcagcccatggcttgctgccatgacaaacactgagattgcattgccaggagaggtttcagcccgagatactgtgacaatccacagcgtgggaggtaccattacgatactgccaaccaagacgaagccaaagaagcttctctttcttggaagcgatggcaaaagctacccttacctgttcaagggtcttgaggacctacacttagacgaacgcatcatgcaatttctgtcaatcgtgaacaccatgttcgcaaccataaaccgccaggagactcctcggttccatgcaaggcactattccgtgacacccctgggcacaagatccggcctcatccaatgggtggatggggcaacccctctgtttgggctctataagcggtggcagcagagggaggctgccttgcaagcccagaaagcccaggatagctaccagaccccccaaaatccaggcatagtgcctcgacctagcgaactctactattctaagattgggccagccttgaagacagtgggactgtccctggacgttagcagaagagactggccactgcacgtgatgaaagccgtgttggaggaattgatggaagccacccccccaaatttgctggccaaagaactctggtcctcttgcaccaccccagatgaatggtggagggtgacccaaagctacgctagatctacagccgtgatgtccatggtgggttacataatcggcttaggagatcggcacctggataatgtgctgatcgacatgacgacaggcgaggtggtacacatcgattataatgtatgcttcgagaaagggaaaagtctgcgggtcccagagaaggtgcccttccgcatgactcagaacattgaaaccgctctaggcgtgactggggtcgaaggggtattccggctatcatgcgaacaggttctacacattatgcgccgtgggagagagaccctactgaccctgctggaggcctttgtgtacgacccactggtcgattggacagcagggggtgaggcaggctttgcgggagctgtttacgggggtggaggtcagcaggcagagtccaagcagtctaaaagagagatggaacgagaaatcactaggtcactgttcagcagccgggtggcggagattaaggtcaactggtttaagaaccgggacgaaatgctcgtcgtgctccctaagcttgacggtagcctagacgagtatctcagtttacaagagcaattgaccgacgtagaaaaacttcaaggcaagctgctagaggaaattgagtttttagagggcgctgagggcgtggatcaccctagccacactctgcagcataggtactccgaacatacccagcttcagacacagcaaagagcggtccaggaggctatccaggttaagctgaatgagtttgaacaatggatcacccattaccaggcagccttcaataatttagaggctacacaactcgcctcactgctccaggagatcagtacacagatggatttggggccaccaagctatgtaccagccactgcattccttcagaacgccggacaggcacatctgataagtcagtgcgagcaactggagggagaggtgggtgccctccttcagcagagaagaagtgtacttcgtgggtgccttgaacaactgcatcactacgctaccgttgcgctgcagtatcctaaagcaatatttcagaaacataggatcgagcagtggaaaacctggatggaagagctcatctgcaataccaccgtcgaacgttgccaagaactctataggaagtacgagatgcaatatgctccccagccacctccgactgtgtgccagttcattaccgctaccgagatgacgctgcagcggtacgctgctgatatcaattctcggctgatacgacaggtcgagaggcttaagcaggaggctgttacggtccccgtgtgtgaagaccagctgaaggagatcgaacgctgcattaaagtgttcctgcacgaaaacggggaagaggggagtctatccttggccagcgtcatcatttctgcactgtgcactcttacgagacgtaatctcatgatggagggtgcggcatcatcagcgggagaacagctggtcgatctgacctcacgcgacggggcttggtttctggaggaactatgttcgatgagcggaaatgtaacatgcctcgtccagctgttgaaacagtgtcatctggtgccgcaggacttagatattcctaaccctatggaagcctcagagaccgtgcacttagcgaatggtgtatacacaagtcttcaggagctgaattcaaatttccggcagatcatcttcccagaggcgctgcggtgtttaatgaagggagagtataccctcgaatcaatgctgcacgagctggacggcctgatagagcagaccaccgatggggtcccgctccagacccttgtggaatctttacaggcatacctgcggaatgcggcaatgggccttgaagaggagacgcacgctcactacattgatgtggcacgtctgctgcacgcacagtacggagagctgattcagccaagaaacggctccgtggacgagacaccaaagatgtccgcaggccagatgctcctggtcgcgttcgacggtatgttcgcgcaagtggaaaccgcattttcactgttggtggagaagctgaacaagatggagattcccatcgcctggagaaaaatagatataatccgggaagccaggtctactcaggtgaactttttcgacgacgataatcaccgccaggtactggaggagattttctttcttaaaaggcttcagactattaaagagttcttcagactctgcggaactttttccaagaccctcagtggctccagctcactggaggaccagaatactgtgaacggtccggtccagattgttaacgtgaagacgttgttccggaattcgtgtttcagtgaggaccagatggccaagcccattaaagcatttacagctgattttgtgaggcaacttctcatcggcctgcccaaccaagctttgggacttactctatgttcttttatctctgcacttggtgtggatatcatcgcccaagtcgaggctaaggacttcggcgctgaaagcaaggtaagcgtggacgatctgtgcaagaaagccgtcgaacacaacattcagattggaaagttttcgcagctcgtcatgaatagagcgaccgtcctggcttccagctatgataccgcttggaagaagcacgacttggtgagacgtctggaaacttccatttcctcatgtaagacttccctccagcgcgtccaattgcacatcgccatgtttcagcaatggcagcatgaagatcttcttattaatcgtccccaggccatgagcgtgacaccaccccctcggtcagcaattctcacttcaatgaaaaaaaaactccatacgctctcgcagattgaaacgtccatagcaacagtgcaggaaaaactggccgcattggagtcctccatcgagcagcgcttgaagtgggccggaggtgcaaatccggctctggcccctgttctccaggatttcgaggcaacaattgccgagaggagaaatctcgtgctgaaggaaagccagagggctagccaggtgacttttctgtgctccaacataatccattttgaatccctgcggacccgaaccgccgaggccctgaaccttgatgcagcgctgttcgagctcataaagcgctgtcagcagatgtgcagctttgccagccagtttaactcaagcgtctccgagttggaactgagactgctccagcgggtggatacaggcctagagcatcctatcggctcttctgaatggttgctaagcgctcacaagcagcttacccaagacatgagtacccagcgcgcaattcagaccgagaaagagcagcagatcgagaccgtctgcgaaacgatccaaaatctggtcgacaacataaaaactgtcctgaccgggcataatcgccagcttggagacgtgaagcacctactgaaagctatggcaaaggatgaagaggccgctttggcggatggggaggatgtcccatacgagaattcagtgagacagtttctgggggagtataagtcgtggcaggataacatccagacagtactttttaccctcgtgcaagctatgggtcaggtgagatctcaggagcacgtagaaatgctgcaggagatcaccccaactcttaaagaactgaagacacagagccagagtatatacaacaacttggtctcttttgcttcgccattggtgacagatgcaaccaacgaatgctccagccctaccagttctgcaacctaccaacccagctttgcagcggctgtccgctcaaacaccggtcagaaaacccagccagacgtcatgtcacagaatgctagaaaactgattcaaaaaaacctggccacaagcgccgacactcccccatccacagtgcccggtacgggaaaatccgtcgcctgctcgccaaaaaaggccgtcagagatcccaagaccggaaaggctgtgcaggaaagaaactcttatgctgtgtccgtgtggaagcgcgtgaaagccaagttagagggacgcgacgtggatccgaacaggagaatgtccgtggcagagcaagtggattatgtgattaaggaggctaccaacctggataatttagcacaattgtatgagggttggacggcctgggtgtat

SEQ ID NO: 184417 - DNA, 10986 bp, Artificial Sequence
  derived and/or modified sequence
atgtcacggagagcgcctggctctcggctctcaagcggaggcggtgggggtggtactaaatacccaaggagctggaatgattggcaacccaggacagactcagccagtgctgatcccgacaatttaaagtatagctcttcaagagaccgtggaggatcctcatcctatggtctccagcctagtaattccgcagttgtgagccggcagcgacacgatgatactcgcgttcacgctgatatccagaacgatgagaagggtggctactccgtcaacggcggttcgggggagaacacatacggaaggaaaagcctgggacaggaactccgcgtgaataatgtgacctcgcccgagtttacaagcgtccaacatgggtctcgggcactcgccacaaaggatatgaggaaatctcaggagagaagtatgtcttattccgatgagagcagactgtcaaacctcttacgccgaatcaccagagaggacgatcgcgatcggcgacttgccaccgttaagcagcttaaggaatttatccagcaacctgaaaacaagttggtgctggtgaaacagctggataatatcctggctgcagtgcacgacgtgttgaacgagtcttccaaactacttcaggagctgcgccaagaaggagcctgttgcctgggtctgctgtgtgcctcgctttcttatgaggcggagaaaatattcaaatggatcttcagcaagttctcatctagtgctaaggatgaggtgaaactcctttacctatgtgccacatacaaagctctggagactgtgggagagaagaaagctttcagtagcgtcatgcagttggttatgaccagtttgcaaagtatcctggagaatgtggacacaccggagctgctctgtaagtgcgttaagtgtatccttctggtggctagatgttatcctcatatcttctcaaccaactttcgagatacagtagatatcctagtgggatggcatatcgaccatactcagaagccaagcctcacccaacaggtgtcaggatggctgcagtcactggaacctttctgggtcgctgatcttgcctttagtactactctactgggacagttcctggaagatatggaggcatacgctgaagaccttagtcacgtggctagcggagaaagcgtggatgaagatgtgccaccacccagtgtcagcttacccaaacttgccgctcttctccgggtcttcagtacggttgtacggtcgatcggagaaaggttcagtcctattcgaggccctccgatcactgaggcctacgtgaccgatgtactgtaccgtgtcatgcgctgtgtgactgccgctaaccaagtcttttttagcgaggccgtcctaacagctgcgaatgaatgtgtgggggttctgctcgggtctctggacccatccatgaccattcactgcgacatggtcataacatatggcttagaccaacttgagaactgtcaaacttgcgggaccgattacattatctccgtcttgaacttactgactctgatcgtggagcagatcaatacgaagctgccatccagttttgtggagaaattgttcatcccctctagcaaactcttgtttctgaggtaccataaagagaaggaggtcgttgccgtggcccacgctgtgtatcaggcagtgctaagcctgaaaaacatccccgtcctagaaaccgcttacaagctgatcctgggggaaatgacttgtgctcttaataatttgctgcacagcctgcaactgccagaagcctgctccgaaattaaacacgaagcttttaagaaccacgtgtttaatgtcgacaacgcgaagtttgtggtgattttcgatctcagcgccctgacaactatcggcaacgcaaaaaactccctgatcggaatgtgggccctcagccctacagtgttcgctctcctgagcaaaaacctgatgattgtccactcagatttagcagtccacttccccgcaatacagtatgccgttttgtataccctatattcacactgtaccagacacgatcactttatctccagctcactttccagcagctcccccagtctgttcgacggagccgtcataagtacggtgaccacagccacgaagaaacacttctctattattttgaatctgctcggaatcttgctgaaaaaggataatctgaaccaggatacgcggaagctgttaatgacctgggccctggaggccgctgtcctaatgaaaaagagcgaaacttacgctcctctgttcagcttaccttctttccataagttttgtaaaggtctgctcgcaaatacactcgtagaagatgtgaatatctgtctgcaggcctgctcatctctgcatgccctaagtagcagcctcccagatgatttgcttcagaggtgtgtggatgtatgtcgggtgcagttggtgcacagcgggacgaggatcagacaagcctttgggaaattactgaaaagtatccccctggatgttgtgctcagcaataataaccacactgagattcaggagattagcctcgctctccgcagccacatgtccaaggccccatccaacacttttcaccctcaagacttttcagacgttatttcattcatcctctacggtaactcgcacaggaccggcaaggataattggctggagagactgttttacagctgtcagcgtctggacaaaagagaccagtctaccattccccgaaatctcctgaaaacagatgctgttctgtggcagtgggcaatctgggaagcagcacagttcaccgtgctttctaagctgcgaacgccgttaggtcgagcccaggacactttccagaccatcgaaggtataatacgaagcttagccgctcatacactgaatccagatcaggatgtctcccagtggacgaccgcagacaatgacgagggtcatggtaacaaccaactccgactggtgctcctgttgcagtacctggagaacttggaaaaactgatgtataatgcatacgaggggtgcgcgaacgctctgacctccccaccaaaggtgattagaaccttcttttacactaacagacagacatgccaggactggttgaccagaataaggctgagcatcatgcgcgttggcttattggccggacagccggctgtcaccgtcagacacggtttcgatcttttgaccgagatgaagactactagtctgagccaggggaatgagctagaagtgaccataatgatggtggttgaagcactgtgtgaactgcactgccccgaggctatccaaggtatcgccgtgtggagtagcagtattgtgggcaagaacctcctttggatcaacagcgtggctcagcaggccgaaggacgttttgaaaaggcttccgtcgagtatcaggaacacctgtgcgcaatgacaggcgtggactgttgcatcagttcttttgacaaatcagtgttgacattagctaatgcgggacggaattccgctagcccaaaacacagcctcaatggcgagtccaggaaaacagttttgtcgaagcctaccgattcttctccagaagttatcaattacttgggtaacaaggcttgtgaatgttatatctcgattgctgattgggccgctgttcaggagtggcagaacgcaattcatgacctgaagaaatcaacatcaagtacttcactcaacctgaaagcagattttaactatattaagtcactgtcaagtttcgaaagtggcaagttcgtcgaatgcaccgagcagctggaactactgcccggagaaaatatcaatctgttagccggaggcagcaaggaaaagatcgatatgaagaaactcctccccaatatgctttcccccgatcccagagagctgcagaagtcaatcgaggtgcaattgctcaggtcttctgtctgccttgcaacggcactcaatcctatcgagcaggaccaaaaatggcaatctatcacagagaacgtggtaaagtacttgaagcaaaccagtcgaatcgccattggaccgctgcggttaagtaccctcacggtttcacaatctcttccagtgctcagtacattgcagctctattgctctagcgctcttgaaaacactgtgtccaatcgactcagcactgaagattgtctgatacctctgttttctgaggcgctgcgaagttgtaagcaacacgatgtgcggccttggatgcaggccctccgctacacaatgtaccagaatcagttgcttgagaagatcaaagagcaaacggtgcctatccgatcacacctgatggagcttggtctcactgcagccaaattcgccagaaaacgaggcaatgtgagccttgcaaccagattgctggctcagtgcagcgaagtgcagcttgggaaaaccacaacagcacaggacctggttcagcactttaaaaaactctccacacaggggcaggttgacgagaaatgggggccagagctggacattgaaaagactaaattgctgtacactgccggacagtccacacatgccatggagatgctcagctcctgcgcaatcagcttctgtaagagcgtgaaagctgaatacgctgtggccaagagtatcttgactttagccaagtggatccaggccgaatggaaagagatctctggccagctaaaacaggtttatcgtgcccagcaccagcagaacttcaccggcctctccacactcagtaagaacattttaaccctgatagaactgcctagcgtaaacactatggaagaagaatatccccgtattgagtccgagagcactgtacatatcggcgtgggcgagcctgattttatcctcggacagctttatcacctgtcttccgtgcaggctcccgaagtagcgaagtcttgggcagctctggcatcctgggcctacaggtggggaagaaaagtcgtcgacaatgcctctcagggcgagggtgtgaggctgctacctagggagaagagtgaagtgcagaatcttcttccagacaccattaccgaggaggagaaagaacgcatctacgggattcttggacaggctgtgtgcagacccgcagggattcaggacgaggacatcacattacagatcaccgagagcgaggacaacgaagaagacgatatggttgacgtcatctggaggcagttgattagttcatgcccatggttatctgagctcgatgagtcagccactgagggggtcataaaggtatggagaaaggtggtcgaccgcattttctcattgtacaaattgagttgtagtgcttatttcacctttctgaaactaaatgctggacaaatcccactcgatgaggatgacccaaggctgcacttgtcacacagagttgagcagtctaccgatgatatgatagttatggccaccctcagactcttgagacttttggtcaaacacgcgggtgagcttcgccagtatttggagcatggcctcgagaccactccaacagctccatggaggggaattattccacagttattctcaagactcaatcacccagaggtatacgttagacagtctatatgcaacttattatgccgcgtggcccaggacagtcctcatctgattctttatcctgcaatcgtcgggaccatctcccttagcagcgagtcccaggctagtggaaataaatttagtacagcaatcccaactttgctggggaacatccagggcgaagagctgttagttagcgaatgtgaagggggatctcccccagccagtcaggactctaacaaggatgaaccaaaaagcgggctgaatgaggaccaggcaatgatgcaagattgctattcaaagatcgtcgataagctctcttcagcgaatcccacgatggtgctccaggtccagatgttagtcgccgaactgcggagagtgactgtgctctgggacgagctgtggctgggggttttactacagcagcatatgtacgttttgcgcaggatacagcagctggaggatgaggtgaagagggttcagaacaataataccctcagaaaggaggagaaaatagcaatcatgcgagaaaagcacacagccttaatgaaaccaattgttttcgcactagagcatgtgaggtctataaccgccgcacctgccgaaacaccacacgagaagtggttccaggataattatggagatgctatcgagaatgccttagagaaattgaaaacccctctgaatcctgccaagcccggatctagttggattcctttcaaggagatcatgttgtccctgcagcagagggcccaaaagcgggcttcctatattttaaggcttgaggaaatcagcccatggttagctgccatgactaatactgagattgcattaccgggagaggtaagcgctagggacactgtaaccatccactctgtggggggaacaatcactattcttcctacaaagaccaagccaaagaagttgctgttcttgggttctgatggaaaaagttatccatatctgttcaagggacttgaagacctccacctggatgaaaggatcatgcagttcctctcaatcgtgaacacaatgttcgccacgatcaacagacaggaaacaccacgctttcacgcacgacactactcagtgactccacttgggacacgatcaggtctgatccagtgggtcgatggagcgacccctctcttcgggctgtataaaagatggcagcagagagaagctgccttacaggcccagaaagcacaggattcctatcagacaccccagaatccaggtatcgtgcccaggccgagcgagctgtattatagtaagatcggcccagctctcaaaaccgtgggactatctttggacgttagccgcagggattggcctctgcacgtgatgaaagccgtcctggaggagctgatggaggcgaccccacccaaccttctcgctaaggaactgtggtcctcttgtacaacacccgatgagtggtggcgggtgacgcaaagctacgcccgatcaactgctgtaatgtccatggtgggttacataatcggacttggagataggcacttagataatgtcttgattgacatgacgacaggagaagttgtgcacatcgactacaacgtgtgtttcgagaagggcaagtccctgcgcgtgcccgaaaaagtgcctttccggatgacacagaacatcgagaccgctcttggggtaacaggcgtagagggggtcttccggttaagctgcgagcaagtcttgcacatcatgagacgtggcagagaaaccttattgaccctgctcgaagctttcgtgtatgacccgcttgtggattggacagctggtggcgaggcgggatttgcaggggcagtgtacgggggtggcggacagcaggccgagagtaaacagagcaagcgggaaatggagagggagataactagatccttgtttagcagcagagtggccgagattaaagtcaattggtttaaaaatcgcgatgagatgctggtggtgctgccaaagctggatggctcgttggacgaatatttgtcgctccaggagcagttgactgacgtcgaaaagctgcagggtaagctcttggaggaaatcgagttcctcgaaggggcagagggtgtggaccatccttctcacaccctgcaacataggtacagcgaacacacacagctgcagactcagcaaagggccgtccaggaggctatccaggttaaactcaacgagtttgaacagtggattacccactatcaagctgcctttaacaatttagaagccacccaactggctagtctgcttcaggaaatttcgacacagatggacttgggacccccaagttacgttccagcgactgcatttctgcagaacgccggtcaggctcacctcatcagccagtgcgagcagctcgagggagaggttggtgccctgctgcagcagcgtcggtcagtcctccggggatgtctggaacagctgcatcactatgctaccgtcgccttacagtaccccaaagccatctttcaaaagcaccggattgaacagtggaagacatggatggaggagctaatttgcaacacgacagtggagcgctgtcaggaattgtacaggaagtacgaaatgcaatatgctccacaaccccctcctaccgtttgtcaattcattactgccacagaaatgacactgcagcgctacgccgctgatataaactcgcggctcattaggcaagtggagaggttgaagcaggaggccgtgacagtgcctgtgtgcgaagatcagctgaaagaaatcgagcggtgcatcaaggtattcctgcacgaaaatggcgaagaaggttctctcagcctggccagcgtcattattagcgctctgtgtaccttgacccgccgaaaccttatgatggagggcgctgcatcgtcggccggtgagcagctcgttgacctgacttcacgcgatggcgcatggttcctcgaagagctgtgttcaatgagcgggaacgtgacctgtttagtgcagttactgaagcagtgccatttagtgccccaggacctggacatcccaaatcctatggaagcctccgaaactgtgcacctggctaacggggtttatactagcctacaagaactcaacagcaatttccgccaaatcatctttcctgaagctttgaggtgtctaatgaagggtgagtataccttagaaagtatgctgcacgaactggacggcttgatcgaacagacaactgatggtgtacccctgcagacactggtcgaatcactgcaagcttacttaagaaatgcagctatgggcttagaagaggagactcatgcacactacattgatgtggcccgtctgctgcacgctcaatacggagagctgatccagccccgtaacggcagcgtggacgaaacccccaaaatgagcgccggacaaatgctgttggtcgcgttcgatggaatgttcgcccaggtggaaaccgcattctccttgctggtggagaagctcaataaaatggagatccctattgcatggagaaaaatcgatattattcgcgaagcaagaagtacacaggtcaacttttttgacgacgataatcatcgacaggtcctggaggagattttcttcctgaagcgtctgcagacgatcaaggagttttttaggctgtgcggcaccttctctaaaaccctgagtggcagcagttcactagaagaccaaaacacggtgaatgggccagttcagatcgtaaacgtgaagaccctctttagaaattcatgtttctccgaggaccagatggctaagcccatcaaagccttcactgcagacttcgttcggcaactgctcattggtctgccaaaccaagccctgggtttgaccttgtgcagctttatttccgctcttggcgttgacatcatcgctcaggtcgaggccaaggatttcggcgcagagtccaaggtctccgtggatgatctgtgtaagaaagccgtggaacacaatatccagatcgggaaattttctcagctggtgatgaatcgagctactgtgctagcttcgtcttatgacactgcttggaaaaaacacgacctcgttcggcgtcttgagacttctatatccagttgcaagacatctttacaaagggtgcaactgcatattgcgatgttccaatggcagcatgaggatttactcattaacaggccccaggccatgtccgtgacacctccccctcggtcagcaatcctcaccagcatgaagaagaaactgcatacactgagccagattgagacgagcattgcaacagttcaggagaagctggcggcactggagagcagcatcgagcagaggttgaaatgggccggtggagccaatcctgctctcgcccctgtcttgcaagatttcgaagctactattgccgagagacgcaatttagtgctgaaggagagccaacgcgctagccaagtaaccttcctgtgtagcaatattatacatttcgagagtctcaggacccgtacagcagaggccctcaacctggacgctgccttgttcgagctcattaagagatgccagcagatgtgtagctttgccagccagtttaacagctccgtgagcgaattagaactccgacttctacagagagttgataccggcctggaacaccccatcggaagctctgaatggctcctgagtgctcacaaacaattgacccaagacatgtcaacccagagggccatacagacggagaaagagcaacagatcgaaactgtgtgtgagaccattcagaatcttgtggataatatcaagacagtgttgaccgggcacaaccggcagttaggcgatgtgaagcatttgctaaaagctatggctaaggacgaggaagcagccttggccgacggcgaggacgtcccctacgagaatagcgtccggcagtttttgggggagtacaaatcctggcaggataatattcaaactgtgctgtttacactcgtgcaggcaatgggccaggtgcgcagccaggagcatgtcgaaatgctgcaggagatcacgcctacccttaaagagctgaaaacccaaagtcaatctatctacaataacctggtcagcttcgccagccctctcgtcacagatgccacaaacgagtgtagttctccaactagcagcgcaacttatcaaccctcattcgctgcggctgtccggtcgaacacaggccagaaaacccaaccagatgtgatgtctcagaacgcgaggaaattgatccagaagaacctcgctactagtgccgatacgccccctagcacagtgcctggaactggaaagagtgtcgcgtgttctccaaagaaagctgttagagacccaaaaaccgggaaagctgtgcaggagaggaactcttacgccgtgtcagtgtggaaacgcgtcaaggcaaagctcgaaggacgggacgtcgaccccaaccgcaggatgtcggttgctgagcaggtggattacgtaattaaggaagcaaccaaccttgacaacttggcccagttatatgagggatggacagcgtgggtctat

SEQ ID NO: 184418 - DNA, 16068 bp, Artificial Sequence
  derived and/or modified sequence
gccgtgtgagcgtgaggagctgccgccaccgcctgctcctcgtcgtcctcgtcctccggggccccggcgacgtgggccgcgcacggccctggaaaagacgtcgcctccccttcatccgcctctctctcaccgcgccgctcccgcctcctcgtcctgcgctgcgggctcaggcggaacccggaacggccgtcctcttcccccgccctccgccgcctcctccttctcctcctcctcctcctcctcctccttctcggcttcctcctcagccccgggccggagcggggtgtcggcggcggccggttcgggcggcgactcgcgcttctttgggcggcggcgcttggccatgtcgtgtcggggaaggtaatgagccgcagagccccggggtctcggctgagcagcggcggcggcggcggcggcaccaagtatccgcggagctggaatgactggcaacccagaactgatagtgcatcagccgacccagataatttaaaatattcttcatccagagatagaggtggttcttcctcttatggactgcaaccttcaaattcagctgtggtgtctcggcaaaggcacgatgataccagagtccacgctgacatacagaatgacgaaaagggtggctacagtgtcaatggaggatctggggaaaatacttatggtcggaagtcgttggggcaagagctgagggttaacaatgtgaccagccctgagttcaccagtgttcagcatggcagtcgtgctttagccaccaaagacatgaggaaatcacaggagagatcgatgtcttattctgatgagtctcgactgtcgaatcttcttcggaggatcacccgggaagacgacagagaccgaagattggctactgtaaagcagttgaaagaatttattcagcaaccagaaaataagctggtactagttaaacaattggataatatcttggctgctgtacatgacgtgcttaatgaaagtagcaaattgcttcaggagttgagacaggagggagcttgctgtcttggccttctttgtgcttctctgagctatgaggctgagaagatcttcaagtggatttttagcaaatttagctcatctgcaaaagatgaagttaaactcctctacttatgtgccacctacaaagcactagagactgtaggagaaaagaaagccttttcatctgtaatgcagcttgtaatgaccagcctgcagtctattcttgaaaatgtggatacaccagaattgctttgtaaatgtgttaagtgcattcttttggtggctcgatgttaccctcatattttcagcactaattttagggatacagttgatatattagttggatggcatatagatcatactcagaaaccttcgctcacgcagcaggtatctgggtggttgcagagtttggagccattttgggtagctgatcttgcattttctactactcttcttggtcagtttctggaagacatggaagcatatgctgaggacctcagccatgtggcctctggggaatcagtggatgaagatgtccctcctccatcagtgtcattaccaaagctggctgcacttctccgggtatttagtactgtggtgaggagcattggggaacgcttcagcccaattcggggtcctccaattactgaggcatatgtaacagatgttctgtacagagtaatgagatgtgtgacggctgcaaaccaggtgtttttttctgaggctgtgttgacagctgctaatgagtgtgttggtgttttgctcggcagcttggatcctagcatgactatacattgtgacatggtcattacatatggattagaccaactggagaattgccagacttgtggtaccgattatatcatctcagtcttgaatttactcacgctgattgttgaacagataaatacgaaactgccatcatcatttgtagaaaaactgtttataccatcatctaaactactattcttgcgttatcataaagaaaaagaggttgttgctgtagcccatgctgtttatcaagcagtgctcagcttgaagaatattcctgttttggagactgcctataagttaatattgggagaaatgacttgtgccctaaacaacctcctacacagtctacaacttcctgaggcctgttctgaaataaaacatgaggcttttaagaatcatgtgttcaatgtagacaatgcaaaatttgtagttatatttgacctcagtgccctgactacaattggaaatgccaaaaactcactaatagggatgtgggcgctatctccaactgtctttgcacttctgagtaagaatctgatgattgtgcacagtgacctggctgttcacttccctgccattcagtatgctgtgctctacacattgtattctcattgtaccaggcatgatcactttatctctagtagcctcagttcttcctctccttctttgtttgatggagctgtgattagcactgtaactacggctacaaagaaacatttctcaattatattaaatcttctgggaatattacttaagaaagataaccttaaccaggacacgaggaaactgttaatgacttgggctttggaagcagctgttttaatgaagaagtctgaaacatacgcacctttattctctcttccgtctttccataaattttgcaaaggccttttagccaacactctcgttgaagatgtgaatatctgtctgcaggcatgcagcagtctacatgctctgtcctcttccttgccagatgatcttttacagagatgtgtcgatgtttgccgtgttcaactagtgcacagtggaactcgtattcgacaagcatttggaaaactgttgaaatcaattcctttagatgttgtcctaagcaataacaatcacacagaaattcaagaaatttctttagcattaagaagtcacatgagtaaagcaccaagtaatacattccacccccaagatttctctgatgttattagttttattttgtatgggaactctcatagaacagggaaggacaattggttggaaagactgttctatagctgccagagactggataagcgtgaccagtcaacaattccacgcaatctcctgaagacagatgctgtcctttggcagtgggccatatgggaagctgcacaattcactgttctttctaagctgagaaccccactgggcagagctcaagacaccttccagacaattgaaggtatcattcgaagtctcgcagctcacacattaaaccctgatcaggatgttagtcagtggacaactgcagacaatgatgaaggccatggtaacaaccaacttagacttgttcttcttctgcagtatctggaaaatctggagaaattaatgtataatgcatacgagggatgtgctaatgcattaacttcacctcccaaggtcattagaacttttttctataccaatcgccaaacttgtcaggactggctaacgcggattcgactctccatcatgagggtaggattgttggcaggccagcctgcagtgacagtgagacatggctttgacttgcttacagagatgaaaacaaccagcctatctcaggggaatgaattggaagtaaccattatgatggtggtagaagcattatgtgaacttcattgtcctgaagctatacagggaattgctgtctggtcatcatctattgttggaaaaaatcttctgtggattaactcagtggctcaacaggctgaagggaggtttgaaaaggcctctgtggagtaccaggaacacctgtgtgccatgacaggtgttgattgctgcatctccagctttgacaaatcggtgctcaccttagccaatgctgggcgtaacagtgccagcccgaaacattctctgaatggtgaatccagaaaaactgtgctgtccaaaccgactgactcttcccctgaggttataaattatttaggaaataaagcatgtgagtgctacatctcaattgccgattgggctgctgtgcaggaatggcagaacgctatccatgacttgaaaaagagtaccagtagcacttccctcaacctgaaagctgacttcaactatataaaatcattaagcagctttgagtctggaaaatttgttgaatgtaccgagcagttagaattgttaccaggagaaaatatcaatctacttgctggaggatcaaaagaaaaaatagacatgaaaaaactgcttcctaacatgttaagtccggatccgagggaacttcagaaatccattgaagttcaattgttaagaagttctgtttgtttggcaactgctttaaacccgatagaacaagatcagaagtggcagtctataactgaaaatgtggtaaagtacttgaagcaaacatcccgcatcgctattggacctctgagactttctactttaacagtttcacagtctttgccagttctaagtaccttgcagctgtattgctcatctgctttggagaacacagtttctaacagactttcaacagaggactgtcttattccactcttcagtgaagctttacgttcatgtaaacagcatgacgtgaggccatggatgcaggcattaaggtatactatgtaccagaatcagttgttggagaaaattaaagaacaaacagtcccaattagaagccatctcatggaattaggtctaacagcagcaaaatttgctagaaaacgagggaatgtgtcccttgcaacaagactgctggcacagtgcagtgaagttcagctgggaaagaccaccactgcacaggatttagtccaacattttaaaaaactatcaacccaaggtcaagtggatgaaaaatgggggcccgaacttgatattgaaaaaaccaaattgctttatacagcaggccagtcaacacatgcaatggaaatgttgagttcttgtgccatatctttctgcaagtctgtgaaagctgaatatgcagttgctaaatcaattctgacactggctaaatggatccaggcagaatggaaagagatttcaggacagctgaaacaggtttacagagctcagcaccaacagaacttcacaggtctttctactttgtctaaaaacatactcactctaatagaactgccatctgttaatacgatggaagaagagtatcctcggatcgagagtgaatctacagtgcatattggagttggagaacctgacttcattttgggacagttgtatcacctgtcttcagtacaggcacctgaagtagccaaatcttgggcagcgttggccagctgggcttataggtggggcagaaaggtggttgacaatgccagtcagggagaaggtgttcgtctgctgcctagagaaaaatctgaagttcagaatctacttccagacactataactgaggaagagaaagagagaatatatggtattcttggacaggctgtgtgtcggccggcggggattcaggatgaagatataacacttcagataactgagagtgaagacaacgaagaagatgacatggttgatgttatctggcgtcagttgatatcaagctgcccatggctttcagaacttgatgaaagtgcaactgaaggagttattaaagtgtggaggaaagttgtagatagaatattcagcctgtacaaactctcttgcagtgcatactttactttccttaaactcaacgctggtcaaattcctttagatgaggatgaccctaggctgcatttaagtcacagagtggaacagagcactgatgacatgattgtgatggccacattgcgcctgctgcggttgctcgtgaagcatgctggtgagcttcggcagtatctggagcacggcttggagacaacacccactgcaccatggagaggaattattccgcaacttttctcacgcttaaaccaccctgaagtgtatgtgcgccaaagtatttgtaaccttctctgccgtgtggctcaagattccccacatctcatattgtatcctgcaatagtgggtaccatatcgcttagtagtgaatcccaggcttcaggaaataaattttccactgcaattccaactttacttggcaatattcaaggagaagaattgctggtttctgaatgtgagggaggaagtcctcctgcatctcaggatagcaataaggatgaacctaaaagtggattaaatgaagaccaagccatgatgcaggattgttacagcaaaattgtagataagctgtcctctgcaaaccccaccatggtattacaggttcagatgctcgtggctgaactgcgcagggtcactgtgctctgggatgagctctggctgggagttttgctgcaacaacacatgtatgtcctgagacgaattcagcagcttgaagatgaggtgaagagagtccagaacaacaacaccttacgcaaagaagagaaaattgcaatcatgagggagaagcacacagctttgatgaagcccatcgtatttgctttggagcatgtgaggagtatcacagcggctcctgcagaaacacctcatgaaaaatggtttcaggataactatggtgatgccattgaaaatgccctagaaaaactgaagactccattgaaccctgcaaagcctgggagcagctggattccatttaaagagataatgctaagtttgcaacagagagcacagaaacgtgcaagttacatcttgcgtcttgaagaaatcagtccatggttggctgccatgactaacactgaaattgctcttcctggggaagtctcagccagagacactgtcacaatccatagtgtgggcggaaccatcacaatcttaccgactaaaaccaagccaaagaaacttctctttcttggatcagatgggaagagctatccttatcttttcaaaggactggaggatttacatctggatgagagaataatgcagttcctatctattgtgaataccatgtttgctacaattaatcgccaagaaacaccccggttccatgctcgacactattctgtaacaccactaggaacaagatcaggactaatccagtgggtagatggagccacacccttatttggtctttacaaacgatggcaacaacgggaagctgccttacaagcacaaaaggcccaagattcctaccaaactcctcagaatcctggaattgtaccccgtcctagtgaactttattacagtaaaattggccctgctttgaaaacagttgggcttagcctggatgtgtcccgtcgggattggcctcttcatgtaatgaaggcagtattggaagagttaatggaggccacacccccgaatctccttgccaaagagctctggtcatcttgcacaacacctgatgaatggtggagagttacgcagtcttatgcaagatctactgcagtcatgtctatggttggatacataattggccttggagacagacatctggataatgttcttatagatatgacgactggagaagttgttcacatagattacaatgtttgctttgaaaaaggtaaaagccttagagttcctgagaaagtaccttttcgaatgacacaaaacattgaaacagcactgggtgtaactggagtagaaggtgtatttaggctttcatgtgagcaggttttacacattatgcggcgtggcagagagaccctgctgacgctgctggaggcctttgtgtacgaccctctggtggactggacagcaggaggcgaggctgggtttgctggtgctgtctatggtggaggtggccagcaggccgagagcaagcagagcaagagagagatggagcgagagatcacccgcagcctgttttcttctagagtagctgagattaaggtgaactggtttaagaatagagatgagatgctggttgtgcttcccaagttggacggtagcttagatgaatacctaagcttgcaagagcaactgacagatgtggaaaaactgcagggcaaactactggaggaaatagagtttctagaaggagctgaaggggtggatcatccttctcatactctgcaacacaggtattctgagcacacccaactacagactcagcaaagagctgttcaggaagcaatccaggtgaagctgaatgaatttgaacaatggataacacattatcaggctgcattcaataatttagaagcaacacagcttgcaagcttgcttcaagagataagcacacaaatggaccttggtcctccaagttacgtgccagcaacagcctttctgcagaatgctggtcaggcccacttgattagccagtgcgagcagctggagggggaggttggtgctctcctgcagcagaggcgctccgtgctccgtggctgtctggagcaactgcatcactatgcaaccgtggccctgcagtatccgaaggccatatttcagaaacatcgaattgaacagtggaagacctggatggaagagctcatctgtaacaccacagtagagcgttgtcaagagctctataggaaatatgaaatgcaatatgctccccagccacccccaacagtgtgtcagttcatcactgccactgaaatgaccctgcagcgatacgcagcagacatcaacagcagacttattagacaagtggaacgcttgaaacaggaagctgtcactgtgccagtttgtgaagatcagttgaaagaaattgaacgttgcattaaagttttccttcatgagaatggagaagaaggatctttgagtctagcaagtgttattatttctgccctttgtacccttacaaggcgtaacctgatgatggaaggtgcagcgtcaagtgctggagaacagctggttgatctgacttctcgggatggagcctggttcttggaggaactctgcagtatgagcggaaacgtcacctgcttggttcagttactgaagcagtgccacctggtgccacaggacttagatatcccgaaccccatggaagcgtctgagacagttcacttagccaatggagtgtatacctcacttcaggaattgaattcgaatttccggcaaatcatatttccagaagcacttcgatgtttaatgaaaggggaatacacgttagaaagtatgctgcatgaactggacggtcttattgagcagaccaccgatggcgttcccctgcagactctagtggaatctcttcaggcctacttaagaaacgcagctatgggactggaagaagaaacacatgctcattacatcgatgttgccagactactacatgctcagtacggtgaattaatccaaccgagaaatggttcagttgatgaaacacccaaaatgtcagctggccagatgcttttggtagcattcgatggcatgtttgctcaagttgaaactgctttcagcttattagttgaaaagttgaacaagatggaaattcccatagcttggcgaaagattgacatcataagggaagccaggagtactcaagttaatttttttgatgatgataatcaccggcaggtgctagaagagattttctttctaaaaagactacagactattaaggagttcttcaggctctgtggtaccttttctaaaacattgtcaggatcaagttcacttgaagatcagaatactgtgaatgggcctgtacagattgtcaatgtgaaaaccctttttagaaactcttgtttcagtgaagaccaaatggccaaacctatcaaggcattcacagctgactttgtgaggcagctcttgatagggctacccaaccaagccctcggactcacactgtgcagttttatcagtgctctgggtgtagacatcattgctcaagtagaggcaaaggactttggtgccgaaagcaaagtttctgttgatgatctctgtaagaaagcggtggaacataacatccagatagggaagttctctcagctggttatgaacagggcaactgtgttagcaagttcttacgacactgcctggaagaagcatgacttggtgcgaaggctagaaaccagtatttcttcttgtaagacaagcctgcagcgggttcagctgcatattgccatgtttcagcagtggcaacatgaagatctacttatcaatagaccacaagccatgtcagtcacacctcccccacggtctgctatcctaaccagcatgaaaaagaagctgcataccctgagccagattgaaacttctattgcaacagttcaggagaagctagctgcacttgaatcaagtattgaacagcgactcaagtgggcaggtggtgccaaccctgcattggcccctgtactacaagattttgaagcaacgatagctgaaagaagaaatcttgtccttaaagagagccaaagagcaagtcaggtcacatttctctgcagcaatatcattcattttgaaagtttacgaacaagaactgcagaagccttaaacctggatgcggcgttatttgaactaatcaagcgatgtcagcagatgtgttcgtttgcatcacagtttaacagttcagtgtctgagttagagcttcgtttattacagagagtggacactggtcttgaacatcctattggcagctctgaatggcttttgtcagcacacaaacagttgacccaggatatgtctactcagagggcaattcagacagagaaagagcagcagatagaaacggtctgtgaaacaattcagaatctggttgataatataaagactgtgctcactggtcataaccgacagcttggagatgtcaaacatctcttgaaagctatggctaaggatgaagaagctgctctggcagatggtgaagatgttccctatgagaacagtgttaggcagtttttgggtgaatataaatcatggcaagacaacattcaaacagttctatttacattagtccaggctatgggtcaggttcgaagtcaagaacacgttgaaatgctccaggaaatcactcccaccttgaaagaactgaaaacacaaagtcagagtatctataataatttagtgagttttgcatcacccttagtcaccgatgcaacaaatgaatgttcgagtccaacgtcatctgctacttatcagccatccttcgctgcagcagtccggagtaacactggccagaagactcagcctgatgtcatgtcacagaatgctagaaagctgatccaaaaaaatcttgctacatcagctgatactccaccaagcaccgttccaggaactggcaagagtgttgcttgtagtcctaaaaaggcagtcagagaccctaaaactgggaaagcggtgcaagagagaaactcctatgcagtgagtgtgtggaagagagtgaaagccaagttagagggccgagatgttgatccgaataggaggatgtcagttgctgaacaggttgactatgtcattaaggaagcaactaatctagataacttggctcagctgtatgaaggttggacagcctgggtgtgaatggcaagacagtagatgagtctggttaagcgaggtcagacatccaccagaatcaactcagcctcaggcatccaaagccacaccacagtcggtggtgatgcaactgggggcttactctgaggaaacctaggaaatctcggtgcactaggaagtgaatcccgcaggacagctgcactcagggatacgcccaacaccatggcctgcaaccccagggtcaagggtgaaggaaagcaagctcaccgcctgaacacggagattgtctttctgccacagaacagcagcagacgtgtcgggaggttagctgcggaaagaaatcgggatgccgcggagcacagagtgatttggaactccattccacctgaccctgtgtgtacaatccaggaaaaaaacaaaccccactcagaaacagagaaaactggggtcgcgaagaaatcacagccaaggaagatttgatgcattcagattctcgtgtaacacttgttgcttggcaacagtactggttgggttgaccagtaagtagaaaaaggctaaaggctatgcgatatgaatttcagaaatggactgaaaatggagagctatgtaacagatacactacagtagaagaacttacttctgaaatgaagggaaaaaaaccaccccatcgttccctactcctccccaccacttacccgttccccctttacctaatctagtagattagccatctttcaaattcacttttatttcagtccttatatttcatatacttccgtctcgatgctgttaacaacttctgataacatggaaaattcaaggattgtttaaaggtctgatgatcacacacaaaatgtaattccggttatttaagtcatttctgtgattctatcatgtacagtttccagaattgtcactgtgcattcaaaagtaatgaatctaacagacatttgatttaatgtacactcccttttgcttatagtgtgcattttttttggaggtcattcaaattttccctcttctgtgatagctgtagtttctttcatagaaagtagctaatccagtgtaatcttttacctttttaaaaaccaagatagagtatctattagagttttacattgttgatgatagattaacaataaagtgatgttctggtggaggtagactgaaatttttttaattcatgtttttcatttgatacttttaatttacacttagtaaattaaaagttgtttaatttacttggcattttaggacatgtacatgaaacagtgaaaatgagatccaccaacatcttttattaagttcagttattagtctgtgaagtgctttactttttgcacaattttaatagcttgctattcagtaatacattatagtgaattcatgatcaaggtttccttaaatttagcattgcatttcagtactgactgtgtaagctaaattgctgatccaaaataaaaacccagactagaatagggttcttaaaatcaagtatcaatacaaaatagaacacaattaaaatcttaattgttggctgggcacagtggctcacgcctgtaatcccagcactttgggaggccgaggcgggcggatcatgaggttaggagagcgagaccatcctggctaacacggtgaaaccccgtctttactaaaaatacaaaaaaaattagccgggcgtggtggcgggcgcctgtagtcccagctactcgggaggctgaggcaggagaatggcgtgaacccaggaggcggagcttgcagtgagccgagattgtgccactgcactccagcctgggcaacagagctagactctgtgtcaaaaataaatgactagataaaaaaaaaaattgtttgagtacattttccctgcattttagagattaggacagtggtcactttctagttgccgtcttcacagacaaacttgaaaggtattaaggaaaaaattccacatagctctgggccttttttgtattctgattgccacgttaatctgtaatcgttaagtacccatgaaagaatgtgtttcagtatcagtgcttttttggtactttaacaagtattgtaggcacggtggatttttttgaaatacccatgtgtccaatagcaagttaaggaacctagcgcatcaaattttgttttcttcattcatttggaaccttattttcgcaaaaaacctagctggaataataatgccatattgtattttgcacactgctttattttctagaggctctgggagcaaattacattcatcacattacctctgctctctcaagattaaagtctttcagcaacattctttattgtcatcataaggaaaaacttttatcgcaatgatagtcagttcacattagtttagcactatagatagtattcagaaattgctttctctttggtaaagaagataaataggtgaattttattgcctgtgttttcaggcttcagaggtacctggcaccttactcaagcaaaaacaaaaaacagctttacttcaaaagcatgtgcctctggtaaattatccatcacttttgttttaaagtggtccctccaagaataatgtggcatacacagtgggtttggttgtaaggcagatgtaatagatgacttcaaaagcctgctccttactgcactctggacaaggccctggtctgtatagtttggcttcctctgttaagtcattctacaaggtgacttgccatttgaactttcgtaagagacctcagcagttagactgagaaaagttagagtgctgtagttatgaagtcatacatttttgataaaatacctgtggaaaaccagggatcctctcctgtttctctctcttgcctccccctttccctccattcctctgtcgcctccccctctcctccactttctttaagaatcagggggtacagaataacctacaaacaacctcttcaaagtacccttggaaattgaagttcaatcttaagttttttgctgtctttaatttactagaattgcctaatttttagttgatttctctacagagcttagcttgtgtagttatttctcttttactgttgctttggtgtgtcttgaagtttgattgattatttttggtcattgagttcttagtgtagtttgctagatgattattaagattcttttgtgtctgacacttgtggtgagttgcttttgaaatctgttgagatttccatgtgagaactgataatcaggctcttgatctgcttccctaaattacttttttagagcccaaaccccaggtttagggtgagggtttgtaatacaaagaaacacttccatcacttctgcccttaacccttgcctctattacctaagcttagtaagtagttttcttaatattgtccaatgtttggtgttatctgcattgttttttgtttttttaattgtggttgttctgacgtgtgaaatttaaggaaagagccattttttaaaaatgccgagcagggcaatgcaagtacagccaaatattagacttgatgtgcaatcttcggtcctttttaatctggggtattataggcagtactttaaattgcaaagtcttccgggcctattttcctctacatttttgtaattaactctgggggcttacttgttttggcagtactgaaatcaaaggagctggttcttcttttctcccaattattttcatatgaaagcacctacaattagcctgttagtcctattcagatacatcaaatatcagtgaatgctttactattcgcacatttaagcatctttgttttacataaaattagagtatgaaaaccagtgttcaattttttatcttgttgagcttgtaaaatgccagcaatttaaaactaggacttttccccccataagccaaggaggtagaattactaatacaagggttaaagaaggtagattttgttttcaatatttgggtaatattagaaagattcttcccacagggaagaactagcaagtgtcccaattttttccaaacgttggggaggggaaaattcactgtatcatgaaaccctaagggtttgttgcacttcctgctttttaggcctggataacagtatcaccatccttatttacagaagggtaaaactgactcttaatgagaaaagctttataagttcaagggctgtaaaatatgaactacttagggtcgtttgccttccatgggaacttggctagacttagaaaaagctgtttgttgtgctaatgtaaaagtgtcatacaatttagaagatttttgaagatggtaaacttagaagaattctatgttctgaaatgcacacttttagaatgtttttctttgaaaacaggctaatagttttttctttttttgacaaagtttcagctcctctttaaagttattgtgtcatttttctggtttaaatttcccttatatttccacctgtaatgtcagtggcaacaacatcatacttcacttacttgttaatttactttttacccttattctaagagcaagttgagttgaactgaatcttccttgtcttagtaacaatgtataaatagtggcttttctgtacaaaaggttgtaatgcctcctgatggatataattttgtgattgtatttaaaagttgaataaatcacaccagcttcctgaaaatgttcataatgcatcttttggaaaacaaatacatgcctactttgtgcatatttgcattaacatggcaaagattgtatgaaatacctgtttttcagaaaataaaggttcagtctcaaaagatacagca

SEQ ID NO: 184419 - DNA, 16115 bp, Artificial Sequence
  derived and/or modified sequence
gtgcgacagcggcggcgcggcgggcggagccgggaggcggggaagcagtggccgtgtgagcgtgaggagctgccgccaccgcctgctcctcgtcgtcctcgtcctccggggccccggcgacgtgggccgcgcacggccctggaaaagacgtcgcctccccttcatccgcctctctctcaccgcgccgctcccgcctcctcgtcctgcgctgcgggctcaggcggaacccggaacggccgtcctcttcccccgccctccgccgcctcctccttctcctcctcctcctcctcctcctccttctcggcttcctcctcagccccgggccggagcggggtgtcggcggcggccggttcgggcggcgactcgcgcttctttgggcggcggcgcttggccatgtcgtgtcggggaaggtaatgagccgcagagccccggggtctcggctgagcagcggcggcggcggcggcggcaccaagtatccgcggagctggaatgactggcaacccagaactgatagtgcatcagccgacccagataatttaaaatattcttcatccagagatagaggtggttcttcctcttatggactgcaaccttcaaattcagctgtggtgtctcggcaaaggcacgatgataccagagtccacgctgacatacagaatgacgaaaagggtggctacagtgtcaatggaggatctggggaaaatacttatggtcggaagtcgttggggcaagagctgagggttaacaatgtgaccagccctgagttcaccagtgttcagcatggcagtcgtgctttagccaccaaagacatgaggaaatcacaggagagatcgatgtcttattctgatgagtctcgactgtcgaatcttcttcggaggatcacccgggaagacgacagagaccgaagattggctactgtaaagcagttgaaagaatttattcagcaaccagaaaataagctggtactagttaaacaattggataatatcttggctgctgtacatgacgtgcttaatgaaagtagcaaattgcttcaggagttgagacaggagggagcttgctgtcttggccttctttgtgcttctctgagctatgaggctgagaagatcttcaagtggatttttagcaaatttagctcatctgcaaaagatgaagttaaactcctctacttatgtgccacctacaaagcactagagactgtaggagaaaagaaagccttttcatctgtaatgcagcttgtaatgaccagcctgcagtctattcttgaaaatgtggatacaccagaattgctttgtaaatgtgttaagtgcattcttttggtggctcgatgttaccctcatattttcagcactaattttagggatacagttgatatattagttggatggcatatagatcatactcagaaaccttcgctcacgcagcaggtatctgggtggttgcagagtttggagccattttgggtagctgatcttgcattttctactactcttcttggtcagtttctggaagacatggaagcatatgctgaggacctcagccatgtggcctctggggaatcagtggatgaagatgtccctcctccatcagtgtcattaccaaagctggctgcacttctccgggtatttagtactgtggtgaggagcattggggaacgcttcagcccaattcggggtcctccaattactgaggcatatgtaacagatgttctgtacagagtaatgagatgtgtgacggctgcaaaccaggtgtttttttctgaggctgtgttgacagctgctaatgagtgtgttggtgttttgctcggcagcttggatcctagcatgactatacattgtgacatggtcattacatatggattagaccaactggagaattgccagacttgtggtaccgattatatcatctcagtcttgaatttactcacgctgattgttgaacagataaatacgaaactgccatcatcatttgtagaaaaactgtttataccatcatctaaactactattcttgcgttatcataaagaaaaagaggttgttgctgtagcccatgctgtttatcaagcagtgctcagcttgaagaatattcctgttttggagactgcctataagttaatattgggagaaatgacttgtgccctaaacaacctcctacacagtctacaacttcctgaggcctgttctgaaataaaacatgaggcttttaagaatcatgtgttcaatgtagacaatgcaaaatttgtagttatatttgacctcagtgccctgactacaattggaaatgccaaaaactcactaatagggatgtgggcgctatctccaactgtctttgcacttctgagtaagaatctgatgattgtgcacagtgacctggctgttcacttccctgccattcagtatgctgtgctctacacattgtattctcattgtaccaggcatgatcactttatctctagtagcctcagttcttcctctccttctttgtttgatggagctgtgattagcactgtaactacggctacaaagaaacatttctcaattatattaaatcttctgggaatattacttaagaaagataaccttaaccaggacacgaggaaactgttaatgacttgggctttggaagcagctgttttaatgaagaagtctgaaacatacgcacctttattctctcttccgtctttccataaattttgcaaaggccttttagccaacactctcgttgaagatgtgaatatctgtctgcaggcatgcagcagtctacatgctctgtcctcttccttgccagatgatcttttacagagatgtgtcgatgtttgccgtgttcaactagtgcacagtggaactcgtattcgacaagcatttggaaaactgttgaaatcaattcctttagatgttgtcctaagcaataacaatcacacagaaattcaagaaatttctttagcattaagaagtcacatgagtaaagcaccaagtaatacattccacccccaagatttctctgatgttattagttttattttgtatgggaactctcatagaacagggaaggacaattggttggaaagactgttctatagctgccagagactggataagcgtgaccagtcaacaattccacgcaatctcctgaagacagatgctgtcctttggcagtgggccatatgggaagctgcacaattcactgttctttctaagctgagaaccccactgggcagagctcaagacaccttccagacaattgaaggtatcattcgaagtctcgcagctcacacattaaaccctgatcaggatgttagtcagtggacaactgcagacaatgatgaaggccatggtaacaaccaacttagacttgttcttcttctgcagtatctggaaaatctggagaaattaatgtataatgcatacgagggatgtgctaatgcattaacttcacctcccaaggtcattagaacttttttctataccaatcgccaaacttgtcaggactggctaacgcggattcgactctccatcatgagggtaggattgttggcaggccagcctgcagtgacagtgagacatggctttgacttgcttacagagatgaaaacaaccagcctatctcaggggaatgaattggaagtaaccattatgatggtggtagaagcattatgtgaacttcattgtcctgaagctatacagggaattgctgtctggtcatcatctattgttggaaaaaatcttctgtggattaactcagtggctcaacaggctgaagggaggtttgaaaaggcctctgtggagtaccaggaacacctgtgtgccatgacaggtgttgattgctgcatctccagctttgacaaatcggtgctcaccttagccaatgctgggcgtaacagtgccagcccgaaacattctctgaatggtgaatccagaaaaactgtgctgtccaaaccgactgactcttcccctgaggttataaattatttaggaaataaagcatgtgagtgctacatctcaattgccgattgggctgctgtgcaggaatggcagaacgctatccatgacttgaaaaagagtaccagtagcacttccctcaacctgaaagctgacttcaactatataaaatcattaagcagctttgagtctggaaaatttgttgaatgtaccgagcagttagaattgttaccaggagaaaatatcaatctacttgctggaggatcaaaagaaaaaatagacatgaaaaaactgcttcctaacatgttaagtccggatccgagggaacttcagaaatccattgaagttcaattgttaagaagttctgtttgtttggcaactgctttaaacccgatagaacaagatcagaagtggcagtctataactgaaaatgtggtaaagtacttgaagcaaacatcccgcatcgctattggacctctgagactttctactttaacagtttcacagtctttgccagttctaagtaccttgcagctgtattgctcatctgctttggagaacacagtttctaacagactttcaacagaggactgtcttattccactcttcagtgaagctttacgttcatgtaaacagcatgacgtgaggccatggatgcaggcattaaggtatactatgtaccagaatcagttgttggagaaaattaaagaacaaacagtcccaattagaagccatctcatggaattaggtctaacagcagcaaaatttgctagaaaacgagggaatgtgtcccttgcaacaagactgctggcacagtgcagtgaagttcagctgggaaagaccaccactgcacaggatttagtccaacattttaaaaaactatcaacccaaggtcaagtggatgaaaaatgggggcccgaacttgatattgaaaaaaccaaattgctttatacagcaggccagtcaacacatgcaatggaaatgttgagttcttgtgccatatctttctgcaagtctgtgaaagctgaatatgcagttgctaaatcaattctgacactggctaaatggatccaggcagaatggaaagagatttcaggacagctgaaacaggtttacagagctcagcaccaacagaacttcacaggtctttctactttgtctaaaaacatactcactctaatagaactgccatctgttaatacgatggaagaagagtatcctcggatcgagagtgaatctacagtgcatattggagttggagaacctgacttcattttgggacagttgtatcacctgtcttcagtacaggcacctgaagtagccaaatcttgggcagcgttggccagctgggcttataggtggggcagaaaggtggttgacaatgccagtcagggagaaggtgttcgtctgctgcctagagaaaaatctgaagttcagaatctacttccagacactataactgaggaagagaaagagagaatatatggtattcttggacaggctgtgtgtcggccggcggggattcaggatgaagatataacacttcagataactgagagtgaagacaacgaagaagatgacatggttgatgttatctggcgtcagttgatatcaagctgcccatggctttcagaacttgatgaaagtgcaactgaaggagttattaaagtgtggaggaaagttgtagatagaatattcagcctgtacaaactctcttgcagtgcatactttactttccttaaactcaacgctggtcaaattcctttagatgaggatgaccctaggctgcatttaagtcacagagtggaacagagcactgatgacatgattgtgatggccacattgcgcctgctgcggttgctcgtgaagcatgctggtgagcttcggcagtatctggagcacggcttggagacaacacccactgcaccatggagaggaattattccgcaacttttctcacgcttaaaccaccctgaagtgtatgtgcgccaaagtatttgtaaccttctctgccgtgtggctcaagattccccacatctcatattgtatcctgcaatagtgggtaccatatcgcttagtagtgaatcccaggcttcaggaaataaattttccactgcaattccaactttacttggcaatattcaaggagaagaattgctggtttctgaatgtgagggaggaagtcctcctgcatctcaggatagcaataaggatgaacctaaaagtggattaaatgaagaccaagccatgatgcaggattgttacagcaaaattgtagataagctgtcctctgcaaaccccaccatggtattacaggttcagatgctcgtggctgaactgcgcagggtcactgtgctctgggatgagctctggctgggagttttgctgcaacaacacatgtatgtcctgagacgaattcagcagcttgaagatgaggtgaagagagtccagaacaacaacaccttacgcaaagaagagaaaattgcaatcatgagggagaagcacacagctttgatgaagcccatcgtatttgctttggagcatgtgaggagtatcacagcggctcctgcagaaacacctcatgaaaaatggtttcaggataactatggtgatgccattgaaaatgccctagaaaaactgaagactccattgaaccctgcaaagcctgggagcagctggattccatttaaagagataatgctaagtttgcaacagagagcacagaaacgtgcaagttacatcttgcgtcttgaagaaatcagtccatggttggctgccatgactaacactgaaattgctcttcctggggaagtctcagccagagacactgtcacaatccatagtgtgggcggaaccatcacaatcttaccgactaaaaccaagccaaagaaacttctctttcttggatcagatgggaagagctatccttatcttttcaaaggactggaggatttacatctggatgagagaataatgcagttcctatctattgtgaataccatgtttgctacaattaatcgccaagaaacaccccggttccatgctcgacactattctgtaacaccactaggaacaagatcaggactaatccagtgggtagatggagccacacccttatttggtctttacaaacgatggcaacaacgggaagctgccttacaagcacaaaaggcccaagattcctaccaaactcctcagaatcctggaattgtaccccgtcctagtgaactttattacagtaaaattggccctgctttgaaaacagttgggcttagcctggatgtgtcccgtcgggattggcctcttcatgtaatgaaggcagtattggaagagttaatggaggccacacccccgaatctccttgccaaagagctctggtcatcttgcacaacacctgatgaatggtggagagttacgcagtcttatgcaagatctactgcagtcatgtctatggttggatacataattggccttggagacagacatctggataatgttcttatagatatgacgactggagaagttgttcacatagattacaatgtttgctttgaaaaaggtaaaagccttagagttcctgagaaagtaccttttcgaatgacacaaaacattgaaacagcactgggtgtaactggagtagaaggtgtatttaggctttcatgtgagcaggttttacacattatgcggcgtggcagagagaccctgctgacgctgctggaggcctttgtgtacgaccctctggtggactggacagcaggaggcgaggctgggtttgctggtgctgtctatggtggaggtggccagcaggccgagagcaagcagagcaagagagagatggagcgagagatcacccgcagcctgttttcttctagagtagctgagattaaggtgaactggtttaagaatagagatgagatgctggttgtgcttcccaagttggacggtagcttagatgaatacctaagcttgcaagagcaactgacagatgtggaaaaactgcagggcaaactactggaggaaatagagtttctagaaggagctgaaggggtggatcatccttctcatactctgcaacacaggtattctgagcacacccaactacagactcagcaaagagctgttcaggaagcaatccaggtgaagctgaatgaatttgaacaatggataacacattatcaggctgcattcaataatttagaagcaacacagcttgcaagcttgcttcaagagataagcacacaaatggaccttggtcctccaagttacgtgccagcaacagcctttctgcagaatgctggtcaggcccacttgattagccagtgcgagcagctggagggggaggttggtgctctcctgcagcagaggcgctccgtgctccgtggctgtctggagcaactgcatcactatgcaaccgtggccctgcagtatccgaaggccatatttcagaaacatcgaattgaacagtggaagacctggatggaagagctcatctgtaacaccacagtagagcgttgtcaagagctctataggaaatatgaaatgcaatatgctccccagccacccccaacagtgtgtcagttcatcactgccactgaaatgaccctgcagcgatacgcagcagacatcaacagcagacttattagacaagtggaacgcttgaaacaggaagctgtcactgtgccagtttgtgaagatcagttgaaagaaattgaacgttgcattaaagttttccttcatgagaatggagaagaaggatctttgagtctagcaagtgttattatttctgccctttgtacccttacaaggcgtaacctgatgatggaaggtgcagcgtcaagtgctggagaacagctggttgatctgacttctcgggatggagcctggttcttggaggaactctgcagtatgagcggaaacgtcacctgcttggttcagttactgaagcagtgccacctggtgccacaggacttagatatcccgaaccccatggaagcgtctgagacagttcacttagccaatggagtgtatacctcacttcaggaattgaattcgaatttccggcaaatcatatttccagaagcacttcgatgtttaatgaaaggggaatacacgttagaaagtatgctgcatgaactggacggtcttattgagcagaccaccgatggcgttcccctgcagactctagtggaatctcttcaggcctacttaagaaacgcagctatgggactggaagaagaaacacatgctcattacatcgatgttgccagactactacatgctcagtacggtgaattaatccaaccgagaaatggttcagttgatgaaacacccaaaatgtcagctggccagatgcttttggtagcattcgatggcatgtttgctcaagttgaaactgctttcagcttattagttgaaaagttgaacaagatggaaattcccatagcttggcgaaagattgacatcataagggaagccaggagtactcaagttaatttttttgatgatgataatcaccggcaggtgctagaagagattttctttctaaaaagactacagactattaaggagttcttcaggctctgtggtaccttttctaaaacattgtcaggatcaagttcacttgaagatcagaatactgtgaatgggcctgtacagattgtcaatgtgaaaaccctttttagaaactcttgtttcagtgaagaccaaatggccaaacctatcaaggcattcacagctgactttgtgaggcagctcttgatagggctacccaaccaagccctcggactcacactgtgcagttttatcagtgctctgggtgtagacatcattgctcaagtagaggcaaaggactttggtgccgaaagcaaagtttctgttgatgatctctgtaagaaagcggtggaacataacatccagatagggaagttctctcagctggttatgaacagggcaactgtgttagcaagttcttacgacactgcctggaagaagcatgacttggtgcgaaggctagaaaccagtatttcttcttgtaagacaagcctgcagcgggttcagctgcatattgccatgtttcagtggcaacatgaagatctacttatcaatagaccacaagccatgtcagtcacacctcccccacggtctgctatcctaaccagcatgaaaaagaagctgcataccctgagccagattgaaacttctattgcaacagttcaggagaagctagctgcacttgaatcaagtattgaacagcgactcaagtgggcaggtggtgccaaccctgcattggcccctgtactacaagattttgaagcaacgatagctgaaagaagaaatcttgtccttaaagagagccaaagagcaagtcaggtcacatttctctgcagcaatatcattcattttgaaagtttacgaacaagaactgcagaagccttaaacctggatgcggcgttatttgaactaatcaagcgatgtcagcagatgtgttcgtttgcatcacagtttaacagttcagtgtctgagttagagcttcgtttattacagagagtggacactggtcttgaacatcctattggcagctctgaatggcttttgtcagcacacaaacagttgacccaggatatgtctactcagagggcaattcagacagagaaagagcagcagatagaaacggtctgtgaaacaattcagaatctggttgataatataaagactgtgctcactggtcataaccgacagcttggagatgtcaaacatctcttgaaagctatggctaaggatgaagaagctgctctggcagatggtgaagatgttccctatgagaacagtgttaggcagtttttgggtgaatataaatcatggcaagacaacattcaaacagttctatttacattagtccaggctatgggtcaggttcgaagtcaagaacacgttgaaatgctccaggaaatcactcccaccttgaaagaactgaaaacacaaagtcagagtatctataataatttagtgagttttgcatcacccttagtcaccgatgcaacaaatgaatgttcgagtccaacgtcatctgctacttatcagccatccttcgctgcagcagtccggagtaacactggccagaagactcagcctgatgtcatgtcacagaatgctagaaagctgatccaaaaaaatcttgctacatcagctgatactccaccaagcaccgttccaggaactggcaagagtgttgcttgtagtcctaaaaaggcagtcagagaccctaaaactgggaaagcggtgcaagagagaaactcctatgcagtgagtgtgtggaagagagtgaaagccaagttagagggccgagatgttgatccgaataggaggatgtcagttgctgaacaggttgactatgtcattaaggaagcaactaatctagataacttggctcagctgtatgaaggttggacagcctgggtgtgaatggcaagacagtagatgagtctggttaagcgaggtcagacatccaccagaatcaactcagcctcaggcatccaaagccacaccacagtcggtggtgatgcaactgggggcttactctgaggaaacctaggaaatctcggtgcactaggaagtgaatcccgcaggacagctgcactcagggatacgcccaacaccatggcctgcaaccccagggtcaagggtgaaggaaagcaagctcaccgcctgaacacggagattgtctttctgccacagaacagcagcagacgtgtcgggaggttagctgcggaaagaaatcgggatgccgcggagcacagagtgatttggaactccattccacctgaccctgtgtgtacaatccaggaaaaaaacaaaccccactcagaaacagagaaaactggggtcgcgaagaaatcacagccaaggaagatttgatgcattcagattctcgtgtaacacttgttgcttggcaacagtactggttgggttgaccagtaagtagaaaaaggctaaaggctatgcgatatgaatttcagaaatggactgaaaatggagagctatgtaacagatacactacagtagaagaacttacttctgaaatgaagggaaaaaaaccaccccatcgttccctactcctccccaccacttacccgttccccctttacctaatctagtagattagccatctttcaaattcacttttatttcagtccttatatttcatatacttccgtctcgatgctgttaacaacttctgataacatggaaaattcaaggattgtttaaaggtctgatgatcacacacaaaatgtaattccggttatttaagtcatttctgtgattctatcatgtacagtttccagaattgtcactgtgcattcaaaagtaatgaatctaacagacatttgatttaatgtacactcccttttgcttatagtgtgcattttttttggaggtcattcaaattttccctcttctgtgatagctgtagtttctttcatagaaagtagctaatccagtgtaatcttttacctttttaaaaaccaagatagagtatctattagagttttacattgttgatgatagattaacaataaagtgatgttctggtggaggtagactgaaatttttttaattcatgtttttcatttgatacttttaatttacacttagtaaattaaaagttgtttaatttacttggcattttaggacatgtacatgaaacagtgaaaatgagatccaccaacatcttttattaagttcagttattagtctgtgaagtgctttactttttgcacaattttaatagcttgctattcagtaatacattatagtgaattcatgatcaaggtttccttaaatttagcattgcatttcagtactgactgtgtaagctaaattgctgatccaaaataaaaacccagactagaatagggttcttaaaatcaagtatcaatacaaaatagaacacaattaaaatcttaattgttggctgggcacagtggctcacgcctgtaatcccagcactttgggaggccgaggcgggcggatcatgaggttaggagagcgagaccatcctggctaacacggtgaaaccccgtctttactaaaaatacaaaaaaaattagccgggcgtggtggcgggcgcctgtagtcccagctactcgggaggctgaggcaggagaatggcgtgaacccaggaggcggagcttgcagtgagccgagattgtgccactgcactccagcctgggcaacagagctagactctgtgtcaaaaataaatgactagataaaaaaaaaaattgtttgagtacattttccctgcattttagagattaggacagtggtcactttctagttgccgtcttcacagacaaacttgaaaggtattaaggaaaaaattccacatagctctgggccttttttgtattctgattgccacgttaatctgtaatcgttaagtacccatgaaagaatgtgtttcagtatcagtgcttttttggtactttaacaagtattgtaggcacggtggatttttttgaaatacccatgtgtccaatagcaagttaaggaacctagcgcatcaaattttgttttcttcattcatttggaaccttattttcgcaaaaaacctagctggaataataatgccatattgtattttgcacactgctttattttctagaggctctgggagcaaattacattcatcacattacctctgctctctcaagattaaagtctttcagcaacattctttattgtcatcataaggaaaaacttttatcgcaatgatagtcagttcacattagtttagcactatagatagtattcagaaattgctttctctttggtaaagaagataaataggtgaattttattgcctgtgttttcaggcttcagaggtacctggcaccttactcaagcaaaaacaaaaaacagctttacttcaaaagcatgtgcctctggtaaattatccatcacttttgttttaaagtggtccctccaagaataatgtggcatacacagtgggtttggttgtaaggcagatgtaatagatgacttcaaaagcctgctccttactgcactctggacaaggccctggtctgtatagtttggcttcctctgttaagtcattctacaaggtgacttgccatttgaactttcgtaagagacctcagcagttagactgagaaaagttagagtgctgtagttatgaagtcatacatttttgataaaatacctgtggaaaaccagggatcctctcctgtttctctctcttgcctccccctttccctccattcctctgtcgcctccccctctcctccactttctttaagaatcagggggtacagaataacctacaaacaacctcttcaaagtacccttggaaattgaagttcaatcttaagttttttgctgtctttaatttactagaattgcctaatttttagttgatttctctacagagcttagcttgtgtagttatttctcttttactgttgctttggtgtgtcttgaagtttgattgattatttttggtcattgagttcttagtgtagtttgctagatgattattaagattcttttgtgtctgacacttgtggtgagttgcttttgaaatctgttgagatttccatgtgagaactgataatcaggctcttgatctgcttccctaaattacttttttagagcccaaaccccaggtttagggtgagggtttgtaatacaaagaaacacttccatcacttctgcccttaacccttgcctctattacctaagcttagtaagtagttttcttaatattgtccaatgtttggtgttatctgcattgttttttgtttttttaattgtggttgttctgacgtgtgaaatttaaggaaagagccattttttaaaaatgccgagcagggcaatgcaagtacagccaaatattagacttgatgtgcaatcttcggtcctttttaatctggggtattataggcagtactttaaattgcaaagtcttccgggcctattttcctctacatttttgtaattaactctgggggcttacttgttttggcagtactgaaatcaaaggagctggttcttcttttctcccaattattttcatatgaaagcacctacaattagcctgttagtcctattcagatacatcaaatatcagtgaatgctttactattcgcacatttaagcatctttgttttacataaaattagagtatgaaaaccagtgttcaattttttatcttgttgagcttgtaaaatgccagcaatttaaaactaggacttttccccccataagccaaggaggtagaattactaatacaagggttaaagaaggtagattttgttttcaatatttgggtaatattagaaagattcttcccacagggaagaactagcaagtgtcccaattttttccaaacgttggggaggggaaaattcactgtatcatgaaaccctaagggtttgttgcacttcctgctttttaggcctggataacagtatcaccatccttatttacagaagggtaaaactgactcttaatgagaaaagctttataagttcaagggctgtaaaatatgaactacttagggtcgtttgccttccatgggaacttggctagacttagaaaaagctgtttgttgtgctaatgtaaaagtgtcatacaatttagaagatttttgaagatggtaaacttagaagaattctatgttctgaaatgcacacttttagaatgtttttctttgaaaacaggctaatagttttttctttttttgacaaagtttcagctcctctttaaagttattgtgtcatttttctggtttaaatttcccttatatttccacctgtaatgtcagtggcaacaacatcatacttcacttacttgttaatttactttttacccttattctaagagcaagttgagttgaactgaatcttccttgtcttagtaacaatgtataaatagtggcttttctgtacaaaaggttgtaatgcctcctgatggatataattttgtgattgtatttaaaagttgaataaatcacaccagcttcctgaaaatgttcataatgcatcttttggaaaacaaatacatgcctactttgtgcatatttgcattaacatggcaaagattgtatgaaatacctgtttttcagaaaataaaggttcagtctcaaaagatacagca

SEQ ID NO: 184420 - DNA, 10989 bp, Artificial Sequence
  derived and/or modified sequence
atgagcagaagagcccccggcagcagactgagcagcggcggcggcggcggcggcaccaagtaccccagaagctggaacgactggcagcccagaaccgacagcgccagcgccgaccccgacaacctgaagtacagcagcagcagagacagaggcggcagcagcagctacggcctgcagcccagcaacagcgccgtggtgagcagacagagacacgacgacaccagagtgcacgccgacatccagaacgacgagaagggcggctacagcgtgaacggcggcagcggcgagaacacctacggcagaaagagcctgggccaggagctgagagtgaacaacgtgaccagccccgagttcaccagcgtgcagcacggcagcagagccctggccaccaaggacatgagaaagagccaggagagaagcatgagctacagcgacgagagcagactgagcaacctgctgagaagaatcaccagagaggacgacagagacagaagactggccaccgtgaagcagctgaaggagttcatccagcagcccgagaacaagctggtgctggtgaagcagctggacaacatcctggccgccgtgcacgacgtgctgaacgagagcagcaagctgctgcaggagctgagacaggagggcgcctgctgcctgggcctgctgtgcgccagcctgagctacgaggccgagaagatcttcaagtggatcttcagcaagttcagcagcagcgccaaggacgaggtgaagctgctgtacctgtgcgccacctacaaggccctggagaccgtgggcgagaagaaggccttcagcagcgtgatgcagctggtgatgaccagcctgcagagcatcctggagaacgtggacacccccgagctgctgtgcaagtgcgtgaagtgcatcctgctggtggccagatgctacccccacatcttcagcaccaacttcagagacaccgtggacatcctggtgggctggcacatcgaccacacccagaagcccagcctgacccagcaggtgagcggctggctgcagagcctggagcccttctgggtggccgacctggccttcagcaccaccctgctgggccagttcctggaggacatggaggcctacgccgaggacctgagccacgtggccagcggcgagagcgtggacgaggacgtgcccccccccagcgtgagcctgcccaagctggccgccctgctgagagtgttcagcaccgtggtgagaagcatcggcgagagattcagccccatcagaggcccccccatcaccgaggcctacgtgaccgacgtgctgtacagagtgatgagatgcgtgaccgccgccaaccaggtgttcttcagcgaggccgtgctgaccgccgccaacgagtgcgtgggcgtgctgctgggcagcctggaccccagcatgaccatccactgcgacatggtgatcacctacggcctggaccagctggagaactgccagacctgcggcaccgactacatcatcagcgtgctgaacctgctgaccctgatcgtggagcagatcaacaccaagctgcccagcagcttcgtggagaagctgttcatccccagcagcaagctgctgttcctgagataccacaaggagaaggaggtggtggccgtggcccacgccgtgtaccaggccgtgctgagcctgaagaacatccccgtgctggagaccgcctacaagctgatcctgggcgagatgacctgcgccctgaacaacctgctgcacagcctgcagctgcccgaggcctgcagcgagatcaagcacgaggccttcaagaaccacgtgttcaacgtggacaacgccaagttcgtggtgatcttcgacctgagcgccctgaccaccatcggcaacgccaagaacagcctgatcggcatgtgggccctgagccccaccgtgttcgccctgctgagcaagaacctgatgatcgtgcacagcgacctggccgtgcacttccccgccatccagtacgccgtgctgtacaccctgtacagccactgcaccagacacgaccacttcatcagcagcagcctgagcagcagcagccccagcctgttcgacggcgccgtgatcagcaccgtgaccaccgccaccaagaagcacttcagcatcatcctgaacctgctgggcatcctgctgaagaaggacaacctgaaccaggacaccagaaagctgctgatgacctgggccctggaggccgccgtgctgatgaagaagagcgagacctacgcccccctgttcagcctgcccagcttccacaagttctgcaagggcctgctggccaacaccctggtggaggacgtgaacatctgcctgcaggcctgcagcagcctgcacgccctgagcagcagcctgcccgacgacctgctgcagagatgcgtggacgtgtgcagagtgcagctggtgcacagcggcaccagaatcagacaggccttcggcaagctgctgaagagcatccccctggacgtggtgctgagcaacaacaaccacaccgagatccaggagatcagcctggccctgagaagccacatgagcaaggcccccagcaacaccttccacccccaggacttcagcgacgtgatcagcttcatcctgtacggcaacagccacagaaccggcaaggacaactggctggagagactgttctacagctgccagagactggacaagagagaccagagcaccatccccagaaacctgctgaagaccgacgccgtgctgtggcagtgggccatctgggaggccgcccagttcaccgtgctgagcaagctgagaacccccctgggcagagcccaggacaccttccagaccatcgagggcatcatcagaagcctggccgcccacaccctgaaccccgaccaggacgtgagccagtggaccaccgccgacaacgacgagggccacggcaacaaccagctgagactggtgctgctgctgcagtacctggagaacctggagaagctgatgtacaacgcctacgagggctgcgccaacgccctgaccagcccccccaaggtgatcagaaccttcttctacaccaacagacagacctgccaggactggctgaccagaatcagactgagcatcatgagagtgggcctgctggccggccagcccgccgtgaccgtgagacacggcttcgacctgctgaccgagatgaagaccaccagcctgagccagggcaacgagctggaggtgaccatcatgatggtggtggaggccctgtgcgagctgcactgccccgaggccatccagggcatcgccgtgtggagcagcagcatcgtgggcaagaacctgctgtggatcaacagcgtggcccagcaggccgagggcagattcgagaaggccagcgtggagtaccaggagcacctgtgcgccatgaccggcgtggactgctgcatcagcagcttcgacaagagcgtgctgaccctggccaacgccggcagaaacagcgccagccccaagcacagcctgaacggcgagagcagaaagaccgtgctgagcaagcccaccgacagcagccccgaggtgatcaactacctgggcaacaaggcctgcgagtgctacatcagcatcgccgactgggccgccgtgcaggagtggcagaacgccatccacgacctgaagaagagcaccagcagcaccagcctgaacctgaaggccgacttcaactacatcaagagcctgagcagcttcgagagcggcaagttcgtggagtgcaccgagcagctggagctgctgcccggcgagaacatcaacctgctggccggcggcagcaaggagaagatcgacatgaagaagctgctgcccaacatgctgagccccgaccccagagagctgcagaagagcatcgaggtgcagctgctgagaagcagcgtgtgcctggccaccgccctgaaccccatcgagcaggaccagaagtggcagagcatcaccgagaacgtggtgaagtacctgaagcagaccagcagaatcgccatcggccccctgagactgagcaccctgaccgtgagccagagcctgcccgtgctgagcaccctgcagctgtactgcagcagcgccctggagaacaccgtgagcaacagactgagcaccgaggactgcctgatccccctgttcagcgaggccctgagaagctgcaagcagcacgacgtgagaccctggatgcaggccctgagatacaccatgtaccagaaccagctgctggagaagatcaaggagcagaccgtgcccatcagaagccacctgatggagctgggcctgaccgccgccaagttcgccagaaagagaggcaacgtgagcctggccaccagactgctggcccagtgcagcgaggtgcagctgggcaagaccaccaccgcccaggacctggtgcagcacttcaagaagctgagcacccagggccaggtggacgagaagtggggccccgagctggacatcgagaagaccaagctgctgtacaccgccggccagagcacccacgccatggagatgctgagcagctgcgccatcagcttctgcaagagcgtgaaggccgagtacgccgtggccaagagcatcctgaccctggccaagtggatccaggccgagtggaaggagatcagcggccagctgaagcaggtgtacagagcccagcaccagcagaacttcaccggcctgagcaccctgagcaagaacatcctgaccctgatcgagctgcccagcgtgaacaccatggaggaggagtaccccagaatcgagagcgagagcaccgtgcacatcggcgtgggcgagcccgacttcatcctgggccagctgtaccacctgagcagcgtgcaggcccccgaggtggccaagagctgggccgccctggccagctgggcctacagatggggcagaaaggtggtggacaacgccagccagggcgagggcgtgagactgctgcccagagagaagagcgaggtgcagaacctgctgcccgacaccatcaccgaggaggagaaggagagaatctacggcatcctgggccaggccgtgtgcagacccgccggcatccaggacgaggacatcaccctgcagatcaccgagagcgaggacaacgaggaggacgacatggtggacgtgatctggagacagctgatcagcagctgcccctggctgagcgagctggacgagagcgccaccgagggcgtgatcaaggtgtggagaaaggtggtggacagaatcttcagcctgtacaagctgagctgcagcgcctacttcaccttcctgaagctgaacgccggccagatccccctggacgaggacgaccccagactgcacctgagccacagagtggagcagagcaccgacgacatgatcgtgatggccaccctgagactgctgagactgctggtgaagcacgccggcgagctgagacagtacctggagcacggcctggagaccacccccaccgccccctggagaggcatcatcccccagctgttcagcagactgaaccaccccgaggtgtacgtgagacagagcatctgcaacctgctgtgcagagtggcccaggacagcccccacctgatcctgtaccccgccatcgtgggcaccatcagcctgagcagcgagagccaggccagcggcaacaagttcagcaccgccatccccaccctgctgggcaacatccagggcgaggagctgctggtgagcgagtgcgagggcggcagcccccccgccagccaggacagcaacaaggacgagcccaagagcggcctgaacgaggaccaggccatgatgcaggactgctacagcaagatcgtggacaagctgagcagcgccaaccccaccatggtgctgcaggtgcagatgctggtggccgagctgagaagagtgaccgtgctgtgggacgagctgtggctgggcgtgctgctgcagcagcacatgtacgtgctgagaagaatccagcagctggaggacgaggtgaagagagtgcagaacaacaacaccctgagaaaggaggagaagatcgccatcatgagagagaagcacaccgccctgatgaagcccatcgtgttcgccctggagcacgtgagaagcatcaccgccgcccccgccgagaccccccacgagaagtggttccaggacaactacggcgacgccatcgagaacgccctggagaagctgaagacccccctgaaccccgccaagcccggcagcagctggatccccttcaaggagatcatgctgagcctgcagcagagagcccagaagagagccagctacatcctgagactggaggagatcagcccctggctggccgccatgaccaacaccgagatcgccctgcccggcgaggtgagcgccagagacaccgtgaccatccacagcgtgggcggcaccatcaccatcctgcccaccaagaccaagcccaagaagctgctgttcctgggcagcgacggcaagagctacccctacctgttcaagggcctggaggacctgcacctggacgagagaatcatgcagttcctgagcatcgtgaacaccatgttcgccaccatcaacagacaggagacccccagattccacgccagacactacagcgtgacccccctgggcaccagaagcggcctgatccagtgggtggacggcgccacccccctgttcggcctgtacaagagatggcagcagagagaggccgccctgcaggcccagaaggcccaggacagctaccagaccccccagaaccccggcatcgtgcccagacccagcgagctgtactacagcaagatcggccccgccctgaagaccgtgggcctgagcctggacgtgagcagaagagactggcccctgcacgtgatgaaggccgtgctggaggagctgatggaggccaccccccccaacctgctggccaaggagctgtggagcagctgcaccacccccgacgagtggtggagagtgacccagagctacgccagaagcaccgccgtgatgagcatggtgggctacatcatcggcctgggcgacagacacctggacaacgtgctgatcgacatgaccaccggcgaggtggtgcacatcgactacaacgtgtgcttcgagaagggcaagagcctgagagtgcccgagaaggtgcccttcagaatgacccagaacatcgagaccgccctgggcgtgaccggcgtggagggcgtgttcagactgagctgcgagcaggtgctgcacatcatgagaagaggcagagagaccctgctgaccctgctggaggccttcgtgtacgaccccctggtggactggaccgccggcggcgaggccggcttcgccggcgccgtgtacggcggcggcggccagcaggccgagagcaagcagagcaagagagagatggagagagagatcaccagaagcctgttcagcagcagagtggccgagatcaaggtgaactggttcaagaacagagacgagatgctggtggtgctgcccaagctggacggcagcctggacgagtacctgagcctgcaggagcagctgaccgacgtggagaagctgcagggcaagctgctggaggagatcgagttcctggagggcgccgagggcgtggaccaccccagccacaccctgcagcacagatacagcgagcacacccagctgcagacccagcagagagccgtgcaggaggccatccaggtgaagctgaacgagttcgagcagtggatcacccactaccaggccgccttcaacaacctggaggccacccagctggccagcctgctgcaggagatcagcacccagatggacctgggcccccccagctacgtgcccgccaccgccttcctgcagaacgccggccaggcccacctgatcagccagtgcgagcagctggagggcgaggtgggcgccctgctgcagcagagaagaagcgtgctgagaggctgcctggagcagctgcaccactacgccaccgtggccctgcagtaccccaaggccatcttccagaagcacagaatcgagcagtggaagacctggatggaggagctgatctgcaacaccaccgtggagagatgccaggagctgtacagaaagtacgagatgcagtacgccccccagcccccccccaccgtgtgccagttcatcaccgccaccgagatgaccctgcagagatacgccgccgacatcaacagcagactgatcagacaggtggagagactgaagcaggaggccgtgaccgtgcccgtgtgcgaggaccagctgaaggagatcgagagatgcatcaaggtgttcctgcacgagaacggcgaggagggcagcctgagcctggccagcgtgatcatcagcgccctgtgcaccctgaccagaagaaacctgatgatggagggcgccgccagcagcgccggcgagcagctggtggacctgaccagcagagacggcgcctggttcctggaggagctgtgcagcatgagcggcaacgtgacctgcctggtgcagctgctgaagcagtgccacctggtgccccaggacctggacatccccaaccccatggaggccagcgagaccgtgcacctggccaacggcgtgtacaccagcctgcaggagctgaacagcaacttcagacagatcatcttccccgaggccctgagatgcctgatgaagggcgagtacaccctggagagcatgctgcacgagctggacggcctgatcgagcagaccaccgacggcgtgcccctgcagaccctggtggagagcctgcaggcctacctgagaaacgccgccatgggcctggaggaggagacccacgcccactacatcgacgtggccagactgctgcacgcccagtacggcgagctgatccagcccagaaacggcagcgtggacgagacccccaagatgagcgccggccagatgctgctggtggccttcgacggcatgttcgcccaggtggagaccgccttcagcctgctggtggagaagctgaacaagatggagatccccatcgcctggagaaagatcgacatcatcagagaggccagaagcacccaggtgaacttcttcgacgacgacaaccacagacaggtgctggaggagatcttcttcctgaagagactgcagaccatcaaggagttcttcagactgtgcggcaccttcagcaagaccctgagcggcagcagcagcctggaggaccagaacaccgtgaacggccccgtgcagatcgtgaacgtgaagaccctgttcagaaacagctgcttcagcgaggaccagatggccaagcccatcaaggccttcaccgccgacttcgtgagacagctgctgatcggcctgcccaaccaggccctgggcctgaccctgtgcagcttcatcagcgccctgggcgtggacatcatcgcccaggtggaggccaaggacttcggcgccgagagcaaggtgagcgtggacgacctgtgcaagaaggccgtggagcacaacatccagatcggcaagttcagccagctggtgatgaacagagccaccgtgctggccagcagctacgacaccgcctggaagaagcacgacctggtgagaagactggagaccagcatcagcagctgcaagaccagcctgcagagagtgcagctgcacatcgccatgttccagcagtggcagcacgaggacctgctgatcaacagaccccaggccatgagcgtgacccccccccccagaagcgccatcctgaccagcatgaagaagaagctgcacaccctgagccagatcgagaccagcatcgccaccgtgcaggagaagctggccgccctggagagcagcatcgagcagagactgaagtgggccggcggcgccaaccccgccctggcccccgtgctgcaggacttcgaggccaccatcgccgagagaagaaacctggtgctgaaggagagccagagagccagccaggtgaccttcctgtgcagcaacatcatccacttcgagagcctgagaaccagaaccgccgaggccctgaacctggacgccgccctgttcgagctgatcaagagatgccagcagatgtgcagcttcgccagccagttcaacagcagcgtgagcgagctggagctgagactgctgcagagagtggacaccggcctggagcaccccatcggcagcagcgagtggctgctgagcgcccacaagcagctgacccaggacatgagcacccagagagccatccagaccgagaaggagcagcagatcgagaccgtgtgcgagaccatccagaacctggtggacaacatcaagaccgtgctgaccggccacaacagacagctgggcgacgtgaagcacctgctgaaggccatggccaaggacgaggaggccgccctggccgacggcgaggacgtgccctacgagaacagcgtgagacagttcctgggcgagtacaagagctggcaggacaacatccagaccgtgctgttcaccctggtgcaggccatgggccaggtgagaagccaggagcacgtggagatgctgcaggagatcacccccaccctgaaggagctgaagacccagagccagagcatctacaacaacctggtgagcttcgccagccccctggtgaccgacgccaccaacgagtgcagcagccccaccagcagcgccacctaccagcccagcttcgccgccgccgtgagaagcaacaccggccagaagacccagcccgacgtgatgagccagaacgccagaaagctgatccagaagaacctggccaccagcgccgacaccccccccagcaccgtgcccggcaccggcaagagcgtggcctgcagccccaagaaggccgtgagagaccccaagaccggcaaggccgtgcaggagagaaacagctacgccgtgagcgtgtggaagagagtgaaggccaagctggagggcagagacgtggaccccaacagaagaatgagcgtggccgagcaggtggactacgtgatcaaggaggccaccaacctggacaacctggcccagctgtacgagggctggaccgcctgggtgtag

SEQ ID NO: 184421 - DNA, 10986 bp, Artificial Sequence
  derived and/or modified sequence
atgagcagaagagcccccggcagcagactgagcagcggcggcggcggcggcggcaccaagtaccccagaagctggaacgactggcagcccagaaccgacagcgccagcgccgaccccgacaacctgaagtacagcagcagcagagacagaggcggcagcagcagctacggcctgcagcccagcaacagcgccgtggtgagcagacagagacacgacgacaccagagtgcacgccgacatccagaacgacgagaagggcggctacagcgtgaacggcggcagcggcgagaacacctacggcagaaagagcctgggccaggagctgagagtgaacaacgtgaccagccccgagttcaccagcgtgcagcacggcagcagagccctggccaccaaggacatgagaaagagccaggagagaagcatgagctacagcgacgagagcagactgagcaacctgctgagaagaatcaccagagaggacgacagagacagaagactggccaccgtgaagcagctgaaggagttcatccagcagcccgagaacaagctggtgctggtgaagcagctggacaacatcctggccgccgtgcacgacgtgctgaacgagagcagcaagctgctgcaggagctgagacaggagggcgcctgctgcctgggcctgctgtgcgccagcctgagctacgaggccgagaagatcttcaagtggatcttcagcaagttcagcagcagcgccaaggacgaggtgaagctgctgtacctgtgcgccacctacaaggccctggagaccgtgggcgagaagaaggccttcagcagcgtgatgcagctggtgatgaccagcctgcagagcatcctggagaacgtggacacccccgagctgctgtgcaagtgcgtgaagtgcatcctgctggtggccagatgctacccccacatcttcagcaccaacttcagagacaccgtggacatcctggtgggctggcacatcgaccacacccagaagcccagcctgacccagcaggtgagcggctggctgcagagcctggagcccttctgggtggccgacctggccttcagcaccaccctgctgggccagttcctggaggacatggaggcctacgccgaggacctgagccacgtggccagcggcgagagcgtggacgaggacgtgcccccccccagcgtgagcctgcccaagctggccgccctgctgagagtgttcagcaccgtggtgagaagcatcggcgagagattcagccccatcagaggcccccccatcaccgaggcctacgtgaccgacgtgctgtacagagtgatgagatgcgtgaccgccgccaaccaggtgttcttcagcgaggccgtgctgaccgccgccaacgagtgcgtgggcgtgctgctgggcagcctggaccccagcatgaccatccactgcgacatggtgatcacctacggcctggaccagctggagaactgccagacctgcggcaccgactacatcatcagcgtgctgaacctgctgaccctgatcgtggagcagatcaacaccaagctgcccagcagcttcgtggagaagctgttcatccccagcagcaagctgctgttcctgagataccacaaggagaaggaggtggtggccgtggcccacgccgtgtaccaggccgtgctgagcctgaagaacatccccgtgctggagaccgcctacaagctgatcctgggcgagatgacctgcgccctgaacaacctgctgcacagcctgcagctgcccgaggcctgcagcgagatcaagcacgaggccttcaagaaccacgtgttcaacgtggacaacgccaagttcgtggtgatcttcgacctgagcgccctgaccaccatcggcaacgccaagaacagcctgatcggcatgtgggccctgagccccaccgtgttcgccctgctgagcaagaacctgatgatcgtgcacagcgacctggccgtgcacttccccgccatccagtacgccgtgctgtacaccctgtacagccactgcaccagacacgaccacttcatcagcagcagcctgagcagcagcagccccagcctgttcgacggcgccgtgatcagcaccgtgaccaccgccaccaagaagcacttcagcatcatcctgaacctgctgggcatcctgctgaagaaggacaacctgaaccaggacaccagaaagctgctgatgacctgggccctggaggccgccgtgctgatgaagaagagcgagacctacgcccccctgttcagcctgcccagcttccacaagttctgcaagggcctgctggccaacaccctggtggaggacgtgaacatctgcctgcaggcctgcagcagcctgcacgccctgagcagcagcctgcccgacgacctgctgcagagatgcgtggacgtgtgcagagtgcagctggtgcacagcggcaccagaatcagacaggccttcggcaagctgctgaagagcatccccctggacgtggtgctgagcaacaacaaccacaccgagatccaggagatcagcctggccctgagaagccacatgagcaaggcccccagcaacaccttccacccccaggacttcagcgacgtgatcagcttcatcctgtacggcaacagccacagaaccggcaaggacaactggctggagagactgttctacagctgccagagactggacaagagagaccagagcaccatccccagaaacctgctgaagaccgacgccgtgctgtggcagtgggccatctgggaggccgcccagttcaccgtgctgagcaagctgagaacccccctgggcagagcccaggacaccttccagaccatcgagggcatcatcagaagcctggccgcccacaccctgaaccccgaccaggacgtgagccagtggaccaccgccgacaacgacgagggccacggcaacaaccagctgagactggtgctgctgctgcagtacctggagaacctggagaagctgatgtacaacgcctacgagggctgcgccaacgccctgaccagcccccccaaggtgatcagaaccttcttctacaccaacagacagacctgccaggactggctgaccagaatcagactgagcatcatgagagtgggcctgctggccggccagcccgccgtgaccgtgagacacggcttcgacctgctgaccgagatgaagaccaccagcctgagccagggcaacgagctggaggtgaccatcatgatggtggtggaggccctgtgcgagctgcactgccccgaggccatccagggcatcgccgtgtggagcagcagcatcgtgggcaagaacctgctgtggatcaacagcgtggcccagcaggccgagggcagattcgagaaggccagcgtggagtaccaggagcacctgtgcgccatgaccggcgtggactgctgcatcagcagcttcgacaagagcgtgctgaccctggccaacgccggcagaaacagcgccagccccaagcacagcctgaacggcgagagcagaaagaccgtgctgagcaagcccaccgacagcagccccgaggtgatcaactacctgggcaacaaggcctgcgagtgctacatcagcatcgccgactgggccgccgtgcaggagtggcagaacgccatccacgacctgaagaagagcaccagcagcaccagcctgaacctgaaggccgacttcaactacatcaagagcctgagcagcttcgagagcggcaagttcgtggagtgcaccgagcagctggagctgctgcccggcgagaacatcaacctgctggccggcggcagcaaggagaagatcgacatgaagaagctgctgcccaacatgctgagccccgaccccagagagctgcagaagagcatcgaggtgcagctgctgagaagcagcgtgtgcctggccaccgccctgaaccccatcgagcaggaccagaagtggcagagcatcaccgagaacgtggtgaagtacctgaagcagaccagcagaatcgccatcggccccctgagactgagcaccctgaccgtgagccagagcctgcccgtgctgagcaccctgcagctgtactgcagcagcgccctggagaacaccgtgagcaacagactgagcaccgaggactgcctgatccccctgttcagcgaggccctgagaagctgcaagcagcacgacgtgagaccctggatgcaggccctgagatacaccatgtaccagaaccagctgctggagaagatcaaggagcagaccgtgcccatcagaagccacctgatggagctgggcctgaccgccgccaagttcgccagaaagagaggcaacgtgagcctggccaccagactgctggcccagtgcagcgaggtgcagctgggcaagaccaccaccgcccaggacctggtgcagcacttcaagaagctgagcacccagggccaggtggacgagaagtggggccccgagctggacatcgagaagaccaagctgctgtacaccgccggccagagcacccacgccatggagatgctgagcagctgcgccatcagcttctgcaagagcgtgaaggccgagtacgccgtggccaagagcatcctgaccctggccaagtggatccaggccgagtggaaggagatcagcggccagctgaagcaggtgtacagagcccagcaccagcagaacttcaccggcctgagcaccctgagcaagaacatcctgaccctgatcgagctgcccagcgtgaacaccatggaggaggagtaccccagaatcgagagcgagagcaccgtgcacatcggcgtgggcgagcccgacttcatcctgggccagctgtaccacctgagcagcgtgcaggcccccgaggtggccaagagctgggccgccctggccagctgggcctacagatggggcagaaaggtggtggacaacgccagccagggcgagggcgtgagactgctgcccagagagaagagcgaggtgcagaacctgctgcccgacaccatcaccgaggaggagaaggagagaatctacggcatcctgggccaggccgtgtgcagacccgccggcatccaggacgaggacatcaccctgcagatcaccgagagcgaggacaacgaggaggacgacatggtggacgtgatctggagacagctgatcagcagctgcccctggctgagcgagctggacgagagcgccaccgagggcgtgatcaaggtgtggagaaaggtggtggacagaatcttcagcctgtacaagctgagctgcagcgcctacttcaccttcctgaagctgaacgccggccagatccccctggacgaggacgaccccagactgcacctgagccacagagtggagcagagcaccgacgacatgatcgtgatggccaccctgagactgctgagactgctggtgaagcacgccggcgagctgagacagtacctggagcacggcctggagaccacccccaccgccccctggagaggcatcatcccccagctgttcagcagactgaaccaccccgaggtgtacgtgagacagagcatctgcaacctgctgtgcagagtggcccaggacagcccccacctgatcctgtaccccgccatcgtgggcaccatcagcctgagcagcgagagccaggccagcggcaacaagttcagcaccgccatccccaccctgctgggcaacatccagggcgaggagctgctggtgagcgagtgcgagggcggcagcccccccgccagccaggacagcaacaaggacgagcccaagagcggcctgaacgaggaccaggccatgatgcaggactgctacagcaagatcgtggacaagctgagcagcgccaaccccaccatggtgctgcaggtgcagatgctggtggccgagctgagaagagtgaccgtgctgtgggacgagctgtggctgggcgtgctgctgcagcagcacatgtacgtgctgagaagaatccagcagctggaggacgaggtgaagagagtgcagaacaacaacaccctgagaaaggaggagaagatcgccatcatgagagagaagcacaccgccctgatgaagcccatcgtgttcgccctggagcacgtgagaagcatcaccgccgcccccgccgagaccccccacgagaagtggttccaggacaactacggcgacgccatcgagaacgccctggagaagctgaagacccccctgaaccccgccaagcccggcagcagctggatccccttcaaggagatcatgctgagcctgcagcagagagcccagaagagagccagctacatcctgagactggaggagatcagcccctggctggccgccatgaccaacaccgagatcgccctgcccggcgaggtgagcgccagagacaccgtgaccatccacagcgtgggcggcaccatcaccatcctgcccaccaagaccaagcccaagaagctgctgttcctgggcagcgacggcaagagctacccctacctgttcaagggcctggaggacctgcacctggacgagagaatcatgcagttcctgagcatcgtgaacaccatgttcgccaccatcaacagacaggagacccccagattccacgccagacactacagcgtgacccccctgggcaccagaagcggcctgatccagtgggtggacggcgccacccccctgttcggcctgtacaagagatggcagcagagagaggccgccctgcaggcccagaaggcccaggacagctaccagaccccccagaaccccggcatcgtgcccagacccagcgagctgtactacagcaagatcggccccgccctgaagaccgtgggcctgagcctggacgtgagcagaagagactggcccctgcacgtgatgaaggccgtgctggaggagctgatggaggccaccccccccaacctgctggccaaggagctgtggagcagctgcaccacccccgacgagtggtggagagtgacccagagctacgccagaagcaccgccgtgatgagcatggtgggctacatcatcggcctgggcgacagacacctggacaacgtgctgatcgacatgaccaccggcgaggtggtgcacatcgactacaacgtgtgcttcgagaagggcaagagcctgagagtgcccgagaaggtgcccttcagaatgacccagaacatcgagaccgccctgggcgtgaccggcgtggagggcgtgttcagactgagctgcgagcaggtgctgcacatcatgagaagaggcagagagaccctgctgaccctgctggaggccttcgtgtacgaccccctggtggactggaccgccggcggcgaggccggcttcgccggcgccgtgtacggcggcggcggccagcaggccgagagcaagcagagcaagagagagatggagagagagatcaccagaagcctgttcagcagcagagtggccgagatcaaggtgaactggttcaagaacagagacgagatgctggtggtgctgcccaagctggacggcagcctggacgagtacctgagcctgcaggagcagctgaccgacgtggagaagctgcagggcaagctgctggaggagatcgagttcctggagggcgccgagggcgtggaccaccccagccacaccctgcagcacagatacagcgagcacacccagctgcagacccagcagagagccgtgcaggaggccatccaggtgaagctgaacgagttcgagcagtggatcacccactaccaggccgccttcaacaacctggaggccacccagctggccagcctgctgcaggagatcagcacccagatggacctgggcccccccagctacgtgcccgccaccgccttcctgcagaacgccggccaggcccacctgatcagccagtgcgagcagctggagggcgaggtgggcgccctgctgcagcagagaagaagcgtgctgagaggctgcctggagcagctgcaccactacgccaccgtggccctgcagtaccccaaggccatcttccagaagcacagaatcgagcagtggaagacctggatggaggagctgatctgcaacaccaccgtggagagatgccaggagctgtacagaaagtacgagatgcagtacgccccccagcccccccccaccgtgtgccagttcatcaccgccaccgagatgaccctgcagagatacgccgccgacatcaacagcagactgatcagacaggtggagagactgaagcaggaggccgtgaccgtgcccgtgtgcgaggaccagctgaaggagatcgagagatgcatcaaggtgttcctgcacgagaacggcgaggagggcagcctgagcctggccagcgtgatcatcagcgccctgtgcaccctgaccagaagaaacctgatgatggagggcgccgccagcagcgccggcgagcagctggtggacctgaccagcagagacggcgcctggttcctggaggagctgtgcagcatgagcggcaacgtgacctgcctggtgcagctgctgaagcagtgccacctggtgccccaggacctggacatccccaaccccatggaggccagcgagaccgtgcacctggccaacggcgtgtacaccagcctgcaggagctgaacagcaacttcagacagatcatcttccccgaggccctgagatgcctgatgaagggcgagtacaccctggagagcatgctgcacgagctggacggcctgatcgagcagaccaccgacggcgtgcccctgcagaccctggtggagagcctgcaggcctacctgagaaacgccgccatgggcctggaggaggagacccacgcccactacatcgacgtggccagactgctgcacgcccagtacggcgagctgatccagcccagaaacggcagcgtggacgagacccccaagatgagcgccggccagatgctgctggtggccttcgacggcatgttcgcccaggtggagaccgccttcagcctgctggtggagaagctgaacaagatggagatccccatcgcctggagaaagatcgacatcatcagagaggccagaagcacccaggtgaacttcttcgacgacgacaaccacagacaggtgctggaggagatcttcttcctgaagagactgcagaccatcaaggagttcttcagactgtgcggcaccttcagcaagaccctgagcggcagcagcagcctggaggaccagaacaccgtgaacggccccgtgcagatcgtgaacgtgaagaccctgttcagaaacagctgcttcagcgaggaccagatggccaagcccatcaaggccttcaccgccgacttcgtgagacagctgctgatcggcctgcccaaccaggccctgggcctgaccctgtgcagcttcatcagcgccctgggcgtggacatcatcgcccaggtggaggccaaggacttcggcgccgagagcaaggtgagcgtggacgacctgtgcaagaaggccgtggagcacaacatccagatcggcaagttcagccagctggtgatgaacagagccaccgtgctggccagcagctacgacaccgcctggaagaagcacgacctggtgagaagactggagaccagcatcagcagctgcaagaccagcctgcagagagtgcagctgcacatcgccatgttccagtggcagcacgaggacctgctgatcaacagaccccaggccatgagcgtgacccccccccccagaagcgccatcctgaccagcatgaagaagaagctgcacaccctgagccagatcgagaccagcatcgccaccgtgcaggagaagctggccgccctggagagcagcatcgagcagagactgaagtgggccggcggcgccaaccccgccctggcccccgtgctgcaggacttcgaggccaccatcgccgagagaagaaacctggtgctgaaggagagccagagagccagccaggtgaccttcctgtgcagcaacatcatccacttcgagagcctgagaaccagaaccgccgaggccctgaacctggacgccgccctgttcgagctgatcaagagatgccagcagatgtgcagcttcgccagccagttcaacagcagcgtgagcgagctggagctgagactgctgcagagagtggacaccggcctggagcaccccatcggcagcagcgagtggctgctgagcgcccacaagcagctgacccaggacatgagcacccagagagccatccagaccgagaaggagcagcagatcgagaccgtgtgcgagaccatccagaacctggtggacaacatcaagaccgtgctgaccggccacaacagacagctgggcgacgtgaagcacctgctgaaggccatggccaaggacgaggaggccgccctggccgacggcgaggacgtgccctacgagaacagcgtgagacagttcctgggcgagtacaagagctggcaggacaacatccagaccgtgctgttcaccctggtgcaggccatgggccaggtgagaagccaggagcacgtggagatgctgcaggagatcacccccaccctgaaggagctgaagacccagagccagagcatctacaacaacctggtgagcttcgccagccccctggtgaccgacgccaccaacgagtgcagcagccccaccagcagcgccacctaccagcccagcttcgccgccgccgtgagaagcaacaccggccagaagacccagcccgacgtgatgagccagaacgccagaaagctgatccagaagaacctggccaccagcgccgacaccccccccagcaccgtgcccggcaccggcaagagcgtggcctgcagccccaagaaggccgtgagagaccccaagaccggcaaggccgtgcaggagagaaacagctacgccgtgagcgtgtggaagagagtgaaggccaagctggagggcagagacgtggaccccaacagaagaatgagcgtggccgagcaggtggactacgtgatcaaggaggccaccaacctggacaacctggcccagctgtacgagggctggaccgcctgggtgtag

SEQ ID NO: 184422 - protein, 693 aa, Artificial Sequence
  derived and/or modified sequence
MAQGSHQIDFQVLHDLRQKFPEVPEVVVSRCMLQNNNNLDACCAVLSQESTRYLYGEGDLNFSDDSGISGLRNHMTSLNLDLQSQNIYHHGREGSRMNGSRTLTHSISDGQLQGGQSNSELFQQEPQTAPAQVPQGFNVFGMSSSSGASNSAPHLGFHLGSKGTSSLSQQTPRFNPIMVTLAPNIQTGRNTPTSLHIHGVPPPVLNSPQGNSIYIRPYITTPGGTTRQTQQHSGWVSQFNPMNPQQVYQPSQPGPWTTCPASNPLSHTSSQQPNQQGHQTSHVYMPISSPTTSQPPTIHSSGSSQSSAHSQYNIQNISTGPRKNQIEIKLEPPQRNNSSKLRSSGPRTSSTSSSVNSQTLNRNQPTVYIAASPPNTDELMSRSQPKVYISANAATGDEQVMRNQPTLFISTNSGASAASRNMSGQVSMGPAFIHHHPPKSRAIGNNSATSPRVVVTQPNTKYTFKITVSPNKPPAVSPGVVSPTFELTNLLNHPDHYVETENIQHLTDPTLAHVDRISETRKLSMGSDDAAYTQALLVHQKARMERLQRELEIQKKKLDKLKSEVNEMENNLTRRRLKRSNSISQIPSLEEMQQLRSCNRQLQIDIDCLTKEIDLFQARGPHFNPSAIHNFYDNIGFVGPVPPKPKDQRSIIKTPKTQDTEDDEGAQWNCTACTFLNHPALIRCEQCEMPRHF

SEQ ID NO: 184423 - protein, 536 aa, Artificial Sequence
  derived and/or modified sequence
MAQGSHQIDFQVLHDLRQKFPEVPEVVVSRCMLQNNNNLDACCAVLSQESTRYLYGEGDLNFSDDSGISGLRNHMTSLNLDLQSQNIYHHGREGSRMNGSRTLTHSISDGQLQGGQSNSELFQQEPQTAPAQVPQGFNVFGMSSSSGASNSAPHLGFHLGSKGTSSLSQQTPRFNPIMVTLAPNIQTGRNTPTSLHIHGVPPPVLNSPQGNSIYIRPYITTPGGTTRQTQQHSGWVSQFNPMNPQQVYQPSQPGPWTTCPASNPLSHTSSQQPNQQGHQTSHVYMPISSPTTSQPPTIHSSGSSQSSAHSQYNIQNISTGPRKNQIEIKLEPPQRNNSSKLRSSGPRTSSTSSSVNSQTLNRNQPTVYIAASPPNTDELMSRSQPKVYISANAATGDEQVMRNQPTLFISTNSGASAASRNMSGQVSMGPAFIHHHPPKSRAIGNNSATSPRVVVTQPNTKYTFKITVSPNKPPAVSPGVVSPTFELTNLLNHPDHYVETENIQHLTDPTLAHVDRISETRKLSMGSDDAAYTQDI

SEQ ID NO: 184424 - DNA, 2082 bp, Artificial Sequence
  derived and/or modified sequence
atggcccagggcagccaccagatcgacttccaggtgctgcacgacctgagacagaagttccccgaggtgcccgaggtggtggtgagcagatgcatgctgcagaacaacaacaacctggacgcctgctgcgccgtgctgagccaggagagcaccagatacctgtacggcgagggcgacctgaacttcagcgacgacagcggcatcagcggcctgagaaaccacatgaccagcctgaacctggacctgcagagccagaacatctaccaccacggcagagagggcagcagaatgaacggcagcagaaccctgacccacagcatcagcgacggccagctgcagggcggccagagcaacagcgagctgttccagcaggagccccagaccgcccccgcccaggtgccccagggcttcaacgtgttcggcatgagcagcagcagcggcgccagcaacagcgccccccacctgggcttccacctgggcagcaagggcaccagcagcctgagccagcagacccccagattcaaccccatcatggtgaccctggcccccaacatccagaccggcagaaacacccccaccagcctgcacatccacggcgtgcccccccccgtgctgaacagcccccagggcaacagcatctacatcagaccctacatcaccacccccggcggcaccaccagacagacccagcagcacagcggctgggtgagccagttcaaccccatgaacccccagcaggtgtaccagcccagccagcccggcccctggaccacctgccccgccagcaaccccctgagccacaccagcagccagcagcccaaccagcagggccaccagaccagccacgtgtacatgcccatcagcagccccaccaccagccagccccccaccatccacagcagcggcagcagccagagcagcgcccacagccagtacaacatccagaacatcagcaccggccccagaaagaaccagatcgagatcaagctggagcccccccagagaaacaacagcagcaagctgagaagcagcggccccagaaccagcagcaccagcagcagcgtgaacagccagaccctgaacagaaaccagcccaccgtgtacatcgccgccagcccccccaacaccgacgagctgatgagcagaagccagcccaaggtgtacatcagcgccaacgccgccaccggcgacgagcaggtgatgagaaaccagcccaccctgttcatcagcaccaacagcggcgccagcgccgccagcagaaacatgagcggccaggtgagcatgggccccgccttcatccaccaccacccccccaagagcagagccatcggcaacaacagcgccaccagccccagagtggtggtgacccagcccaacaccaagtacaccttcaagatcaccgtgagccccaacaagccccccgccgtgagccccggcgtggtgagccccaccttcgagctgaccaacctgctgaaccaccccgaccactacgtggagaccgagaacatccagcacctgaccgaccccaccctggcccacgtggacagaatcagcgagaccagaaagctgagcatgggcagcgacgacgccgcctacacccaggccctgctggtgcaccagaaggccagaatggagagactgcagagagagctggagatccagaagaagaagctggacaagctgaagagcgaggtgaacgagatggagaacaacctgaccagaagaagactgaagagaagcaacagcatcagccagatccccagcctggaggagatgcagcagctgagaagctgcaacagacagctgcagatcgacatcgactgcctgaccaaggagatcgacctgttccaggccagaggcccccacttcaaccccagcgccatccacaacttctacgacaacatcggcttcgtgggccccgtgccccccaagcccaaggaccagagaagcatcatcaagacccccaagacccaggacaccgaggacgacgagggcgcccagtggaactgcaccgcctgcaccttcctgaaccaccccgccctgatcagatgcgagcagtgcgagatgcccagacacttctag

SEQ ID NO: 184425 - DNA, 1611 bp, Artificial Sequence
  derived and/or modified sequence
atggcccagggcagccaccagatcgacttccaggtgctgcacgacctgagacagaagttccccgaggtgcccgaggtggtggtgagcagatgcatgctgcagaacaacaacaacctggacgcctgctgcgccgtgctgagccaggagagcaccagatacctgtacggcgagggcgacctgaacttcagcgacgacagcggcatcagcggcctgagaaaccacatgaccagcctgaacctggacctgcagagccagaacatctaccaccacggcagagagggcagcagaatgaacggcagcagaaccctgacccacagcatcagcgacggccagctgcagggcggccagagcaacagcgagctgttccagcaggagccccagaccgcccccgcccaggtgccccagggcttcaacgtgttcggcatgagcagcagcagcggcgccagcaacagcgccccccacctgggcttccacctgggcagcaagggcaccagcagcctgagccagcagacccccagattcaaccccatcatggtgaccctggcccccaacatccagaccggcagaaacacccccaccagcctgcacatccacggcgtgcccccccccgtgctgaacagcccccagggcaacagcatctacatcagaccctacatcaccacccccggcggcaccaccagacagacccagcagcacagcggctgggtgagccagttcaaccccatgaacccccagcaggtgtaccagcccagccagcccggcccctggaccacctgccccgccagcaaccccctgagccacaccagcagccagcagcccaaccagcagggccaccagaccagccacgtgtacatgcccatcagcagccccaccaccagccagccccccaccatccacagcagcggcagcagccagagcagcgcccacagccagtacaacatccagaacatcagcaccggccccagaaagaaccagatcgagatcaagctggagcccccccagagaaacaacagcagcaagctgagaagcagcggccccagaaccagcagcaccagcagcagcgtgaacagccagaccctgaacagaaaccagcccaccgtgtacatcgccgccagcccccccaacaccgacgagctgatgagcagaagccagcccaaggtgtacatcagcgccaacgccgccaccggcgacgagcaggtgatgagaaaccagcccaccctgttcatcagcaccaacagcggcgccagcgccgccagcagaaacatgagcggccaggtgagcatgggccccgccttcatccaccaccacccccccaagagcagagccatcggcaacaacagcgccaccagccccagagtggtggtgacccagcccaacaccaagtacaccttcaagatcaccgtgagccccaacaagccccccgccgtgagccccggcgtggtgagccccaccttcgagctgaccaacctgctgaaccaccccgaccactacgtggagaccgagaacatccagcacctgaccgaccccaccctggcccacgtggacagaatcagcgagaccagaaagctgagcatgggcagcgacgacgccgcctacacccaggacatctag

SEQ ID NO: 184426 - DNA, 2082 bp, Artificial Sequence
  derived and/or modified sequence
atggcccagggatcccatcagatcgatttccaggtgttgcatgacctcagacagaagttccctgaggtgcctgaagtggttgtgagccggtgtatgctccagaataataataatctcgacgcatgttgcgccgtcctgagccaagaatcgaccaggtatctttatggtgaaggcgacctaaacttcagtgacgatagtgggatctccggcctacggaaccacatgacctctcttaacctggatcttcagtctcaaaatatctaccaccacggcagggagggttctagaatgaacggtagcaggactttgacccattctattagcgacggccaacttcaggggggccagtctaacagcgaattgtttcagcaagagccccagacagcgcccgcccaagtccctcagggctttaacgtttttggaatgtcatcttcaagtggagcatctaacagcgccccacacctgggctttcatctgggtagtaaagggacttcatccttaagccagcaaaccccgaggtttaatccaatcatggtcacactagcccccaatattcagaccggacgcaacaccccaacctctttgcacattcacggcgtgcctccacccgtgttgaattctcctcagggcaacagtatttatatccgtccttacattaccactcctgggggaactacgcggcagacgcagcagcattctggctgggtgtcccaatttaatccaatgaacccacagcaggtttaccaaccaagtcagcccggaccctggacgacatgccccgctagcaaccctctttcacacacctcgtcacagcagccaaatcaacaaggtcaccagaccagccatgtgtacatgcctataagcagtccgactacttcccagccccctaccatacactcatccggatcatcccagtcatcagcccatagccagtacaatattcagaacatctctaccggacctaggaagaaccagatagagattaagttggaaccccctcaacgcaacaactccagcaaactgaggtccagcgggcccagaacatcaagcacctctagctccgtcaactcccaaacactaaaccgaaatcagcccaccgtctatatagccgcaagtccacctaacactgatgaattaatgtctaggtctcaaccaaaggtgtacattagcgccaatgccgccactggcgacgaacaggtaatgagaaaccagcctactctctttatctcgacgaatagcggagcatctgcagcatcaaggaatatgagcggtcaggtttctatggggcctgccttcatacaccatcatcccccaaaaagcagggctatcggcaacaacagcgccacctccccccgcgtagtagtgacccagcccaacacaaaatatacctttaagattaccgttagcccaaataaaccaccagctgtgtctcctggggttgtgtccccgactttcgaactcacaaacctactgaaccatccagaccattacgtcgaaaccgagaacatccaacacctcacagaccccacacttgcgcacgtggatcggatctccgagaccagaaaattgtccatgggatcagacgacgccgcatacacacaagcactgctcgttcaccagaaagcccgcatggagaggttgcagcgcgagctggaaatacaaaaaaaaaagctcgataaacttaagtctgaagttaacgaaatggagaacaatctgactcggaggcgattgaagcgaagtaacagtatttcacagatacctagcctggaggagatgcagcagctacgaagctgcaaccgacaacttcagatagacatcgattgcctgaccaaggaaatagacctttttcaggcccgcgggccccactttaacccatcagctatacacaatttttatgataatatcggattcgtgggccccgtgccacccaagcccaaagatcagaggtcaattattaagacccccaagactcaggatacagaggacgacgagggcgcccagtggaattgtactgcctgtacttttcttaatcaccccgctctcattaggtgcgagcagtgcgaaatgccccggcacttttag

SEQ ID NO: 184427 - DNA, 2082 bp, Artificial Sequence
  derived and/or modified sequence
atggcccagggctcccaccagattgacttccaagttctccacgatctccgacagaaattcccagaagttcccgaagttgtggtgtcccggtgtatgctgcagaacaacaacaatcttgatgcctgttgtgctgttctgtctcaggagtctacccgttatctgtatggagagggagatctgaatttttcagatgattcagggatttcgggattgaggaatcatatgacttcactgaatctggaccttcagtcacagaatatttaccaccacgggcgggaagggagccgaatgaacggatcaaggactctgactcactcaatctccgacggccagctccagggcggtcaaagtaatagcgagctgttccagcaggaaccacaaactgcacccgcacaggtgccgcaggggtttaacgtgttcggcatgtcctcttcttcaggagcctccaactccgccccccacctgggttttcatctgggaagcaaaggcaccagctctctcagccaacagacccctcgcttcaaccctatcatggtcacactggcgccgaatatccaaactgggcgtaatacccctacctctctgcacatccatggggtgcccccaccagtgctgaactcaccgcagggtaattctatttacatccgcccctacataaccactcccggaggaaccaccagacaaactcaacaacacagtggatgggtttcccagtttaaccctatgaatcctcagcaggtgtatcagccctcgcaaccaggtccatggaccacttgtccagccagcaatcctctgtcacacactagctctcagcagccaaatcagcagggccaccagacatcacatgtttacatgcccatatctagcccaacaacgtcacagccacctacaattcacagcagcggatcttcacagtcaagtgcccacagccagtacaacattcagaacattagtaccgggcctcggaagaaccagatcgaaatcaaactggagccacctcagcggaataacagctcgaagctgcgaagcagcggaccacgcacatccagtacatcctcttctgtgaactcacagacattaaaccggaaccagcccaccgtgtacatcgccgctagcccaccaaacaccgacgagctgatgagtcggtcgcagccaaaagtctatatctctgctaacgcggcgacaggggatgaacaggttatgcgaaaccagcccacactgtttataagcacaaactcaggagcatctgcggctagccggaatatgtcaggacaagtgtcaatgggtccagctttcattcatcatcacccccccaagtctcgagctataggaaacaattcagccacatcccccagggttgtggtcacacagcccaatacaaagtacacattcaagatcactgtgtcccctaacaagccgccagctgtgagtccaggagtggtttcgcccacatttgaactaacaaacttgctgaaccacccagaccactacgtggaaacggaaaacattcagcacctgacagaccctacactggcacatgtggacagaatatccgagacaaggaaactgagcatggggtctgatgacgccgcttatacacaagcgctgctggtgcatcagaaggctcgtatggaacggctccagcgtgagctggaaatccaaaagaaaaagctcgacaaattgaaaagcgaggtcaacgagatggagaacaatcttacccgtagacgtctcaagagatctaattccataagtcagattccaagcctggaggaaatgcaacagctacgatcttgtaaccgccagctacagattgacattgattgcctcaccaaggagattgacctttttcaagcccgcggcccacacttcaacccttcggccatccataacttttatgataacatcggattcgtcggccctgtccctcccaaaccaaaagatcagcggtccatcataaagactccgaagacgcaagacacggaagacgacgagggagcccaatggaattgcaccgcctgcactttcctaaaccatcccgcgttgatcagatgcgagcagtgcgaaatgcctagacacttttag

SEQ ID NO: 184428 - DNA, 1611 bp, Artificial Sequence
  derived and/or modified sequence
atggcacaggggtcccaccaaattgacttccaggtgctccatgacttgagacagaagtttcccgaagtccctgaggtagtggtgtcacgatgtatgctgcagaacaacaataaccttgacgcctgctgcgcggttcttagtcaggaatccactcgctatctttacggcgaaggggatcttaatttttcggacgatagcggcatcagtggtctgaggaatcatatgacatccctgaatctggatctacaatcacagaatatctatcatcatggccgggagggttcaagaatgaacggaagccgcactctcacacactctatttccgacggccagctgcagggaggtcagtccaattcagagctttttcagcaggaaccacaaactgcgcctgcccaagtgccgcagggttttaatgtttttggcatgagtagctcaagtggtgccagcaacagtgccccacatttaggctttcacctgggatctaagggaacatcaagcctgagccagcagacgccccgttttaatccaatcatggtgacattggcaccgaacatccaaaccgggaggaacacaccgacatcactgcatatccacggtgtgccaccgccagtgctgaattcccctcaggggaacagcatatacattaggccatatatcacgaccccgggaggaacaactcgtcagacccagcaacactccggatgggtttcccagttcaatccaatgaatccccagcaggtatatcaacccagccaacccggcccctggaccacctgcccggcatccaaccctttatctcacaccagcagccagcagcctaaccaacagggccaccagaccagccacgtttacatgcctatttcctcacccaccacgtcacaaccacccactatccactcctccggctccagtcagagctcggcccatagccagtataatatccagaacatctccactggcccgcgaaaaaaccaaattgaaattaaactggaaccgcctcaacgcaacaattcttctaagctgcgctcttcagggccccgcacttcgagcactagttctagcgttaatagccaaacactgaacagaaatcagcccaccgtgtatattgctgcgagcccccccaacactgatgagctcatgagtcggtcccagcccaaagtatatatctccgccaatgccgccaccggcgatgagcaggtgatgcgtaaccagcctacactgttcatatcaactaattccggggcctctgctgccagtaggaacatgagtgggcaggtgagtatggggcccgcctttattcaccatcatccaccaaagagtcgcgctattggaaacaattctgcaacctcaccccgggtggtggtgacccagccaaacaccaagtataccttcaaaatcacagtttcaccgaataaacctccagccgtgtcgccaggagttgtatctccaaccttcgaactgactaatttactgaaccaccctgaccactatgtggagacagaaaacatccagcacctgacagaccctacgctggctcatgtcgatcgcatatccgaaactaggaagctcagcatgggatccgacgacgctgcctatacgcaggacatttag

SEQ ID NO: 184429 - DNA, 2082 bp, Artificial Sequence
  derived and/or modified sequence
atggcccagggctcacatcaaatcgacttccaggtgttgcacgatcttcgccagaagtttcctgaggtgcccgaggtggttgtctctagatgcatgctacaaaataacaacaatctggatgcctgctgtgcagtgctctcccaggaaagtaccaggtacctgtacggcgagggcgatctaaatttctccgacgattctggcatctccgggctgcggaaccacatgactagcctcaacctggacctccaatctcaaaacatatatcaccatggacgggaaggcagcaggatgaatgggtctcgtacactgacgcacagcatatccgatggccagttgcagggtggtcagagtaattccgagctcttccagcaggaaccacaaacagctccagcccaagtgcctcaggggtttaacgtgttcggcatgtcttcttcctccggcgcaagcaactccgctccccatctaggcttccatctcggctctaaaggcacaagtagtctttcccagcagacccctagattcaaccccattatggttacactcgcgccaaatatccagaccgggagaaacactccgacctcacttcatatccacggtgtgcccccccctgttctgaacagtccacaaggaaactctatatacattaggccctacatcactaccccagggggaacaacccgccagacacaacagcatagtggctgggtttcacagtttaacccaatgaacccccagcaggtttatcagccttcccagccagggccctggacgacatgtcccgcatcaaatccacttagtcacactagttctcagcaacccaatcagcagggacaccagacatctcatgtatacatgcctatctctagtcccaccacgtcacaaccaccaacaattcactcctcagggagttctcagagttccgcccactctcagtacaatatccaaaacatctcgacagggccacgtaaaaatcagattgagataaagctggagcctcctcagagaaacaactcctcaaaactcaggtcttccggacccaggacctcatctacctcatccagcgtgaactcacagacactcaaccgcaatcagcctacagtgtatatcgccgcctcgcctcctaacactgatgagctcatgtcaaggtcgcaaccaaaggtgtatatctccgcaaacgcggctacaggggatgaacaagtcatgcgcaaccagccgactctctttatctccaccaactcaggggcctccgccgcctccagaaacatgagcgggcaggtttcaatggggccagccttcattcatcatcacccacccaagagccgtgcaattggaaacaactcagcgaccagccctcgtgtcgttgtgacgcaaccaaatactaaatatacttttaagatcacggtcagtccgaacaaacctcctgcagtctcccctggggtggtgagcccaacctttgagttgaccaatctgttgaatcaccccgaccactatgtggagacagagaatattcagcacttgaccgatccaaccctagctcacgtggatcgaatttccgagaccagaaagctgtcaatgggcagcgacgatgccgcctacactcaggcacttctggtgcatcaaaaggccagaatggagcggctacagagagagttagagattcagaagaagaagttggataaactcaaatccgaggtcaatgaaatggaaaataatttgaccagacgtcgcctgaagaggtcgaattcaatcagccagatcccgagtcttgaagagatgcaacagctgagatcttgtaatagacagttacaaatcgatatcgattgtcttactaaggagatcgacctattccaggccaggggcccccacttcaacccatctgctattcacaatttctatgacaacatcggtttcgtgggcccggttcccccgaagccaaaagatcaaaggtctatcattaagacccctaagacccaggatactgaggatgacgagggagcccagtggaactgcacagcttgcaccttcctgaatcacccagcgctgatcagatgcgagcagtgtgagatgccgcgacacttttag

SEQ ID NO: 184430 - DNA, 2082 bp, Artificial Sequence
  derived and/or modified sequence
atggcccagggcagccaccagattgacttccaggtgctgcatgacctgcggcagaagtttcctgaggtgcctgaggtggtggtgagccgctgcatgctgcagaacaacaacaacctggatgcctgctgtgctgtgctgagccaggagagcacccgctacctgtatggagagggggacctgaacttcagtgatgacagcggcatcagcggcctgaggaaccacatgaccagcctgaacctggacctgcagagccagaacatctaccaccacggccgggagggcagcaggatgaatggcagcaggaccctgacccacagcatcagtgatggccagctgcagggcggccagagcaacagcgagctgttccagcaggagccccagacagccccagcccaggtgccccagggcttcaacgtgtttggcatgagcagcagcagcggggccagcaacagcgccccccacctgggcttccacctgggcagcaagggcaccagcagcctgagccagcagaccccccgcttcaaccccatcatggtgaccctggcccccaacatccagacaggaagaaacacccccaccagcctgcacatccacggcgtgcccccacctgtgctgaacagcccccagggcaacagcatctacatccggccctacatcaccacccctgggggcaccacccggcagacccagcagcacagcggctgggtgtcccagttcaaccccatgaacccccagcaggtgtaccagcccagccagcccggcccctggaccacctgcccagccagcaaccccctgagccacaccagcagccagcagcccaaccagcagggccaccagaccagccacgtgtacatgcccatcagcagccccaccaccagccagccccccaccatccacagcagcggcagcagccagagcagcgcccacagccagtacaacatccagaacatcagcacaggccccaggaagaaccagatcgagatcaagctggagcccccccagaggaacaacagcagcaagctgcggagcagcggccccaggaccagcagcaccagcagctctgtgaacagccagaccctgaacagaaaccagcccaccgtgtacatcgccgccagcccccccaacacagatgagctgatgagccgcagccagcccaaggtgtacatcagcgccaatgctgccactggagatgagcaggtgatgaggaaccagcccaccctcttcatcagcaccaacagcggggccagcgctgccagcaggaacatgagcggccaggtgtccatgggccctgccttcatccaccaccacccccccaagagccgggccatcggcaacaacagcgccaccagcccccgggtggtggtgacccagcccaacaccaagtacaccttcaagatcaccgtgagccccaacaagcccccagctgtgtcccctggggtggtgagccccacctttgagctgaccaacctgctgaaccacccagaccactacgtggagacagagaacatccagcacctgacagaccccaccctggcccacgtggaccgcatcagcgagaccaggaagctgtccatgggcagtgatgatgctgcctacacccaggccctgctggtgcaccagaaggccaggatggagcggctgcagcgggagctggagatccagaagaagaagctggacaagctgaagtctgaggtgaatgagatggagaacaacctgacccggcggcggctgaagaggagcaacagcatcagccagatccccagcctggaggagatgcagcagctgcggagctgcaaccggcagctgcagattgacatcgactgcctgaccaaggagattgacctcttccaggcccggggcccccacttcaaccccagcgccatccacaacttctatgacaacattggatttgtgggccctgtgccccccaagcccaaggaccagaggagcatcatcaagacccccaagacccaggacacagaagatgatgaaggagcccagtggaactgcacagcctgcaccttcctgaaccacccagccctgatccgctgtgagcagtgtgagatgcccaggcacttctag

SEQ ID NO: 184431 - DNA, 1611 bp, Artificial Sequence
  derived and/or modified sequence
atggcccagggcagccaccagattgacttccaggtgctgcatgacctgcggcagaagtttcctgaggtgcctgaggtggtggtgagccgctgcatgctgcagaacaacaacaacctggatgcctgctgtgctgtgctgagccaggagagcacccgctacctgtatggagagggggacctgaacttcagtgatgacagcggcatcagcggcctgaggaaccacatgaccagcctgaacctggacctgcagagccagaacatctaccaccacggccgggagggcagcaggatgaatggcagcaggaccctgacccacagcatcagtgatggccagctgcagggcggccagagcaacagcgagctgttccagcaggagccccagacagccccagcccaggtgccccagggcttcaacgtgtttggcatgagcagcagcagcggggccagcaacagcgccccccacctgggcttccacctgggcagcaagggcaccagcagcctgagccagcagaccccccgcttcaaccccatcatggtgaccctggcccccaacatccagacaggaagaaacacccccaccagcctgcacatccacggcgtgcccccacctgtgctgaacagcccccagggcaacagcatctacatccggccctacatcaccacccctgggggcaccacccggcagacccagcagcacagcggctgggtgtcccagttcaaccccatgaacccccagcaggtgtaccagcccagccagcccggcccctggaccacctgcccagccagcaaccccctgagccacaccagcagccagcagcccaaccagcagggccaccagaccagccacgtgtacatgcccatcagcagccccaccaccagccagccccccaccatccacagcagcggcagcagccagagcagcgcccacagccagtacaacatccagaacatcagcacaggccccaggaagaaccagatcgagatcaagctggagcccccccagaggaacaacagcagcaagctgcggagcagcggccccaggaccagcagcaccagcagctctgtgaacagccagaccctgaacagaaaccagcccaccgtgtacatcgccgccagcccccccaacacagatgagctgatgagccgcagccagcccaaggtgtacatcagcgccaatgctgccactggagatgagcaggtgatgaggaaccagcccaccctcttcatcagcaccaacagcggggccagcgctgccagcaggaacatgagcggccaggtgtccatgggccctgccttcatccaccaccacccccccaagagccgggccatcggcaacaacagcgccaccagcccccgggtggtggtgacccagcccaacaccaagtacaccttcaagatcaccgtgagccccaacaagcccccagctgtgtcccctggggtggtgagccccacctttgagctgaccaacctgctgaaccacccagaccactacgtggagacagagaacatccagcacctgacagaccccaccctggcccacgtggaccgcatcagcgagaccaggaagctgtccatgggcagtgatgatgctgcctacacccaggacatctag

SEQ ID NO: 184432 - DNA, 2082 bp, Artificial Sequence
  derived and/or modified sequence
atggcccagggcagccaccagatcgacttccaggtgctgcacgacctcagacagaaattcccagaagtgcctgaggtcgtggtcagtcgatgcatgctgcagaacaacaataacctggacgcatgctgcgctgttcttagccaggagtcgaccagatacctgtacggggaaggcgacttgaattttagtgatgattcagggattagtgggctgcgtaaccatatgactagcctgaatctagatctgcagagccagaacatatatcatcacggacgggagggatctaggatgaatgggtcaagaaccctgacacacagcatctctgacggccaacttcaaggtgggcagtcaaactcggagctgttccagcaggaacctcagacggcccctgcgcaggttccccaagggttcaatgttttcgggatgtcatccagttctggcgcgagcaattcggctccccacctgggcttccatctgggatcaaagggaacctcttcgctgtctcagcagacccctaggttcaaccctatcatggttacactggcccccaacattcagacaggtagaaatacgccaacctccctccacatccacggtgttccgccgcccgtgctcaatagtccccaaggtaactcgatctacatcaggccctatattacaacaccaggaggaaccacaaggcagacccagcagcattcgggctgggtgagccaattcaatcccatgaaccctcagcaagtttatcaaccttcacaacctggcccatggacaacatgtcccgcatctaaccctcttagccacacaagcagtcagcagcccaatcagcaagggcaccaaacctcccatgtctacatgccaatctcgtcccccactaccagtcaaccaccaaccatccactcatcagggagttcccagtcctctgcccacagccagtataatattcagaatatctccacggggcctaggaaaaaccaaattgagataaaactggagcccccccagagaaataatagttccaaactcaggagctcaggaccacgaacctcatctacaagcagctctgtaaatagtcagaccttgaaccgaaaccagcctaccgtgtacatcgcagcgagccctccaaataccgatgaattgatgagcagatcccagcctaaggtgtacatcagtgccaacgccgcaaccggtgacgagcaggttatgaggaatcaaccaacactatttatatcaaccaatagcggagcctccgccgcctcacggaatatgtccggtcaggttagcatgggacccgcatttatccaccatcatcctccaaagtctagagctataggcaataattccgccacttcaccgcgcgttgtggtcacgcaacctaatacaaaatacaccttcaaaattaccgttagccctaacaaaccaccagctgtgagccctggagtggtgtctccaacatttgagctcaccaacttgctcaaccacccagatcattacgtagagaccgaaaatatccaacacctgaccgacccgactttggcgcacgtggacagaatttccgagacaaggaaactgagcatgggttctgacgacgccgcgtacacccaggcccttctggtgcaccaaaaagcccgcatggaacgacttcagagagagttagagatccagaaaaagaaactggacaaattgaagtctgaagttaatgaaatggaaaataaccttactagacgcagattgaagcgctcaaacagcatctcccagatcccgtccttggaggagatgcagcagctaaggagctgtaatcgccagttgcaaattgacatagattgcctaacaaaggaaattgatctgttccaagccaggggcccccattttaacccatccgctatccacaacttctacgataatatcggctttgtgggtccggtgccaccaaagccaaaggaccagaggtcgattattaagacaccaaaaacgcaagatactgaagacgatgagggagcccagtggaactgcaccgcctgtacttttctgaatcacccagccctgatccgctgcgagcagtgtgagatgcctcggcatttctag

SEQ ID NO: 184433 - DNA, 2082 bp, Artificial Sequence
  derived and/or modified sequence
atggcccagggcagccaccagatcgacttccaggtgctgcacgaccttaggcagaagtttccagaagtgcccgaagtcgttgtgagccgctgcatgttacaaaataataacaatctcgatgcttgctgcgctgtgctgagccaggagtctactaggtatttatacggcgaaggagatttaaatttctctgacgacagtggcataagcggcttaagaaatcacatgacctcgctgaacctagatttacagtcgcaaaacatataccaccacggacgagagggctcgagaatgaatggatccagaacgctgacacactctatttctgacggacagttgcagggcgggcagtctaacagtgagctgttccagcaggaaccacaaactgctcctgcccaggtcccacagggctttaacgttttcgggatgtcgtccagctccggtgcttcgaactccgccccgcacctcggctttcacttgggttccaaagggacctccagcctttcccagcagacccctcggttcaatcccatcatggtgacactcgcacccaatattcagactgggcggaacacccctacctccctgcacatccatggcgtgcccccgccagtgttaaattccccacagggtaattcaatttacataaggccatacatcactaccccgggagggacaaccaggcaaacacagcagcattcagggtgggtgtcgcagtttaatccaatgaatccccagcaagtgtatcagccaagccaaccagggccgtggacaacgtgtcccgcgtcaaatcctctctcccacacatcctctcagcagccaaatcaacaggggcatcagacctcccatgtctatatgcctatttcaagcccaactacttcccagcccccgacgatccactcctccggatccagccagagctcagctcattcccagtacaatattcaaaacatatccaccggacccaggaagaatcagatcgaaatcaaactggagccccctcaaaggaataactcctcgaaactgagatcatctgggccacgaacatctagtacctcgtcctccgttaactcgcaaaccctgaatagaaaccagcccaccgtttatattgcagcgtctccacccaatactgatgagctcatgagccgcagtcagccgaaggtgtacatctcagctaatgctgccaccggagacgagcaggtgatgcggaaccagcccaccctgtttatcagcaccaacagcggtgcctccgctgcatctcggaatatgagcggccaggtatctatgggacctgcctttatccatcaccaccccccaaaatcccgcgctattgggaacaactccgcaacatccccaagggtggtggtcacacagccaaacactaagtacacgtttaagatcaccgtaagccccaacaagcccccggccgtgtccccaggggtagtgtcacctacttttgaactcaccaatctgcttaaccatccagaccattacgtggaaaccgagaacatacagcaccttacagacccaacactcgctcacgtggatcgtattagcgagacaaggaaattgtctatgggttccgacgacgcagcgtatacacaggccctgctcgtgcatcagaaggcccgaatggaaaggctccagcgtgaactggagatacaaaaaaaaaagctggacaagctgaagagcgaagtgaacgaaatggagaacaatctgacccgaaggcggcttaagcgtagtaattccattagtcaaattccttctctggaagagatgcagcagctgaggtcttgtaatcggcagctgcagatcgatatagactgcctgacaaaggaaattgacctgttccaggcccgcggaccgcacttcaatccatccgctatccataatttctatgacaacatcggatttgtgggaccggttcctcctaaaccaaaggaccagcgatctatcattaaaacccctaagactcaagatacagaagacgatgagggggcacagtggaactgtacagcctgcacattcctgaaccatccagcgctcatccggtgtgaacagtgcgagatgcctcgccatttttag

SEQ ID NO: 184434 - DNA, 1611 bp, Artificial Sequence
  derived and/or modified sequence
atggcccagggcagccaccagatcgacttccaggtgctgcacgacctgcggcagaagtttccagaggtgccggaggttgtcgtatcaagatgcatgctccaaaacaataataacctcgatgcctgttgtgctgtgctgtctcaggagagcacccgatatttatacggagaaggggacttgaactttagtgacgattcaggaatctcagggcttcggaatcacatgacgagtctcaacttggatcttcagtcccagaatatctatcatcacggaagggagggctcaaggatgaacgggagccgaacgttgacacattctatctctgatggccagctccagggaggacagtctaactctgagctctttcaacaggagccccaaactgcgccagcgcaggttccccagggcttcaacgtgttcggcatgagcagttcctcgggggcatcaaactctgcaccccatttggggttccatctgggctccaaaggcacttcatctctgtcacagcagaccccgagattcaacccaatcatggtgacattggcacctaacattcagaccggccgaaacacacctacttctctgcatattcacggtgtcccccccccagtgctgaactcccctcagggaaacagcatatatattaggccatacattaccacccctggcgggactacacgacagactcaacagcactctggctgggtatctcagttcaacccgatgaaccctcagcaggtgtaccagccttcgcaacccgggccctggaccacctgccccgcctccaaccccttgagccatacctccagccagcagcccaatcaacaggggcatcagaccagccacgtttatatgccaattagcagccctacgacgtctcagccgccaaccatccactcgagcggcagttctcaatccagcgcacattcacagtacaatattcagaacatcagcactggcccccgaaagaatcagattgagataaaattggagccacctcagcgaaataactccagcaagctgcggagtagcggcccaaggacgtcgagcacatcttccagcgttaacagccagaccttaaatagaaatcaacctaccgtgtacatcgccgctagcccacccaatacagacgaactgatgtcgcgcagtcagcccaaggtctatatttctgctaacgccgcaacaggggacgaacaagtgatgagaaaccaaccaactctattcattagcaccaacagcggcgcttctgctgcctctaggaacatgagtggacaggtttctatgggcccagccttcatccatcatcatccaccaaaatctagggcgattggaaataacagtgctacctcaccaagagttgtcgtgacccagccaaacacgaaatacacattcaagatcaccgtctcccctaataagcctccagccgtgagcccaggggtagtaagtcctactttcgaattgacgaacctcttgaaccatcctgatcattacgtggaaactgagaacattcagcaccttacagatcccaccctggcccatgtcgacaggataagcgagacaagaaaattgtccatgggctccgatgacgctgcttacacacaagacatctag

SEQ ID NO: 184435 - DNA, 2082 bp, Artificial Sequence
  derived and/or modified sequence
atggcccagggcagccaccagatcgacttccaggtgctgcacgacctgcggcaaaaatttcctgaggtcccagaagtggtagtcagcagatgcatgctgcagaataataataaccttgacgcttgctgcgctgttctcagtcaggagtctactagatatttatacggggaaggcgacctcaacttttccgatgactcgggtatctcaggcctgcgcaaccatatgacaagtctcaatttagacctgcagagtcagaacatatatcaccacggacgggagggtagccggatgaatgggtctagaacccttacacacagtatttcggacggtcagctgcagggaggacagagcaattcggagctattccaacaagagcctcagacagcaccagcccaggtcccccaggggtttaacgtgtttggaatgtcaagttccagcggcgcttctaatagtgccccacacctgggtttccacctgggaagcaagggtaccagttccctctcccagcaaacaccgagatttaacccgattatggtgacccttgccccaaatatccagaccggtcggaatacacctacaagcctgcacattcacggagtgcccccacccgtgctaaattcaccgcaggggaattccatctacataaggccgtatattaccactccaggtggcaccacccgccagacacaacagcattcaggctgggtctcccagttcaaccccatgaatccccagcaggtgtaccagccctcacagcccgggccctggaccacgtgcccagcaagtaacccattgagccataccagtagccagcagccaaaccagcaggggcatcagacgtcacatgtgtacatgccaatctcctcccccactaccagtcaaccccccaccattcatagtagcgggtcctcacagtctagcgctcactctcaatacaatattcagaacatctcaactgggccacgtaaaaatcagatcgagataaagctggaaccgccacagagaaataacagctccaaattgcggtccagcggtccccgcacaagttcaacaagttcctcagtcaacagccagacacttaacaggaaccagccgacagtatacattgcagcatctcctcccaacaccgacgagcttatgagtcgctcccagccaaaggtgtacatcagtgccaatgcagcaactggcgacgagcaggtgatgcgtaatcagcctaccttgttcatttctacgaatagcggggcatcagccgcctcccgcaacatgagtgggcaagtgtccatgggaccagcatttatccaccaccatccaccaaagagccgggccattgggaataatagcgctacctccccccgtgtagtggtgacccagccaaacaccaaatatacatttaagattactgtcagtccaaataaacctccagccgtgagcccaggcgtggtgtcacctacttttgaactgactaacctgttaaatcaccccgaccattacgtggagacagagaatattcagcacctcacagatcctaccctcgctcatgtggaccgtatcagtgaaaccagaaaactcagtatggggtctgacgacgcagcctacacacaggccctgctcgtccaccagaaagcaagaatggagagactacagagagaactcgagattcagaagaaaaagctggacaagctgaagtcagaagtgaatgagatggaaaataacctaactcggaggaggttgaaaagatccaactctatcagccagattccctctctggaggaaatgcagcagctgcgttcctgcaaccggcagctgcaaatcgacattgactgcctcaccaaggagatcgacctgtttcaggcaagagggcctcattttaaccctagcgctatccataacttttacgataacattgggtttgtgggaccagtgcctcccaaacccaaggaccagcgctctatcatcaaaacacccaagacacaggacaccgaggatgatgaaggggctcagtggaattgcactgcctgtacgttcctcaaccacccggcgctcattcggtgcgagcaatgtgagatgcctcgccacttttag

SEQ ID NO: 184436 - DNA, 2082 bp, Artificial Sequence
  derived and/or modified sequence
atggctcaaggctcgcatcagatcgatttccaggtcctgcacgacctacgccagaaatttccggaagttcctgaggttgtcgtgagtagatgcatgctccagaacaataataatctcgacgcttgttgcgctgtgctgagccaggagtccacacgctacctatatggagagggagaccttaactttagcgatgacagcggtatatccgggttgcggaatcatatgacttccctgaatttagacctccagtcacaaaatatttatcaccatggaagagagggaagccgtatgaacggatctaggaccctcactcactcgattagtgacggacagctgcaggggggtcagtccaactctgagctcttccaacaagagccgcagactgcaccggcacaggtgccacagggcttcaacgtctttggcatgtctagcagctctggtgcgtccaatagtgccccacacctgggatttcacttagggagtaagggaaccagtagcctgtcccagcaaactcctcgctttaacccgatcatggtgacactggctcctaatatccaaactggcaggaacacccccacctctctccacatccatggggtgcctcctccggttctgaactcgccccaaggaaactctatatatattcgaccgtatatcactacccctggaggcacaactcgacagactcagcagcactccggctgggtgtcccagtttaatcctatgaatccgcaacaggtctaccaaccgagccaacccggtccctggacaacatgccctgccagcaacccactatctcacacctcttcgcagcagccaaatcagcagggccatcagactagccatgtatacatgccaatcagctcacctaccacgagtcagcctcccaccattcactcctctggatcgtcccagtcaagcgcgcattctcaatacaatatccagaatatcagcactggaccgcgtaaaaaccaaatagaaattaaactcgaacccccacagaggaacaactcatcaaagctccgaagttccggccctcgtacgtctagtacttctagttctgttaacagccagactctgaataggaaccagccaaccgtgtacatagcggcatctcctcctaatacagacgagttgatgtcccgctctcagccaaaggtgtatatcagtgccaatgcagcaacaggggatgaacaggttatgcggaatcagcccactctgttcatctctactaattcaggtgcctcagcagcctccaggaatatgagtgggcaggtgtcaatggggccagcctttattcaccaccaccctcccaagtcgcgagccataggcaacaattcagccacgagcccacgggtcgtggtcacccagcctaataccaaatacacctttaagataacagtttctcctaataaacctcctgctgtttcgcctggggttgttagccccaccttcgaattgacaaacctcctcaatcatcctgatcactacgtggaaaccgaaaacatacagcacctgaccgatcctacactggcacacgtggacagaatatctgaaactcgcaaactgtctatgggttctgacgacgcagcttatacccaggcattactagttcatcagaaagccagaatggagcgtctgcagcgggagctcgagattcaaaaaaagaaactggacaagctgaaatctgaagtgaatgagatggagaacaacctgacccggaggcggcttaaacggagcaacagcatcagccagattccttccctggaggaaatgcaacagctcagaagctgtaaccggcaattgcagatcgatattgactgtctgaccaaggaaatcgacctcttccaggcacgcggtcctcacttcaacccctccgccattcataacttctacgacaatattggttttgtcgggcctgtccccccaaaacctaaggaccagcggtcaatcattaagacacccaaaacacaggatacagaagatgacgaaggcgctcagtggaactgtacagcctgtactttcctgaaccaccctgccttaatacggtgcgagcagtgtgaaatgccacgccacttctag

SEQ ID NO: 184437 - DNA, 2082 bp, Artificial Sequence
  derived and/or modified sequence
atggctcaggggagccaccagatagacttccaggttttgcacgaccttcgccagaagttccctgaagtgccagaggtggtcgtgtctcgatgtatgttacagaataataataacctggacgcttgttgcgctgttctttctcaggaatctacccggtacctgtacggggaaggcgatctgaactttagtgacgattctggcatttcaggcctccgtaatcatatgacttctctaaacctggacctgcagtcccagaatatctaccaccacggtcgggaggggagtagaatgaatggttcccggaccctgacccattcaatcagcgatggtcagctgcagggaggacagagcaattctgagttgttccagcaagaaccccagacagcaccagctcaggtcccccagggatttaatgtgttcgggatgtccagctccagtggggcatctaattcggccccacaccttggcttccacctgggatccaaaggtactagtagtctgagccagcagaccccacgtttcaaccctatcatggtgaccctggccccaaatatccagaccggacgtaacaccccaacaagccttcacattcacggcgtgccgccaccagtcctgaactctcctcaagggaattcgatctatatacgcccttatattacaacaccaggaggcaccacaaggcagacccagcagcactccggctgggtttctcaattcaatccgatgaatcctcagcaggtgtatcaacctagccagccaggtccctggacaacatgtccagcaagcaacccgctgtcacatacctctagccaacagccaaaccagcaggggcaccagacctctcatgtgtacatgcccataagctcaccaactacgagccagccacctacgatacactcctccggaagcagtcaatcttcagcacacagtcagtacaacatacaaaatatcagcaccggccctcgaaagaaccagatcgaaatcaaacttgagcctccccagcgcaataactctagcaaactgcggtcctctggaccgaggaccagttccacgagttcttctgttaacagtcagacactcaaccgaaatcagcctacagtgtacatcgcggcatcccctcctaacaccgatgaattgatgtctcggtctcaacctaaggtatacatctccgcgaacgccgcaaccggcgacgagcaggtgatgcggaatcagcccaccctgtttatcagcacaaattcgggcgctagtgcagcctcaaggaatatgagtgggcaagtgtctatgggacccgcatttattcaccatcacccacccaaaagccgcgctattgggaataactcggccacctcacccagggttgtagttacccagccgaacacgaagtatacttttaagatcaccgtgagccccaacaaacctcccgcagtctccccgggtgtagtctcacccacgtttgagttaaccaatttgctcaatcacccagatcactatgtcgaaaccgaaaacattcagcatttaaccgaccctacactcgcacacgttgaccgcatatctgagactaggaagttaagcatgggatcagatgacgcggcttacacacaggccctgctcgtgcatcaaaaggccagaatggaaagactccagagagagctggagattcaaaaaaagaaacttgataagttgaaaagcgaagttaacgagatggaaaataacctaacacggagacgcttaaaacggtcaaatagcatcagtcagataccctcactcgaggagatgcagcagctgcgaagttgcaaccgacagctacaaatcgacatcgattgcttgaccaaagagatcgacctgtttcaggccagaggcccacacttcaacccctccgccatccacaatttttacgataacatcgggtttgtcggtccagtgccgcctaagcccaaagaccagcggagcattatcaagactccaaagacgcaggacactgaggacgatgaaggagctcagtggaactgtaccgcctgtacattcctgaatcacccagctctgatccggtgtgaacagtgcgagatgcctcgccacttctag

SEQ ID NO: 184438 - DNA, 1611 bp, Artificial Sequence
  derived and/or modified sequence
atggcacagggaagtcatcagatcgacttccaagtcttgcacgatctgcggcagaaatttcccgaggtgcctgaagtggttgtatcccgttgtatgctgcagaacaacaataacctggacgcgtgctgcgcagtgctgtcacaggaatccacacgttatttgtacggagaaggggacttgaacttctcggatgactcggggatttctggtcttaggaatcacatgacctctctgaatcttgacctgcaaagccagaatatttaccaccacggcagggaaggttcgcgcatgaacgggagcaggaccctgacccattctattagcgacgggcagcttcaagggggtcagtccaactctgaactgtttcagcaggaacctcaaacagcccctgcacaggtgccacagggcttcaacgtcttcgggatgtccagttctagcggcgctagtaacagcgccccacacctgggatttcatctgggaagtaaggggacatcctccttgagccagcaaacacctcgctttaatcccatcatggttactctggcccctaatatccaaaccggtcggaatactcctacttccctgcatatacacggagttcccccacccgttctgaattctccccaggggaactcgatctacattcggccatatataacgacccccggtggcacaactagacagacccaacagcacagcggctgggtctctcaatttaaccccatgaatcctcaacaggtctatcaaccatctcagcccggtccttggaccacctgtccagcatctaatcccctgtcccacacttctagtcaacagcctaaccaacaggggcaccagacaagccacgtttacatgccgatcagctcccccacaacgtcccagcccccaaccattcactcaagcggcagcagccagagctctgcccacagccagtataacatacaaaatatctctaccggtccaaggaagaaccagattgaaattaagctggagcctcctcaaagaaataactctagcaagctacgctcctctggccctcgaacttcttctacctcttcttctgtaaattctcagactctcaacaggaaccagccaacagtgtacatcgcagcctcccccccaaatactgatgagctgatgtcccgaagtcaaccaaaggtatatatttccgcaaacgcagcaaccggcgacgagcaggttatgcggaaccagccaacattgtttattagcacaaacagcggggcaagtgcagcctcccggaatatgtccgggcaggtatctatggggcctgcctttattcaccatcatccacctaaatccagagcaattggaaacaattctgctaccagtccgagggtggttgtcactcagcctaacacaaagtataccttcaaaataaccgtaagtcctaataaaccccctgcagtctcccctggagtcgttagtcctacctttgaactgaccaacctcctgaatcatcccgaccattacgtggagacagagaacatccagcaccttactgatcccactctcgcccacgttgaccggattagtgaaacccggaagttgtccatgggctcagacgacgcagcttacacccaggatatctag

SEQ ID NO: 184439 - DNA, 2082 bp, Artificial Sequence
  derived and/or modified sequence
atggcacaaggttctcatcaaattgactttcaggtgctccatgatctgcgccagaaatttccggaagtgcccgaggttgtggtctcgcggtgcatgctacagaataacaataacctagacgcgtgttgtgccgtcctcagtcaggagtctacaaggtatctttatggtgagggtgatctcaacttctctgacgacagcggaattagcggcctgcgaaaccacatgacttctttgaatctggatctacagagtcagaacatttatcaccacgggagagagggatccaggatgaatggatcccgtacattgactcactctatctcggacggacaacttcagggcggacagagcaacagtgaattgtttcagcaggaaccacaaaccgctccagctcaggtccctcaggggtttaatgtgtttgggatgtcaagcagctccggcgctagcaatagcgccccacatctaggattccatctagggtccaaaggtactagtagtctttcccagcaaactccacgcttcaaccccattatggtgactctggctccgaacatccagacagggcgaaacaccccgacctctcttcacatacacggtgtgcccccacccgtgctgaattccccgcaaggaaactccatctatataagaccctatattaccactcctggtggtaccactcgccagactcagcagcacagcggatgggtttcccagttcaatcccatgaatccccaacaggtttaccagccctcacagccaggcccatggactacctgcccagcaagcaacccactgtcgcatacctcttcccagcagcctaaccaacagggccaccaaacaagccatgtttatatgcccatttcctcacccacgacttctcaaccgcctacgattcactcttccgggagctctcagtcaagcgcacatagccagtacaatatccagaatatttccactggccctagaaagaaccagatcgagattaaattagagccacctcaacggaacaacagttcaaagcttagaagcagcggacctcgcacttcctcgactagctcctcggttaacagtcaaacactcaacaggaaccagcccaccgtgtacatcgcagcatctccacccaacaccgatgagctcatgagtaggtcacagccaaaggtttacatctcagcgaacgccgctactggggatgagcaggttatgagaaaccaacccactttatttatcagcacaaatagcggagcctcagccgctagtagaaatatgtctggtcaggtttccatgggaccggcttttattcaccatcatcctccgaaaagtcgggcaataggcaacaacagtgctacatcccctcgtgtggtcgtcacccagccaaacacaaagtacacatttaagatcacagtgtcaccaaacaagcccccagctgtgagtcccggtgtggtgagccccaccttcgagctgaccaacctgttgaatcatcccgaccattatgtggaaacggagaatattcagcaccttaccgaccccaccctggcacatgtggaccgcatatcggagaccaggaagctctcaatggggagtgacgatgccgcatatacacaggccttgcttgtgcaccagaaggcgaggatggagagattacaaagagagctagagatacaaaaaaagaagttggataagctcaagtccgaggtgaatgagatggagaacaatctcactcgacggaggttaaagcgatcaaacagtatttcccagatcccttcgctcgaagaaatgcaacaattgcgctcgtgcaacagacaactgcaaatcgacatcgattgcctgaccaaagagatcgatctcttccaagccagaggacctcacttcaacccatcggcaatccacaacttctatgacaatataggtttcgtcggacctgtgcctccaaagcccaaggaccagcgatctattattaagacccctaaaactcaggataccgaggatgatgagggtgcgcagtggaactgtactgcctgcaccttcctgaatcatcctgcccttattcgctgtgagcaatgtgagatgcctagacacttctag

SEQ ID NO: 184440 - DNA, 4058 bp, Artificial Sequence
  derived and/or modified sequence
gaaaatgcttggacagaagagatgagtactatttccactaaggcctagaattgcctactgtacaaatagtcctgatcaggcaatatacgaatggcccaaggaagccaccaaattgattttcaggttttacatgacctgcgacaaaaattccctgaagtacctgaagttgttgtatccaggtgcatgttacagaataataataacctggatgcctgctgtgctgttctctctcaggagagtacaagatatctttatggtgaaggagacttgaatttttcagatgattctggaatttctggtctacgcaatcacatgacttctctcaacttggacttgcaatcacagaacatttaccaccatggaagagaaggaagtaggatgaatggaagtaggactctaacgcacagcattagtgatggacaacttcaaggtggccagtccaatagtgaactatttcagcaggagccacagacagcaccagctcaagttcctcaaggctttaatgtttttggaatgtccagttcctctggtgcttcaaattcagcaccacatcttggatttcacttaggcagcaaaggaacatctagcctttctcaacaaactcccagatttaatcccattatggtaactttagccccaaatatccagactggtcgtaatactcctacatctttgcacatacatggtgtacctccacctgtacttaacagtccacagggaaattctatctatattaggccttacattacaactcctggtggtacaactcgacagacacaacagcattctggctgggtatctcagtttaatcccatgaaccctcagcaagtttatcagccttcacagcctggtccctggactacttgtcctgcatctaatcctctgtcacatacctcatctcaacagccaaatcagcaaggccaccagacctctcatgtctacatgccaatcagttcacctactacttcacaaccaccaaccattcattcatctggtagctcacagtcttctgcccatagccaatataacattcagaatatttcaacaggacctcgaaaaaaccagattgaaatcaaacttgaacccccacaaagaaataattcttcaaaactgcgttcttctggacctcgaacctccagcacttcctcttcagtcaatagccagaccttaaacagaaatcagcccactgtttacatagctgccagccccccaaatacggatgagctgatgtcccgtagtcaacctaaggtctatatttcagcgaatgctgccacaggagatgaacaggtcatgcggaatcagcccacactcttcatatccacaaactctggagcatctgctgcctccaggaacatgtctgggcaagtgagcatgggtcctgcctttattcatcaccatcctcccaaaagtcgagcaataggcaataactctgcaacctctcctcgagtggtagtcactcagcccaatacgaaatacactttcaaaattacagtctctcccaataagccccctgcagtttcaccaggggtggtgtcccctacctttgaacttacaaatcttcttaatcatcctgatcattatgtagaaaccgagaatattcagcacctcacggaccctacattagcacatgtggatagaataagtgaaacacggaaactgagtatgggatctgatgatgctgcctacacacaagctcttttggtacaccagaaggccagaatggaacgacttcaaagagaacttgagattcaaaagaaaaagctggataaattaaaatctgaggttaatgaaatggaaaataatctaactcgaaggcgcctgaaaagatcaaattctatatcccagataccttcccttgaagaaatgcagcagctgagaagttgtaatagacaactccagattgacattgactgcttaaccaaagaaattgatctttttcaagcccgaggaccacattttaaccccagcgctattcataacttttatgacaatattggatttgtaggtcctgtgccaccaaaacccaaagatcaaaggtccatcatcaaaacaccaaagactcaagacacagaagatgatgagggagctcagtggaattgtaccgcctgtacttttttgaaccatccagccttaattcgctgtgaacagtgtgagatgccaaggcatttctgagccaaatggccctgtatcttctctaaaaccacatctaaagttcaagaaactagtctgtcatcgggaaaaagtttcactgctacataggattttgtcaaattgaaggtgtgacaagatggtgttctgctaatgttaaatgtcagcccacagagctaataatacctcagtataatgtcatgagcagttgaaattcatcacatgaaaagtaatctgctgaaagacttggttgcccactgcctaactgtgtacagtgttaccagtgtcccattatggataattctcaatatgttaacacctaggtgttcccaatacctttttcccctcatgtcactactgaattttgacaggaggaaggaatagaatgatagcttgttttatttgtaaagctttcagtgaaacactacatacacgaagaaaaggaacaaggtttaactatttaagaaccatttgctgccgcatagtgccattggatagggaagaacttcagaaatctgtggtactcttggccttgtctttgtcttccctgaacgtgtctccactctgtgaagccagcatctaggggctaaagatgcaaaggaaagcagcatgcattgtctgtacaaatgtgcagcgaaataccccaaagcttttcctactgtacagatctctcgagtctgctttaagtgatttcttttcttcttgattattttcttatatttctatatgtatagtgtaatagccttttgttaactaattttcttttttccttttagtaattaagcacgatcatgtccctttttaagccttacctgagaggaacaatgccttaaaataaaaaagcattaatgagatgaaagtatgcacagaataactttcctctacttattctgtactttgccctcatgagttccaatgttgtgtgaagacaggcagatgctgcacagtgaattgcagatgatattacagaagtgatgtctgtaggtcacattaaatactgacttgagcagtgggtgacacaacacagtgtttgtcttccacagggaagcttaaaacaaaagatatttttaacccactgacagaacaacaaggttaagcttcatctgcttggtgtcccacagaacttgcacaagcagttgttattgggaaagtacagtctcaaaaccagcaacagcagcagtacctacagccctttttttggagagaagtttaaatgctttactgttggggcagtccatttctaatcctgacttggtgacagtatcatgtgtatttataaaacaaggctagccatatttaggacaactgaagaaaagctggaaaaaaaaacaagcaaacttgaacactgaagcaacctcaagcatctctttattttgatgatatatttttgtaaggaaaatattcagatgatcaggaatgtatataactgaaatcaagaaaaagaacagtatgcatttaaaaagacagaattatgaaattatatgagtgcttagaatggggctaagggaagtgctgaaatagagcaaaggatggaagataatatagactaccacccactgtaaatgtttgcaagtggctgtgttttaaatgggattattacagttgatctctatgaatgtcagagccctaactttcaggctttgcattttgtatatgggaagaaatatgacaatcctaggtaattaaaccatagacccaaagcccttacgtttgatgcaatttatttttaaaataggccttgtttttcagcttcatctgcagttctatgtgaagattgataaatcagtttttacttgttttattaataaaacgtaatttggatatcttgagttgatggttttgtgatttagctgggtaaactatctttgtaacagataagttatttataaaaattaaaaaacttatattct

SEQ ID NO: 184441 - DNA, 4553 bp, Artificial Sequence
  derived and/or modified sequence
gaaaagttttaggcagctaggaatgtggagatgtgggtagtggtggctgccaagcacaggaaaatgatcatgctgaactgtacaaaggagattgtctctgaaccttttcataggttctgacactctatatatgtcatcttatttaaaaccctctgtattaaaatgataaggatttggagacattgaaattatatagaatttaaatgtatgcatgttcatatgtttttgcctctggctcatatttccagaatacttaacagtattttaacattttgtttcttatgattctggtcctaaaaaatcaaggacgctgcttactcagaaagctaaaaaacctgagctccagacccagttcctggacctgccctggaaaagaagtatcccgtagagatgagctcactgcagttacttaattaacaatttgtaagctgcaaaaatggcaatgggccaaccaagaacagctacaatttgaatttttctatttccagaaaatgcttggacagaagagatgagtactatttccactaaggcctagaattgcctactgtacaaatagtcctgatcaggcaatatacgaatggcccaaggaagccaccaaattgattttcaggttttacatgacctgcgacaaaaattccctgaagtacctgaagttgttgtatccaggtgcatgttacagaataataataacctggatgcctgctgtgctgttctctctcaggagagtacaagatatctttatggtgaaggagacttgaatttttcagatgattctggaatttctggtctacgcaatcacatgacttctctcaacttggacttgcaatcacagaacatttaccaccatggaagagaaggaagtaggatgaatggaagtaggactctaacgcacagcattagtgatggacaacttcaaggtggccagtccaatagtgaactatttcagcaggagccacagacagcaccagctcaagttcctcaaggctttaatgtttttggaatgtccagttcctctggtgcttcaaattcagcaccacatcttggatttcacttaggcagcaaaggaacatctagcctttctcaacaaactcccagatttaatcccattatggtaactttagccccaaatatccagactggtcgtaatactcctacatctttgcacatacatggtgtacctccacctgtacttaacagtccacagggaaattctatctatattaggccttacattacaactcctggtggtacaactcgacagacacaacagcattctggctgggtatctcagtttaatcccatgaaccctcagcaagtttatcagccttcacagcctggtccctggactacttgtcctgcatctaatcctctgtcacatacctcatctcaacagccaaatcagcaaggccaccagacctctcatgtctacatgccaatcagttcacctactacttcacaaccaccaaccattcattcatctggtagctcacagtcttctgcccatagccaatataacattcagaatatttcaacaggacctcgaaaaaaccagattgaaatcaaacttgaacccccacaaagaaataattcttcaaaactgcgttcttctggacctcgaacctccagcacttcctcttcagtcaatagccagaccttaaacagaaatcagcccactgtttacatagctgccagccccccaaatacggatgagctgatgtcccgtagtcaacctaaggtctatatttcagcgaatgctgccacaggagatgaacaggtcatgcggaatcagcccacactcttcatatccacaaactctggagcatctgctgcctccaggaacatgtctgggcaagtgagcatgggtcctgcctttattcatcaccatcctcccaaaagtcgagcaataggcaataactctgcaacctctcctcgagtggtagtcactcagcccaatacgaaatacactttcaaaattacagtctctcccaataagccccctgcagtttcaccaggggtggtgtcccctacctttgaacttacaaatcttcttaatcatcctgatcattatgtagaaaccgagaatattcagcacctcacggaccctacattagcacatgtggatagaataagtgaaacacggaaactgagtatgggatctgatgatgctgcctacacacaagctcttttggtacaccagaaggccagaatggaacgacttcaaagagaacttgagattcaaaagaaaaagctggataaattaaaatctgaggttaatgaaatggaaaataatctaactcgaaggcgcctgaaaagatcaaattctatatcccagataccttcccttgaagaaatgcagcagctgagaagttgtaatagacaactccagattgacattgactgcttaaccaaagaaattgatctttttcaagcccgaggaccacattttaaccccagcgctattcataacttttatgacaatattggatttgtaggtcctgtgccaccaaaacccaaagatcaaaggtccatcatcaaaacaccaaagactcaagacacagaagatgatgagggagctcagtggaattgtaccgcctgtacttttttgaaccatccagccttaattcgctgtgaacagtgtgagatgccaaggcatttctgagccaaatggccctgtatcttctctaaaaccacatctaaagttcaagaaactagtctgtcatcgggaaaaagtttcactgctacataggattttgtcaaattgaaggtgtgacaagatggtgttctgctaatgttaaatgtcagcccacagagctaataatacctcagtataatgtcatgagcagttgaaattcatcacatgaaaagtaatctgctgaaagacttggttgcccactgcctaactgtgtacagtgttaccagtgtcccattatggataattctcaatatgttaacacctaggtgttcccaatacctttttcccctcatgtcactactgaattttgacaggaggaaggaatagaatgatagcttgttttatttgtaaagctttcagtgaaacactacatacacgaagaaaaggaacaaggtttaactatttaagaaccatttgctgccgcatagtgccattggatagggaagaacttcagaaatctgtggtactcttggccttgtctttgtcttccctgaacgtgtctccactctgtgaagccagcatctaggggctaaagatgcaaaggaaagcagcatgcattgtctgtacaaatgtgcagcgaaataccccaaagcttttcctactgtacagatctctcgagtctgctttaagtgatttcttttcttcttgattattttcttatatttctatatgtatagtgtaatagccttttgttaactaattttcttttttccttttagtaattaagcacgatcatgtccctttttaagccttacctgagaggaacaatgccttaaaataaaaaagcattaatgagatgaaagtatgcacagaataactttcctctacttattctgtactttgccctcatgagttccaatgttgtgtgaagacaggcagatgctgcacagtgaattgcagatgatattacagaagtgatgtctgtaggtcacattaaatactgacttgagcagtgggtgacacaacacagtgtttgtcttccacagggaagcttaaaacaaaagatatttttaacccactgacagaacaacaaggttaagcttcatctgcttggtgtcccacagaacttgcacaagcagttgttattgggaaagtacagtctcaaaaccagcaacagcagcagtacctacagccctttttttggagagaagtttaaatgctttactgttggggcagtccatttctaatcctgacttggtgacagtatcatgtgtatttataaaacaaggctagccatatttaggacaactgaagaaaagctggaaaaaaaaacaagcaaacttgaacactgaagcaacctcaagcatctctttattttgatgatatatttttgtaaggaaaatattcagatgatcaggaatgtatataactgaaatcaagaaaaagaacagtatgcatttaaaaagacagaattatgaaattatatgagtgcttagaatggggctaagggaagtgctgaaatagagcaaaggatggaagataatatagactaccacccactgtaaatgtttgcaagtggctgtgttttaaatgggattattacagttgatctctatgaatgtcagagccctaactttcaggctttgcattttgtatatgggaagaaatatgacaatcctaggtaattaaaccatagacccaaagcccttacgtttgatgcaatttatttttaaaataggccttgtttttcagcttcatctgcagttctatgtgaagattgataaatcagtttttacttgttttattaataaaacgtaatttggatatcttgagttgatggttttgtgatttagctgggtaaactatctttgtaacagataagttatttataaaaattaaaaaacttatattctaatgtgga

SEQ ID NO: 184442 - DNA, 1789 bp, Artificial Sequence
  derived and/or modified sequence
ggaggcgacggtggagacggctgccctagtgggagaggcggcggcggcggcggccgaggaggaggagggggaagcggcggcggcaaaggaaaatgcttggacagaagagatgagtactatttccactaaggcctagaattgcctactgtacaaatagtcctgatcaggcaatatacgaatggcccaaggaagccaccaaattgattttcaggttttacatgacctgcgacaaaaattccctgaagtacctgaagttgttgtatccaggtgcatgttacagaataataataacctggatgcctgctgtgctgttctctctcaggagagtacaagatatctttatggtgaaggagacttgaatttttcagatgattctggaatttctggtctacgcaatcacatgacttctctcaacttggacttgcaatcacagaacatttaccaccatggaagagaaggaagtaggatgaatggaagtaggactctaacgcacagcattagtgatggacaacttcaaggtggccagtccaatagtgaactatttcagcaggagccacagacagcaccagctcaagttcctcaaggctttaatgtttttggaatgtccagttcctctggtgcttcaaattcagcaccacatcttggatttcacttaggcagcaaaggaacatctagcctttctcaacaaactcccagatttaatcccattatggtaactttagccccaaatatccagactggtcgtaatactcctacatctttgcacatacatggtgtacctccacctgtacttaacagtccacagggaaattctatctatattaggccttacattacaactcctggtggtacaactcgacagacacaacagcattctggctgggtatctcagtttaatcccatgaaccctcagcaagtttatcagccttcacagcctggtccctggactacttgtcctgcatctaatcctctgtcacatacctcatctcaacagccaaatcagcaaggccaccagacctctcatgtctacatgccaatcagttcacctactacttcacaaccaccaaccattcattcatctggtagctcacagtcttctgcccatagccaatataacattcagaatatttcaacaggacctcgaaaaaaccagattgaaatcaaacttgaacccccacaaagaaataattcttcaaaactgcgttcttctggacctcgaacctccagcacttcctcttcagtcaatagccagaccttaaacagaaatcagcccactgtttacatagctgccagccccccaaatacggatgagctgatgtcccgtagtcaacctaaggtctatatttcagcgaatgctgccacaggagatgaacaggtcatgcggaatcagcccacactcttcatatccacaaactctggagcatctgctgcctccaggaacatgtctgggcaagtgagcatgggtcctgcctttattcatcaccatcctcccaaaagtcgagcaataggcaataactctgcaacctctcctcgagtggtagtcactcagcccaatacgaaatacactttcaaaattacagtctctcccaataagccccctgcagtttcaccaggggtggtgtcccctacctttgaacttacaaatcttcttaatcatcctgatcattatgtagaaaccgagaatattcagcacctcacggaccctacattagcacatgtggatagaataagtgaaacacggaaactgagtatgggatctgatgatgctgcctacacacaagatatttga

SEQ ID NO: 184443 - DNA, 4380 bp, Artificial Sequence
  derived and/or modified sequence
atcgagcgcctaggagagccccgggtgggggagggcgcaaggggctcgggagggcccctccctgcgtcggcgcccctgacccgcccccaggcatgtgtgaggtgggggcgggggaggaaaaatctccttttggctctagtttactctagtttctcttctgctttcaaggctccagacccagttcctggacctgccctggaaaagaagtatcccgtagagatgagctcactgcagttacttaattaacaatttgtaagctgcaaaaatggcaatgggccaaccaagaacagctacaatttgaatttttctatttccagaaaatgcttggacagaagagatgagtactatttccactaaggcctagaattgcctactgtacaaatagtcctgatcaggcaatatacgaatggcccaaggaagccaccaaattgattttcaggttttacatgacctgcgacaaaaattccctgaagtacctgaagttgttgtatccaggtgcatgttacagaataataataacctggatgcctgctgtgctgttctctctcaggagagtacaagatatctttatggtgaaggagacttgaatttttcagatgattctggaatttctggtctacgcaatcacatgacttctctcaacttggacttgcaatcacagaacatttaccaccatggaagagaaggaagtaggatgaatggaagtaggactctaacgcacagcattagtgatggacaacttcaaggtggccagtccaatagtgaactatttcagcaggagccacagacagcaccagctcaagttcctcaaggctttaatgtttttggaatgtccagttcctctggtgcttcaaattcagcaccacatcttggatttcacttaggcagcaaaggaacatctagcctttctcaacaaactcccagatttaatcccattatggtaactttagccccaaatatccagactggtcgtaatactcctacatctttgcacatacatggtgtacctccacctgtacttaacagtccacagggaaattctatctatattaggccttacattacaactcctggtggtacaactcgacagacacaacagcattctggctgggtatctcagtttaatcccatgaaccctcagcaagtttatcagccttcacagcctggtccctggactacttgtcctgcatctaatcctctgtcacatacctcatctcaacagccaaatcagcaaggccaccagacctctcatgtctacatgccaatcagttcacctactacttcacaaccaccaaccattcattcatctggtagctcacagtcttctgcccatagccaatataacattcagaatatttcaacaggacctcgaaaaaaccagattgaaatcaaacttgaacccccacaaagaaataattcttcaaaactgcgttcttctggacctcgaacctccagcacttcctcttcagtcaatagccagaccttaaacagaaatcagcccactgtttacatagctgccagccccccaaatacggatgagctgatgtcccgtagtcaacctaaggtctatatttcagcgaatgctgccacaggagatgaacaggtcatgcggaatcagcccacactcttcatatccacaaactctggagcatctgctgcctccaggaacatgtctgggcaagtgagcatgggtcctgcctttattcatcaccatcctcccaaaagtcgagcaataggcaataactctgcaacctctcctcgagtggtagtcactcagcccaatacgaaatacactttcaaaattacagtctctcccaataagccccctgcagtttcaccaggggtggtgtcccctacctttgaacttacaaatcttcttaatcatcctgatcattatgtagaaaccgagaatattcagcacctcacggaccctacattagcacatgtggatagaataagtgaaacacggaaactgagtatgggatctgatgatgctgcctacacacaagctcttttggtacaccagaaggccagaatggaacgacttcaaagagaacttgagattcaaaagaaaaagctggataaattaaaatctgaggttaatgaaatggaaaataatctaactcgaaggcgcctgaaaagatcaaattctatatcccagataccttcccttgaagaaatgcagcagctgagaagttgtaatagacaactccagattgacattgactgcttaaccaaagaaattgatctttttcaagcccgaggaccacattttaaccccagcgctattcataacttttatgacaatattggatttgtaggtcctgtgccaccaaaacccaaagatcaaaggtccatcatcaaaacaccaaagactcaagacacagaagatgatgagggagctcagtggaattgtaccgcctgtacttttttgaaccatccagccttaattcgctgtgaacagtgtgagatgccaaggcatttctgagccaaatggccctgtatcttctctaaaaccacatctaaagttcaagaaactagtctgtcatcgggaaaaagtttcactgctacataggattttgtcaaattgaaggtgtgacaagatggtgttctgctaatgttaaatgtcagcccacagagctaataatacctcagtataatgtcatgagcagttgaaattcatcacatgaaaagtaatctgctgaaagacttggttgcccactgcctaactgtgtacagtgttaccagtgtcccattatggataattctcaatatgttaacacctaggtgttcccaatacctttttcccctcatgtcactactgaattttgacaggaggaaggaatagaatgatagcttgttttatttgtaaagctttcagtgaaacactacatacacgaagaaaaggaacaaggtttaactatttaagaaccatttgctgccgcatagtgccattggatagggaagaacttcagaaatctgtggtactcttggccttgtctttgtcttccctgaacgtgtctccactctgtgaagccagcatctaggggctaaagatgcaaaggaaagcagcatgcattgtctgtacaaatgtgcagcgaaataccccaaagcttttcctactgtacagatctctcgagtctgctttaagtgatttcttttcttcttgattattttcttatatttctatatgtatagtgtaatagccttttgttaactaattttcttttttccttttagtaattaagcacgatcatgtccctttttaagccttacctgagaggaacaatgccttaaaataaaaaagcattaatgagatgaaagtatgcacagaataactttcctctacttattctgtactttgccctcatgagttccaatgttgtgtgaagacaggcagatgctgcacagtgaattgcagatgatattacagaagtgatgtctgtaggtcacattaaatactgacttgagcagtgggtgacacaacacagtgtttgtcttccacagggaagcttaaaacaaaagatatttttaacccactgacagaacaacaaggttaagcttcatctgcttggtgtcccacagaacttgcacaagcagttgttattgggaaagtacagtctcaaaaccagcaacagcagcagtacctacagccctttttttggagagaagtttaaatgctttactgttggggcagtccatttctaatcctgacttggtgacagtatcatgtgtatttataaaacaaggctagccatatttaggacaactgaagaaaagctggaaaaaaaaacaagcaaacttgaacactgaagcaacctcaagcatctctttattttgatgatatatttttgtaaggaaaatattcagatgatcaggaatgtatataactgaaatcaagaaaaagaacagtatgcatttaaaaagacagaattatgaaattatatgagtgcttagaatggggctaagggaagtgctgaaatagagcaaaggatggaagataatatagactaccacccactgtaaatgtttgcaagtggctgtgttttaaatgggattattacagttgatctctatgaatgtcagagccctaactttcaggctttgcattttgtatatgggaagaaatatgacaatcctaggtaattaaaccatagacccaaagcccttacgtttgatgcaatttatttttaaaataggccttgtttttcagcttcatctgcagttctatgtgaagattgataaatcagtttttacttgttttattaataaaacgtaatttggatatcttgagttgatggttttgtgatttagctgggtaaactatctttgtaacagataagttatttataaaaattaaaaaacttatattctaatgtg

SEQ ID NO: 184444 - protein, 615 aa, Artificial Sequence
  derived and/or modified sequence
MVSGPLALRWCAWAGRGDMGPDMELPSHSKQLLLQLNQQRTKGFLCDVIIMVENSIFRAHKNVLAASSIYFKSLVLHDNLINLDTDMVSSTVFQQILDFIYTGKLLPSDQPAEPNFSTLLTAASYLQLPELAALCRRKLKRAGKPFGSGRAGSTGMGRPPRSQRLSTASVIQARYQGLVDGRKGAHAPQELPQAKGSDDELFLGGSNQDSVQGLGRAVCPAGGEAGLGGCSSSTNGSSGGCEQELGLDLSKKSPPLPPATPGPHLTPDDAAQLSDSQHGSPPAASAPPVANSASYSELGGTPDEPMDLEGAEDNHLSLLEAPGGQPRKSLRHSTRKKEWGKKEPVAGSPFERREAGPKGPCPGEEGEGVGDRVPNGILASGAGPSGPYGEPPYPCKEEEENGKDASEDSAQSGSEGGSGHASAHYMYRQEGYETVSYGDNLYVCIPCAKGFPSSEQLNAHVETHTEEELFIKEEGAYETGSGGAEEEAEDLSAPSAAYTAEPRPFKCSVCEKTYKDPATLRQHEKTHWLTRPFPCNICGKMFTQRGTMTRHMRSHLGLKPFACDECGMRFTRQYRLTEHMRVHSGEKPYECQLCGGKFTQQRNLISHLRMHTSPS

SEQ ID NO: 184445 - DNA, 1848 bp, Artificial Sequence
  derived and/or modified sequence
atggtgtccggaccacttgccctgaggtggtgcgcttgggctggacgcggcgacatgggaccagatatggagctgccgtcgcactcaaagcaattgctgctgcagttgaatcagcaaaggacaaaaggtttcctgtgcgatgttattatcatggttgagaatagcatctttagggcacacaagaatgtgctggccgcatccagcatttactttaaatctttagtgttgcatgataacctgattaatctggataccgatatggtatcttctacagtgtttcagcagattctagatttcatctacactggcaaattgctccctagtgatcaacccgcggagccgaacttttctaccctgctgaccgccgcgtcatatctccagcttcccgaattggccgcactgtgtaggagaaagctgaagagagcgggcaaaccattcggcagcggtagggccggttccaccggtatgggccgtccacctaggagtcagcgtctctccaccgctagtgtgattcaggcgagataccaggggctggtggatgggcgcaaaggcgcccatgcaccccaggaactcccacaggccaaagggtccgacgatgagctatttttgggtggatccaaccaagactcagtgcaagggcttggtcgtgcagtctgccccgccggaggtgaggctggactgggagggtgctccagctcaaccaatggctcttccggaggctgtgagcaggagctcgggctcgacctgtctaaaaagtcgcccccactgcctccggccactcccgggccgcacctcactcctgatgatgcagctcagctgagtgattctcaacacggctctcctccagccgcttcagcccctcctgtcgctaatagcgcgtcttactcagaactcggtggcacccccgatgaaccgatggatttagaaggcgccgaggacaaccatctgtctctgctcgaagccccagggggccaaccacggaagagtttaaggcacagcacaagaaagaaggaatgggggaaaaaggagccagtggctggttcaccctttgagagacgggaagccggccctaaaggcccttgcccgggagaagagggtgagggcgtcggtgaccgagtaccgaatggtattctggctagcggtgccggcccatcagggccatatggcgaacccccgtacccgtgcaaggaggaggaagagaacggaaaggatgcctcagaagactcagctcaatctggttcagaaggcggctctgggcacgcctcagcgcactacatgtatagacaggaagggtacgagactgtgtcttatggagataacttatatgtgtgtattccatgcgcgaaaggcttcccatcaagtgaacagcttaacgctcatgtagaaacacacacggaggaagaactgttcattaaggaagagggtgcttacgagaccggatccggaggggcagaagaggaggctgaggacttgagcgcgccttctgcagcctatactgccgagccacgccctttcaagtgctcagtgtgtgaaaaaacttataaggaccctgcaaccctgcggcagcacgagaaaacgcattggctaaccaggccgtttccttgcaatatttgtggtaagatgtttactcagcgcggaacaatgacccgacacatgagatctcacctggggctgaaacccttcgcctgcgatgaatgtgggatgcggtttacccgtcaatacagattgaccgaacatatgcgagtccactctggagagaaaccctatgagtgtcagctctgtggaggtaagttcacccagcaacggaacttaatctcccacttgagaatgcatacaagccctagctag

SEQ ID NO: 184446 - DNA, 1848 bp, Artificial Sequence
  derived and/or modified sequence
atggtgagcggcccgcttgctctgcgatggtgcgcttgggcaggacggggagatatgggccctgatatggagctcccatctcattctaaacagctcctactgcagttgaatcagcagaggactaagggattcctgtgtgacgtgatcattatggtcgagaacagtatattccgggcccacaaaaacgtgttagctgcctcaagcatctacttcaagtccctcgtgttgcacgataatcttatcaatctggacacagatatggtgtcatccaccgtgttccagcagatactggacttcatctatacaggtaaactgctccctagcgatcagcccgcagagccaaattttagtacccttttaaccgcagcctcatacctccaactcccagaactggcagccctttgccgacgcaagctgaaacgcgccgggaaaccttttggatccggccgcgctggcagtaccggcatgggccgccccccacgaagtcaacggctctctacggcaagcgtcatccaggccaggtaccagggcctcgtcgatggccgaaaaggggcacacgcaccccaggaactgcctcaggccaaggggtcggacgacgagctgtttctcgggggctctaaccaggattccgtgcagggcctgggaagagctgtttgtcccgccggaggcgaagcaggcttgggggggtgcagctcctcgacaaacggaagtagcgggggttgtgaacaagagttgggcctggatctgtctaagaagtctccccccctccctccagcgacacctgggcctcacctgacccctgacgatgccgcgcaactgtccgatagtcagcacggcagtccccctgccgcttccgcgccacccgttgccaactctgcatcatatagcgagctcggggggacaccagacgaacccatggatttggagggagctgaggacaatcatctgtcactgctcgaagcgccaggtggccagcctcgtaagtctctacgccactcaacccggaagaaggaatggggcaaaaaggaacctgttgccggttctccgtttgagaggagggaggccggacctaaaggcccatgtccaggggaagagggagaaggtgtcggcgaccgggtgccgaacggtattctggctagcggagctgggccttccggaccatacggggagccaccctacccctgcaaagaggaagaagagaatggcaaggacgcctcagaggattccgcacagtctggaagtgagggcggctccgggcacgctagcgcacattacatgtaccggcaagaaggatacgaaaccgtatcctatggagacaacctgtatgtgtgtatcccgtgtgcaaaaggctttccaagttcagagcagctgaacgcacacgtggagactcataccgaagaggagttgttcatcaaagaggagggagcctatgagaccggtagtggaggcgcagaagaagaagcagaagacctctccgcaccgtcggctgcttatactgccgagccgcggcccttcaaatgcagcgtatgtgaaaagacatacaaggatccagccacactccggcagcatgagaaaactcactggctcacacgtccattcccctgtaacatttgcggcaaaatgttcacccagcggggcaccatgacaaggcatatgaggtcccacttgggactgaagccttttgcctgcgatgaatgcggcatgcggttcacgaggcagtatagactgacggaacatatgagagtgcactccggggagaagccttatgaatgccagctttgtgggggcaaattcactcagcaacgtaacctgataagtcatcttaggatgcacacatccccgtcctag

SEQ ID NO: 184447 - DNA, 1848 bp, Artificial Sequence
  derived and/or modified sequence
atggtgtccggacccctggctctccgctggtgtgcctgggccggaaggggagacatgggccccgacatggagcttccatcccactcgaagcaactcctgctccaattaaaccaacaaagaacaaaaggtttcttgtgcgacgtcattattatggtggaaaacagtatcttcagagcccataaaaacgtgctggccgcatccagtatctatttcaagagtctggttttgcatgataaccttatcaacttggatacggatatggtctcttcaactgtgttccagcagattcttgacttcatctatactggcaagttactgcctagcgatcagccagcagagcctaattttagcacattactgaccgcggcgtcatatttacagctccccgaattagcagctctctgtcgtcgcaaactgaaaagggccggcaagcctttcggaagtggtagggccgggagtaccggcatgggccggccgccccgcagccagagactcagcaccgcaagtgtgatccaagctagataccagggtttggtggacggtaggaagggggcacacgctcctcaggaactgccccaggcaaagggctccgatgatgagctcttcttgggcggttccaaccaggattctgtccaggggctaggccgggctgtgtgcccagcgggtggtgaagccggactcgggggctgtagcagttcaacaaatggcagctccggcgggtgcgaacaggaattgggtcttgatctttccaagaagagtccaccattaccgccagctacccccggacctcacctcacaccagatgatgccgctcagctttctgattctcaacacgggagccccccggcggcttctgctccccctgtcgcaaatagtgcaagttacagcgagttgggggggactcctgatgaacccatggacttggaaggtgcagaagataatcatttgtcccttctcgaggctcccgggggacagccccgaaagtccctgcgccactccacacggaagaaggaatggggaaagaaggaacctgtggccggtagtcccttcgagaggcgtgaggccggtcccaaaggaccttgtcccggcgaggaaggggagggggtgggcgatagagtccccaatggcattctagcatcaggcgcaggcccgagcgggccatatggcgaacctccatatccttgtaaggaagaagaagagaacggcaaagacgcatcagaggactccgcccagtcaggctcagagggaggctcaggtcacgcttctgcacactatatgtatagacaggaaggctatgagaccgtgtcttatggagacaatctgtacgtctgcatcccttgcgctaagggcttccccagtagcgagcagctcaacgcccacgtcgaaacccatacagaggaggagctcttcattaaagaagaaggggcatacgagacgggatccggaggagctgaagaagaggccgaagacctgagtgctccttctgccgcctacacagccgaaccccgcccctttaagtgctccgtctgtgaaaaaacatataaagaccccgccacactgcgccagcacgagaagacacactggctgacgaggccatttccatgcaatatttgtgggaaaatgttcacccagaggggcactatgacccgacatatgcgcagccatttgggacttaagccattcgcctgcgatgagtgtgggatgcgcttcacccgccagtatagacttacagaacatatgcgggtgcattctggtgaaaaaccttatgaatgccagctctgtggagggaagtttacacagcaaaggaatttgatctcccacctccgcatgcatacatctccctcttag

SEQ ID NO: 184448 - DNA, 6798 bp, Artificial Sequence
  derived and/or modified sequence
gtgagcggcgctcggggcgcgctaggcggggagccgagccgggctggcggcaggcggacggggcgggcgcgtgcggcgcgagccgggcgctgaggacaagggccgctggtagggccggccggccggcgggcggagcgccgccgccgacgcacacgaggtgaccaggcattgatgcacccccaggaaggccacgcgctcaggagccccccccgccgctggctgctgctcacatggtgtctgggcccttggcactccggtggtgcgcgtgggcagggcgcggggacatggggcccgacatggagctgcccagccactcgaagcagctcctgctgcagctgaaccagcagaggaccaagggcttcctgtgtgacgtcatcatcatggtggagaactccatcttccgggcccacaagaacgtcctagccgccagcagcatctatttcaagtccctggtcctgcacgacaacctcatcaacctggacacagacatggtcagctccacagtgttccagcagatcttggacttcatctacacaggcaagctgctgcccagcgaccagccagccgagcccaacttcagcaccctcctcactgccgccagctacctccagctgcccgagttggcagccctctgccgccgcaaactcaagcgagccggcaagccctttggctctgggagggcggggtccactggcatggggcggcccccccgcagccagcggctgtccacggcctctgtcatccaagctcggtatcaggggctcgtggatgggcgcaagggggcccacgccccccaggagctcccccaagccaaaggctcagacgatgaactctttcttggtggctctaaccaggatagcgtgcaaggtctgggccgggctgtctgcccagctggcggggaggcgggtctggggggctgcagcagcagcaccaacgggagcagcgggggctgcgagcaggagctgggcttggacctgtccaagaaaagcccacccttgccccctgccaccccaggtccccacctcactcccgatgacgcagcccagctgagcgacagccaacatggctcgccccctgcggcctctgctcctcccgttgccaacagtgcctcttattctgagctggggggcacccctgatgagcccatggatctggagggggccgaggacaaccacctgagcctgctggaggcgcctggtgggcagcctcggaagagcctccggcactccactcggaagaaggagtggggcaagaaggagcctgtggctggctccccctttgagcggagagaagcagggcccaagggtccctgcccgggagaggagggtgagggggtcggggacagggttcccaatggcatcctggctagtggggctggccctagcgggccctatggggagcccccctacccctgcaaggaggaggaggagaacggcaaggatgcaagtgaagacagtgcgcagagcgggagcgaggggggcagcggccatgccagcgcccactacatgtaccggcaggagggctacgagacggtgtcctacggggacaacttgtatgtgtgcattccctgcgccaagggcttccccagctctgagcagctcaatgcgcacgtggagactcacacggaggaagagctgttcatcaaggaagagggggcctacgagacaggcagtgggggtgccgaggaggaggccgaggacctgtcagcacccagtgcggcctacacggctgagccccggcccttcaagtgttcggtctgcgagaagacctacaaggacccagccacgctgcggcagcacgagaagacgcactggctgacacggcccttcccctgcaacatctgtggcaaaatgttcacgcagcgcggcaccatgacgcgtcacatgcggagccacctgggcctgaagcccttcgcctgcgatgagtgtggcatgcgcttcacccgtcagtaccgcctcacggagcacatgcgtgtgcactcgggcgagaaaccttacgagtgccagctgtgcgggggcaagttcacccagcagcgcaacctcatcagccacctgcgcatgcacacctccccctcctagaagccaaagacccgcgggcgccctctgccaccttgctccccgggaacccatggaaggagaagcgaggtgatgcagcagcaggggcaagaccctgggtccagtggaggctccgggtggcccctctggcccccactgcccacacccagagctttaatggacagtccgtaccaagcagagccgagaggagggaagccaggggtcccagcccgtctacctccccatcccacccaggcccccagctccccgcgggggccaccgcagggcctgtgggctgggtcacgtgggtctcgctgggacctggtccctttgttgcaggcggcttggagaaagggcagtgggacgctggccacggccagggtggtgtcgggagcaggcctcaccccgctggccgtgtctgtgtgtgtgcacgtgtgcttgtgtctgtgcgggcgcgtgcagccctggttctgcagggaacaggtgctgggggtgcagatccctccctccttgagccagggtggcactgttcactggcgctgggacagtcagggtgaccccaccgcctacctctctacatctaaagagccctctgggcctgtgttgctgttattcctactgatctgttcctctgtttttctttttgatttttgttttttaaaccaaaacagacaatagcttattttctttccgccccctccggggctgagcctgggtctgaagactgaatgtaacaggggccgctggcactcctgcgcgtcccccggctctggcgctgcaggggtgtcggcgcgccacctctccaggccccagaagcccttcttgcccaaaggcttccctggtccctgagccctgcctcggctgcctcaggggagagtgcttttcctgtagtttccaaggaatattctttgtttagaggtacttgttttttattaagagaaaaaccagtgtaacgtttatgtgactgtttgaactggaaggtctggggttccggggggtggggggaggctagactcaatgccggggccgtcggtactcttgttttcatttgtgtgtgcgtgcgtgtgtgtgtgtgtatgtgcgtatgtgtgtgtctatgtgtggtgtgtgccgtatgcatgggcagatgtttcgctttccctccttcctcgctgaacaaggtggagacttctgaccttttgctacctcttgaattcatgacaacgatatgttggtgactggcagtggaagcccttgacactcttgttttccttcgcttagcacctaggaagtcgtgtgcaggagccagcagggcgccaagtggcccagtgcctgcagctcacctgtgggttttccctttgagcctttggccacatccacctcgaggggaccctggcaccccgggcacacaaacctctgtggtataggtgaggggtgtgaggccccagcctggagccaggcactgggtgctgacaggggaaccatgaggagggtggcaggtctttgcagctcccggccagggtgaggcggaagtgagccctcatcctgccactcctatcctccattcctgcaagagttttaagcttgagagagctgaccacagggccccccggggaacagggatggcacttccctgagcagtcctggcccccggccactgtctcggggcccacctctcgcccctcatcttggtaattagccagcctcagatacttctgtgggccctgaagtgggctctcaaggtcagaccaaggttgctgatctcagtcccactgtcttcagccagctgaagctgtggggctgggctggcagcctttattgtcatcttgcttcaccatttttttttctctctcttttcattctattttaagtttagaccaaaaaaatacagagtcatcccctacccccacccctctagagaccctccagctaaaaacagagcctgagttcagggacccaagtggtgagcggcgtcttttgggggtgagggagcttgggtagatgaggctcctggctgagccctccctgtggtgatcccagcctaagatggcccctcttccctcctggtgggagacagaggactggaccctgggtctcaggttccagcaagtcaggctagggacctggggggaggagacccatggacttcacccatactcagtgagggggctcctgccgtcctgacgccaccccgccccatcagcacttaagccacatgacacaaagtctgtaccgcacgggaaatgttcacgcgcctggccgtgtgcatggcctcccgggctgtgggcagccgcatctgtgaggtgactcgtgaaagtaggtgattcctttgcagaacttcagggactgggagcagaggcccctcactcaacgacgtttgtgcgacatagtattgtatccaccttagtattgtatcgagccttttctgtgttttaatgagaaagcagaacactagtttcctatttaagactttaagggtttgtggggcggggcgggattaacacaacatttggctttgttttctttttcctttgatttccacatcaggtgtgtgcgagtgtgtgtgtgtggagatgttaagagcctcacaaggaaactgggttattggaggccaaggcggcttacagttctctgcgttcgtcacttaattcctgaatgtttcagagaaacaggaatcagaaaatagcagatatcatgtaggaaagagaggataaacaaagaaaaaagaaaaaaaaataagctcatacccaaattcacaaagcctattttttaaaccaaagcacattttgaatgagtatggaacctccatgggctcagaaaaaagatgctaatatatttatctcattgtttacataagcttttacagtttcagacctcagcagctgtaaggccagtccagggaaccctcccctgctgctggaaacccttctgagttggccctggagtggctcacgggcagagaagggtagccctggggctgggggagggattggaagcctccctggagtcacctgagccctcgtccccattcccagggcccctccaagcccagctggcaccaaagagcttgggcccgtgctgaccagcccccaaggccctctggccggaccatgctggtcctgaccagctagcctacgcggggatggccgtcagttctggccacaggacccgagtctgggcttgggtccccctgctgctctgcccgtgacccttggggatgggttgatgcgagggtcccactcaagccaaaaagccgggacctttgcgcagctctgtcgactctggtgggtccccactcctggggccccctaaccccaccccaggcagcggaaggggctgactgggtctggtccttaccaacatagacggtgcaaacactcttaacagtgttgtttttgtatcaatatgtttgtgcagtgatgaatgtatttatttctcagacttggggcgagtgagcgggtggcaggccgggctccgccactgcatgctcccgccggaccgagccccagcaagggctcctccaggattgcaaaaaaaaaaggaagagaaaagatgaacctttaagcaaataagaatctcagagactcgcagcatagccatacacctcagcctgtgaaatgaacgatccggaccctcaccaactttccccacctcaggcagccctgtgtgtttaccgttcatcaccactcgggggcaccgggccgcccacccactcccaaaatccgtcagtattcactggacctcaggccctgtgcaggagtgcgatccgggctgggccgctgggcaggctgaccccctgccctcctgcggccatcctgagttggggtgaggcctgggcagccggagggcagggctcagggagcaggaggctgcatccgtccacccccaggcgtgggggacaaaagccaaaggtgccaggccttagagcagacaagggctctcagccctggcatgccccctaaagggaccaaggtcctcctatttcccagaaccccgttggggcagatgttactgaacctgtgaatcagacgccaggagtgagggctggggagggacctaactggagcctcagtctgacattccacgccggggtgggggtgggcatgagcggtgggaactgaggctgcccaggacccccttcctaggatgccccggcttcagtcaccccactttaactttctaccaggaccccctccccctacctcaccttgctatttattgctgtaatttattgacctcaaaaatgctgcataacagacctcactggggcagggaggatccccagggctcccaccctccacttggcgggccccgtggggccaggtgctgaggggagcctctctaccccacccatcactagcttccctctgccctctcccaccccgggggggacccaggttgggcactggctcatttctcgcaaatacctcgaaggggaggggggagggatggggttatagctgttttgtttaattggaactggaagagggatcatgttttgttttatgcccttcccagaaggggggagggacaccgggatcgcactcctgtactggccaccgccgctgtcacttgtcacattgagttcatgtcccttgagagtttgtataaattcaggtcagagctgcagctacacagctgcccagtgtcatagaaaagcaattcaccaacgactgatctctccattcagaagtgtgcagtcttaaatgtacagcgataagaaactgttattttatgatcttttcattaaaagcttgattgaaaa

SEQ ID NO: 184449 - DNA, 4734 bp, Artificial Sequence
  derived and/or modified sequence
ttttaaaaggcagtggtagggtagagggtggcagtggagacagctggagagcactgaggacgcggacccacgggtactgtgtgagctgtgaagcccgcttgggagaccccactgccagccaggtgaccaggcattgatgcacccccaggaaggccacgcgctcaggagccccccccgccgctggctgctgctcacatggtgtctgggcccttggcactccggtggtgcgcgtgggcagggcgcggggacatggggcccgacatggagctgcccagccactcgaagcagctcctgctgcagctgaaccagcagaggaccaagggcttcctgtgtgacgtcatcatcatggtggagaactccatcttccgggcccacaagaacgtcctagccgccagcagcatctatttcaagtccctggtcctgcacgacaacctcatcaacctggacacagacatggtcagctccacagtgttccagcagatcttggacttcatctacacaggcaagctgctgcccagcgaccagccagccgagcccaacttcagcaccctcctcactgccgccagctacctccagctgcccgagttggcagccctctgccgccgcaaactcaagcgagccggcaagccctttggctctgggagggcggggtccactggcatggggcggcccccccgcagccagcggctgtccacggcctctgtcatccaagctcggtatcaggggctcgtggatgggcgcaagggggcccacgccccccaggagctcccccaagccaaaggctcagacgatgaactctttcttggtggctctaaccaggatagcgtgcaaggtctgggccgggctgtctgcccagctggcggggaggcgggtctggggggctgcagcagcagcaccaacgggagcagcgggggctgcgagcaggagctgggcttggacctgtccaagaaaagcccacccttgccccctgccaccccaggtccccacctcactcccgatgacgcagcccagctgagcgacagccaacatggctcgccccctgcggcctctgctcctcccgttgccaacagtgcctcttattctgagctggggggcacccctgatgagcccatggatctggagggggccgaggacaaccacctgagcctgctggaggcgcctggtgggcagcctcggaagagcctccggcactccactcggaagaaggagtggggcaagaaggagcctgtggctggctccccctttgagcggagagaagcagggcccaagggtccctgcccgggagaggagggtgagggggtcggggacagggttcccaatggcatcctggctagtggggctggccctagcgggccctatggggagcccccctacccctgcaaggaggaggaggagaacggcaaggatgcaagtgaagacagtgcgcagagcgggagcgaggggggcagcggccatgccagcgcccactacatgtaccggcaggagggctacgagacggtgtcctacggggacaacttgtatgtgtgcattccctgcgccaagggcttccccagctctgagcagctcaatgcgcacgtggagactcacacggaggaagagctgttcatcaaggaagagggggcctacgagacaggcagtgggggtgccgaggaggaggccgaggacctgtcagcacccagtgcggcctacacggctgagccccggcccttcaagtgttcggtctgcgagaagacctacaaggacccagccacgctgcggcagcacgagaagacgcactggctgacacggcccttcccctgcaacatctgtggcaaaatgttcacgcagcgcggcaccatgacgcgtcacatgcggagccacctgggcctgaagcccttcgcctgcgatgagtgtggcatgcgcttcacccgtcagtaccgcctcacggagcacatgcgtgtgcactcgggcgagaaaccttacgagtgccagctgtgcgggggcaagttcacccagcagcgcaacctcatcagccacctgcgcatgcacacctccccctcctagaagccaaagacccgcgggcgccctctgccaccttgctccccgggaacccatggaaggagaagcgaggtgatgcagcagcaggggcaagaccctgggtccagtggaggctccgggtggcccctctggcccccactgcccacacccagagctttaatggacagtccgtaccaagcagagccgagaggagggaagccaggggtcccagcccgtctacctccccatcccacccaggcccccagctccccgcgggggccaccgcagggcctgtgggctgggtcacgtgggtctcgctgggacctggtccctttgttgcaggcggcttggagaaagggcagtgggacgctggccacggccagggtggtgtcgggagcaggcctcaccccgctggccgtgtctgtgtgtgtgcacgtgtgcttgtgtctgtgcgggcgcgtgcagccctggttctgcagggaacaggtgctgggggtgcagatccctccctccttgagccagggtggcactgttcactggcgctgggacagtcagggtgaccccaccgcctacctctctacatctaaagagccctctgggcctgtgttgctgttattcctactgatctgttcctctgtttttctttttgatttttgttttttaaaccaaaacagacaatagcttattttctttccgccccctccggggctgagcctgggtctgaagactgaatgtaacaggggccgctggcactcctgcgcgtcccccggctctggcgctgcaggggtgtcggcgcgccacctctccaggccccagaagcccttcttgcccaaaggcttccctggtccctgagccctgcctcggctgcctcaggggagagtgcttttcctgtagtttccaaggaatattctttgtttagaggtacttgttttttattaagagaaaaaccagtgtaacgtttatgtgactgtttgaactggaaggtctggggttccggggggtggggggaggctagactcaatgccggggccgtcggtactcttgttttcatttgtgtgtgcgtgcgtgtgtgtgtgtgtatgtgcgtatgtgtgtgtctatgtgtggtgtgtgccgtatgcatgggcagatgtttcgctttccctccttcctcgctgaacaaggtggagacttctgaccttttgctacctcttgaattcatgacaacgatatgttggtgactggcagtggaagcccttgacactcttgttttccttcgcttagcacctaggaagtcgtgtgcaggagccagcagggcgccaagtggcccagtgcctgcagctcacctgtgggttttccctttgagcctttggccacatccacctcgaggggaccctggcaccccgggcacacaaacctctgtggtataggtgaggggtgtgaggccccagcctggagccaggcactgggtgctgacaggggaaccatgaggagggtggcaggtctttgcagctcccggccagggtgaggcggaagtgagccctcatcctgccactcctatcctccattcctgcaagagttttaagcttgagagagctgaccacagggccccccggggaacagggatggcacttccctgagcagtcctggcccccggccactgtctcggggcccacctctcgcccctcatcttggtaattagccagcctcagatacttctgtgggccctgaagtgggctctcaaggtcagaccaaggttgctgatctcagtcccactgtcttcagccagctgaagctgtggggctgggctggcagcctttattgtcatcttgcttcaccatttttttttctctctcttttcattctattttaagtttagaccaaaaaaatacagagtcatcccctacccccacccctctagagaccctccagctaaaaacagagcctgagttcagggacccaagtggtgagcggcgtcttttgggggtgagggagcttgggtagatgaggctcctggctgagccctccctgtggtgatcccagcctaagatggcccctcttccctcctggtgggagacagaggactggaccctgggtctcaggttccagcaagtcaggctagggacctggggggaggagacccatggacttcacccatactcagtgagggggctcctgccgtcctgacgccaccccgccccatcagcacttaagccacatgacacaaagtctgtaccgcacgggaaatgttcacgcgcctggccgtgtgcatggcctcccgggctgtgggcagccgcatctgtgaggtgactcgtgaaagtaggtgattcctttgcagaacttcagggactgggagcagaggcccctcactcaacgacgtttgtgcgacatagtattgtatccaccttagtattgtatcgagccttttctgtgttttaatgagaaagcagaacactagtttcctatttaagactttaagggtttgtggggcggggcgggattaacacaacatttggctttgttttctttttcctttgatttccacatcaggtgtgtgcgagtgtgtgtgtgtggagatgttaagagcctcacaaggaaactgggttattggaggccaaggcggcttacagttctctgcgttcgtcacttaattcctgaatgtttcagagaaacaggaatcagaaaatagcagatatcatgtaggaaagagaggataaacaaagaaaaaagaaaaaaaaa

SEQ ID NO: 184450 - DNA, 6940 bp, Artificial Sequence
  derived and/or modified sequence
ggccaagaattgtgtgtctgccaccagcgccccctggcctaggtggcccctgggtgtccttaatctcctgtgtgtgttagaggggcaggcattgcacccaccgaactccctagacctgttcgctggtccttactcttcctggctgtcagatccaactaccaggctctgtggccacagtctcctgctgggctgcccctggtgccccagccagagacccccaggtgcgtcccttcatcgcccttccctcccttcttcgctgatggctgtctgggtgactgtgttcgtcttctcttccccaggtgaccaggcattgatgcacccccaggaaggccacgcgctcaggagccccccccgccgctggctgctgctcacatggtgtctgggcccttggcactccggtggtgcgcgtgggcagggcgcggggacatggggcccgacatggagctgcccagccactcgaagcagctcctgctgcagctgaaccagcagaggaccaagggcttcctgtgtgacgtcatcatcatggtggagaactccatcttccgggcccacaagaacgtcctagccgccagcagcatctatttcaagtccctggtcctgcacgacaacctcatcaacctggacacagacatggtcagctccacagtgttccagcagatcttggacttcatctacacaggcaagctgctgcccagcgaccagccagccgagcccaacttcagcaccctcctcactgccgccagctacctccagctgcccgagttggcagccctctgccgccgcaaactcaagcgagccggcaagccctttggctctgggagggcggggtccactggcatggggcggcccccccgcagccagcggctgtccacggcctctgtcatccaagctcggtatcaggggctcgtggatgggcgcaagggggcccacgccccccaggagctcccccaagccaaaggctcagacgatgaactctttcttggtggctctaaccaggatagcgtgcaaggtctgggccgggctgtctgcccagctggcggggaggcgggtctggggggctgcagcagcagcaccaacgggagcagcgggggctgcgagcaggagctgggcttggacctgtccaagaaaagcccacccttgccccctgccaccccaggtccccacctcactcccgatgacgcagcccagctgagcgacagccaacatggctcgccccctgcggcctctgctcctcccgttgccaacagtgcctcttattctgagctggggggcacccctgatgagcccatggatctggagggggccgaggacaaccacctgagcctgctggaggcgcctggtgggcagcctcggaagagcctccggcactccactcggaagaaggagtggggcaagaaggagcctgtggctggctccccctttgagcggagagaagcagggcccaagggtccctgcccgggagaggagggtgagggggtcggggacagggttcccaatggcatcctggctagtggggctggccctagcgggccctatggggagcccccctacccctgcaaggaggaggaggagaacggcaaggatgcaagtgaagacagtgcgcagagcgggagcgaggggggcagcggccatgccagcgcccactacatgtaccggcaggagggctacgagacggtgtcctacggggacaacttgtatgtgtgcattccctgcgccaagggcttccccagctctgagcagctcaatgcgcacgtggagactcacacggaggaagagctgttcatcaaggaagagggggcctacgagacaggcagtgggggtgccgaggaggaggccgaggacctgtcagcacccagtgcggcctacacggctgagccccggcccttcaagtgttcggtctgcgagaagacctacaaggacccagccacgctgcggcagcacgagaagacgcactggctgacacggcccttcccctgcaacatctgtggcaaaatgttcacgcagcgcggcaccatgacgcgtcacatgcggagccacctgggcctgaagcccttcgcctgcgatgagtgtggcatgcgcttcacccgtcagtaccgcctcacggagcacatgcgtgtgcactcgggcgagaaaccttacgagtgccagctgtgcgggggcaagttcacccagcagcgcaacctcatcagccacctgcgcatgcacacctccccctcctagaagccaaagacccgcgggcgccctctgccaccttgctccccgggaacccatggaaggagaagcgaggtgatgcagcagcaggggcaagaccctgggtccagtggaggctccgggtggcccctctggcccccactgcccacacccagagctttaatggacagtccgtaccaagcagagccgagaggagggaagccaggggtcccagcccgtctacctccccatcccacccaggcccccagctccccgcgggggccaccgcagggcctgtgggctgggtcacgtgggtctcgctgggacctggtccctttgttgcaggcggcttggagaaagggcagtgggacgctggccacggccagggtggtgtcgggagcaggcctcaccccgctggccgtgtctgtgtgtgtgcacgtgtgcttgtgtctgtgcgggcgcgtgcagccctggttctgcagggaacaggtgctgggggtgcagatccctccctccttgagccagggtggcactgttcactggcgctgggacagtcagggtgaccccaccgcctacctctctacatctaaagagccctctgggcctgtgttgctgttattcctactgatctgttcctctgtttttctttttgatttttgttttttaaaccaaaacagacaatagcttattttctttccgccccctccggggctgagcctgggtctgaagactgaatgtaacaggggccgctggcactcctgcgcgtcccccggctctggcgctgcaggggtgtcggcgcgccacctctccaggccccagaagcccttcttgcccaaaggcttccctggtccctgagccctgcctcggctgcctcaggggagagtgcttttcctgtagtttccaaggaatattctttgtttagaggtacttgttttttattaagagaaaaaccagtgtaacgtttatgtgactgtttgaactggaaggtctggggttccggggggtggggggaggctagactcaatgccggggccgtcggtactcttgttttcatttgtgtgtgcgtgcgtgtgtgtgtgtgtatgtgcgtatgtgtgtgtctatgtgtggtgtgtgccgtatgcatgggcagatgtttcgctttccctccttcctcgctgaacaaggtggagacttctgaccttttgctacctcttgaattcatgacaacgatatgttggtgactggcagtggaagcccttgacactcttgttttccttcgcttagcacctaggaagtcgtgtgcaggagccagcagggcgccaagtggcccagtgcctgcagctcacctgtgggttttccctttgagcctttggccacatccacctcgaggggaccctggcaccccgggcacacaaacctctgtggtataggtgaggggtgtgaggccccagcctggagccaggcactgggtgctgacaggggaaccatgaggagggtggcaggtctttgcagctcccggccagggtgaggcggaagtgagccctcatcctgccactcctatcctccattcctgcaagagttttaagcttgagagagctgaccacagggccccccggggaacagggatggcacttccctgagcagtcctggcccccggccactgtctcggggcccacctctcgcccctcatcttggtaattagccagcctcagatacttctgtgggccctgaagtgggctctcaaggtcagaccaaggttgctgatctcagtcccactgtcttcagccagctgaagctgtggggctgggctggcagcctttattgtcatcttgcttcaccatttttttttctctctcttttcattctattttaagtttagaccaaaaaaatacagagtcatcccctacccccacccctctagagaccctccagctaaaaacagagcctgagttcagggacccaagtggtgagcggcgtcttttgggggtgagggagcttgggtagatgaggctcctggctgagccctccctgtggtgatcccagcctaagatggcccctcttccctcctggtgggagacagaggactggaccctgggtctcaggttccagcaagtcaggctagggacctggggggaggagacccatggacttcacccatactcagtgagggggctcctgccgtcctgacgccaccccgccccatcagcacttaagccacatgacacaaagtctgtaccgcacgggaaatgttcacgcgcctggccgtgtgcatggcctcccgggctgtgggcagccgcatctgtgaggtgactcgtgaaagtaggtgattcctttgcagaacttcagggactgggagcagaggcccctcactcaacgacgtttgtgcgacatagtattgtatccaccttagtattgtatcgagccttttctgtgttttaatgagaaagcagaacactagtttcctatttaagactttaagggtttgtggggcggggcgggattaacacaacatttggctttgttttctttttcctttgatttccacatcaggtgtgtgcgagtgtgtgtgtgtggagatgttaagagcctcacaaggaaactgggttattggaggccaaggcggcttacagttctctgcgttcgtcacttaattcctgaatgtttcagagaaacaggaatcagaaaatagcagatatcatgtaggaaagagaggataaacaaagaaaaaagaaaaaaaaataagctcatacccaaattcacaaagcctattttttaaaccaaagcacattttgaatgagtatggaacctccatgggctcagaaaaaagatgctaatatatttatctcattgtttacataagcttttacagtttcagacctcagcagctgtaaggccagtccagggaaccctcccctgctgctggaaacccttctgagttggccctggagtggctcacgggcagagaagggtagccctggggctgggggagggattggaagcctccctggagtcacctgagccctcgtccccattcccagggcccctccaagcccagctggcaccaaagagcttgggcccgtgctgaccagcccccaaggccctctggccggaccatgctggtcctgaccagctagcctacgcggggatggccgtcagttctggccacaggacccgagtctgggcttgggtccccctgctgctctgcccgtgacccttggggatgggttgatgcgagggtcccactcaagccaaaaagccgggacctttgcgcagctctgtcgactctggtgggtccccactcctggggccccctaaccccaccccaggcagcggaaggggctgactgggtctggtccttaccaacatagacggtgcaaacactcttaacagtgttgtttttgtatcaatatgtttgtgcagtgatgaatgtatttatttctcagacttggggcgagtgagcgggtggcaggccgggctccgccactgcatgctcccgccggaccgagccccagcaagggctcctccaggattgcaaaaaaaaaaggaagagaaaagatgaacctttaagcaaataagaatctcagagactcgcagcatagccatacacctcagcctgtgaaatgaacgatccggaccctcaccaactttccccacctcaggcagccctgtgtgtttaccgttcatcaccactcgggggcaccgggccgcccacccactcccaaaatccgtcagtattcactggacctcaggccctgtgcaggagtgcgatccgggctgggccgctgggcaggctgaccccctgccctcctgcggccatcctgagttggggtgaggcctgggcagccggagggcagggctcagggagcaggaggctgcatccgtccacccccaggcgtgggggacaaaagccaaaggtgccaggccttagagcagacaagggctctcagccctggcatgccccctaaagggaccaaggtcctcctatttcccagaaccccgttggggcagatgttactgaacctgtgaatcagacgccaggagtgagggctggggagggacctaactggagcctcagtctgacattccacgccggggtgggggtgggcatgagcggtgggaactgaggctgcccaggacccccttcctaggatgccccggcttcagtcaccccactttaactttctaccaggaccccctccccctacctcaccttgctatttattgctgtaatttattgacctcaaaaatgctgcataacagacctcactggggcagggaggatccccagggctcccaccctccacttggcgggccccgtggggccaggtgctgaggggagcctctctaccccacccatcactagcttccctctgccctctcccaccccgggggggacccaggttgggcactggctcatttctcgcaaatacctcgaaggggaggggggagggatggggttatagctgttttgtttaattggaactggaagagggatcatgttttgttttatgcccttcccagaaggggggagggacaccgggatcgcactcctgtactggccaccgccgctgtcacttgtcacattgagttcatgtcccttgagagtttgtataaattcaggtcagagctgcagctacacagctgcccagtgtcatagaaaagcaattcaccaacgactgatctctccattcagaagtgtgcagtcttaaatgtacagcgataagaaactgttattttatgatcttttcattaaaagcttgattgaaaa

SEQ ID NO: 184451 - DNA, 1848 bp, Artificial Sequence
  derived and/or modified sequence
atggtgtctggccccctggccctgcgctggtgtgcctgggccggccgcggggacatgggccctgacatggagctgcccagccacagcaagcagctgctgctgcagctgaaccagcagaggaccaagggcttcctgtgtgatgtgatcatcatggtggagaacagcatcttccgggcccacaagaatgtgctggccgccagcagcatctacttcaagagcctggtgctgcatgacaacctgatcaacctggacacagacatggtgagcagcacagtgttccagcagatcctggacttcatctacaccgggaagctgctgcccagcgaccagcctgctgagcccaacttcagcaccctgctgacagctgccagctacctgcagctgcctgagctggccgccctgtgcaggaggaagctgaagagagctgggaagcccttcggcagcggccgggccggcagcacaggcatgggccggcccccaagaagccagaggctgagcacagccagcgtcatccaggcccgctaccagggcctggtggatggcaggaaaggagcccacgccccccaggagctgccccaggccaagggcagtgatgatgagctgttcctgggcggcagcaaccaggacagcgtgcagggcctgggccgggctgtgtgcccagctggaggagaggccggcctgggcggctgcagcagcagcaccaacggcagcagcggcggctgtgagcaggagctgggcctggacctgagcaagaagagcccccccctgcccccagccaccccaggcccccacctgaccccagatgatgctgcccagctgagtgacagccagcacggcagccccccagctgccagcgcccctcctgtggccaacagcgccagctacagcgagctgggcggcaccccagatgagcccatggacctggagggcgctgaggacaaccacctgagcctgctggaggcccctgggggccagcccaggaagagcctgcggcacagcaccaggaagaaggagtggggcaagaaggagcctgtggccggcagcccctttgagcggcgggaggccggccccaagggcccctgccctggagaggagggggagggcgtgggggacagagtgcccaacggcatcctggccagcggggccggccccagcggcccctacggggagcccccctacccctgcaaggaggaggaggagaatggcaaggatgcctctgaagattctgcccagagcggcagcgagggcggcagcggccacgccagcgcccactacatgtaccggcaggagggctatgagaccgtgtcctatggagacaacctgtatgtgtgcatcccctgtgccaagggcttccccagcagcgagcagctgaatgcccacgtggagacccacacagaggaggagctgttcatcaaggaggagggcgcctatgaaacaggcagcggcggcgctgaggaggaggccgaggacctgagcgcccccagcgctgcctacacagctgagccccggcccttcaagtgcagcgtgtgtgagaagacctacaaggaccctgccaccctgcggcagcacgagaagacccactggctgacccggcccttcccctgcaacatctgtgggaagatgttcacccagaggggcaccatgaccaggcacatgaggagccacctgggcctgaagccctttgcctgtgatgaatgtggcatgaggttcacccggcagtaccgcctgacagagcacatgagggtgcacagcggggagaagccctatgagtgccagctgtgtggcggcaagttcacccagcagaggaacctgatcagccacctgaggatgcacaccagccccagctag

SEQ ID NO: 184452 - DNA, 1848 bp, Artificial Sequence
  derived and/or modified sequence
atggtgagcggccccctggccctgcggtggtgcgcctgggccggcagaggcgacatgggtcccgatatggaacttccatcccattcaaagcagctgctgctgcagctgaatcagcaaaggactaagggctttttgtgcgatgtgatcataatggtggaaaactcgatttttcgcgcccacaagaatgtgttggctgcgtcctcaatctattttaagtccttggtcctgcacgacaatctgattaacctggataccgacatggtctcgtctacagtgttccagcaaatcttagacttcatctatacaggcaaactgctgccgagtgatcaacctgctgaaccaaatttctccacactactgacggcggccagctacttgcagttgccagagcttgctgccctctgccggcggaagctgaagagagccgggaagcctttcggctccggccgggcaggcagcacaggcatgggcagaccccctaggagccagcgcctgtcaactgcaagcgtgatccaggcacgctaccagggcctggtggacggcaggaaaggagctcacgccccgcaagaattgcctcaagcaaaggggtctgacgacgaactttttctgggcggtagcaaccaagattccgtccagggcctgggccgggccgtgtgtcctgccggcggagaggcaggcttgggggggtgtagctcttccacaaacgggtcgagcggagggtgcgaacaggaactcggcctagatctgtctaagaaatccccccctctgccaccagctactcctgggcctcaccttacccccgatgatgctgctcagctctcagacagtcagcacggatcccccccagccgcttccgcacctcctgtggccaacagtgccagctactcagagttggggggaacccctgatgagccaatggacctcgagggggctgaggataaccacttatcgctgcttgaggcgccgggcggtcaaccccgaaaaagtctgaggcactccacaagaaagaaagagtggggaaagaaggagccagttgctgggagtccattcgaaagaagggaggctggcccaaaaggtccctgccccggcgaggagggcgaaggcgtcggagatagggtgccaaacgggattttggcctccggcgccggcccctctggaccgtacggggaacctccctatccctgcaaggaggaggaggagaatggaaaagacgcgtctgaagacagcgcacaatccggctcagagggaggttcaggacatgcatcagctcactatatgtacagacaggaggggtacgaaaccgttagttacggcgataacctgtatgtatgcattccatgcgcgaaaggttttccgtcctccgaacagcttaacgcacacgtcgagacacatacggaggaagagttatttatcaaggaggaaggagcctatgaaaccggatcaggaggagccgaggaagaagctgaagacttgtcagcgccctccgctgcctacaccgcagaacccaggcctttcaagtgttctgtttgcgagaaaacatacaaagaccccgcgacactgcgccagcacgaaaagacccactggctgacccggccgttcccctgcaatatttgtgggaagatgttcacccagaggggtactatgacccggcatatgcgctcccacctgggactgaaacctttcgcctgcgatgagtgtgggatgcggtttacccggcagtacaggctgaccgagcacatgagagtccatagtggagagaagccatatgaatgccagctttgtggcgggaaatttacgcagcagagaaacctcatttcccatttgagaatgcacacatccccaagttag

SEQ ID NO: 184453 - DNA, 1848 bp, Artificial Sequence
  derived and/or modified sequence
atggtgagcggccccctggccctgcggtggtgcgcctgggccggcagaggtgacatgggtcccgacatggagttgccgtctcacagtaagcagctgctgctgcaattaaaccagcaaaggaccaaaggcttcttgtgtgatgtcatcatcatggtcgaaaatagcattttccgagcccataaaaatgtgctggcagcctcatctatctactttaaaagtctcgttctgcacgataatctgatcaacctcgacaccgatatggtcagcagcaccgtgtttcagcagatactggattttatttacacagggaagctactgcctagcgatcagcctgctgaaccaaacttttctaccctgctcaccgccgctagttacctacagctccctgagctggctgccctgtgccgccggaagctaaaaagggcaggtaagccctttggctctggcagagccggaagtaccggcatgggtagacctccgcgcagtcagcggctgagtaccgcctctgtaattcaagccagataccagggcctggtggacggccgcaaaggggcacacgctccgcaagagctgccgcaggctaagggctctgatgacgaacttttccttggagggagtaaccaagattccgtccagggactgggaagagccgtctgtcccgccgggggggaggccggcctgggcggctgttccagtagcaccaacggttccagcggtgggtgtgaacaagagttgggcctggacctgtctaagaagtctccgccactgcctcccgctacccctggaccgcacctgacgcccgatgacgccgcccagctctcagactcgcaacacggtagcccccctgctgcttccgccccacccgtggctaattccgcatcttatagcgaactgggtgggacaccagacgagccgatggatttagaaggagctgaggataaccacctgagcttgcttgaggcacctggaggtcaaccgaggaaatcactgcggcactccacacggaaaaaggaatggggcaaaaaagagcccgtcgcaggaagccctttcgagcggcgtgaggcaggcccaaaaggaccatgtcccggagaagagggcgaaggcgttggagatcgtgtaccaaacggaattctcgcatccggtgcagggcctagtgggccctatggggagcctccttacccatgcaaagaggaagaggagaacgggaaggacgctagcgaggacagcgcccaatccggcagcgagggtgggtcaggtcatgcatctgcacattacatgtatcggcaggaagggtatgagacagtgtcatacggagacaacctgtacgtgtgcatcccctgcgcgaaaggcttcccttcctctgaacagctgaacgcacacgtggagacccacaccgaggaagaactgttcattaaggaggaaggagcctacgaaacgggatccggcggagcagaggaggaggctgaagatctcagtgcgccatccgcagcttacactgccgaaccccggcctttcaaatgtagcgtctgcgagaaaacgtacaaagaccctgccaccctaaggcagcacgagaagacccactggctcaccaggccatttccctgcaatatatgtggcaagatgtttacgcaacgcggtactatgacacgtcatatgagatctcaccttggactcaagcccttcgcttgcgacgaatgtggaatgcgctttacaaggcagtataggctcaccgaacacatgcgcgttcactctggagaaaagccttatgagtgccagctgtgtgggggcaaatttacacagcagcggaatctgatcagccacctgcgcatgcatacgtccccatcatag

SEQ ID NO: 184454 - DNA, 1848 bp, Artificial Sequence
  derived and/or modified sequence
atggtgagcggccccctggccctgcggtggtgcgcctgggccggcagaggtgatatgggccccgacatggagttacctagccactcgaaacagctgctgctgcagctaaaccaacaaaggactaagggattcctatgcgacgttattattatggttgagaatagtattttccgagcgcataaaaacgtccttgctgcaagcagcatctactttaagagcctggtactccatgataatcttatcaacctcgacacggatatggtgtcatcaacagttttccagcagattctagacttcatctacacaggcaagttgctaccttccgatcaaccagcagaaccaaacttttccacccttctgaccgcagcgagttaccttcagctccccgagctcgcggcattgtgccgtagaaaactgaaacgcgccggcaaacccttcggcagcgggcgcgcagggtctaccggcatgggacgacccccccgatctcaacgcctgtcaactgctagtgttattcaggcgaggtatcagggactcgtagacggtcggaagggagctcatgccccacaagagttgccacaagcaaagggtagcgacgacgaactctttctcggcggctcaaatcaggactctgttcagggacttggcagagccgtttgtcccgcaggaggtgaggccggcctcgggggctgctccagctccacgaatggctcctctggtggctgcgaacaggaactggggttggatctgagcaagaagtcaccacctttacccccagctaccccaggtccacatctgactccagatgatgcagctcagctctccgactctcaacatggaagcccccctgccgcaagcgccccacccgtggctaattcagcttcctactctgaacttggaggcacaccagacgaaccaatggatctcgaaggggccgaagataatcacctcagcttgcttgaggccccagggggacagcctcggaaatcactaaggcacagcacccgcaagaaagagtggggaaagaaagagccggtggctggcagtccgtttgagcgaagggaggccggccccaagggcccttgtccgggagaagaaggcgagggggttggagatcgggtgccaaacggcattctggcatccggcgcaggcccatctggcccatacggcgagcctccttatccttgtaaggaggaggaggaaaacggtaaagatgcctctgaggacagtgcgcaaagtgggagcgaaggtggctccggccacgcctcagcacattatatgtaccggcaggagggctacgaaacagtgtcttacggggacaacctgtacgtatgcatcccctgtgcaaagggttttccctccagtgaacagctgaatgcccacgtcgagacccacacagaggaggagctttttatcaaggaagagggggcttacgaaacaggatcagggggggctgaagaagaagccgaagatctgagcgccccctccgccgcctataccgctgaacctcgtccttttaagtgttcagtgtgcgagaagacgtacaaagaccccgccacacttcgtcagcacgaaaaaactcactggcttaccagaccttttccttgtaacatttgtgggaaaatgttcacccaaagaggaacaatgacaagacatatgagatctcaccttggcttgaagccttttgcctgtgacgagtgtggtatgagattcacccgacaatataggttaacagagcacatgcgagtgcatagcggagagaagccttatgaatgtcagctctgtggcgggaagttcacccagcaacggaacctcatctcacacctccgaatgcacacctcaccatcctag

SEQ ID NO: 184455 - DNA, 1848 bp, Artificial Sequence
  derived and/or modified sequence
atggtgtcaggtccactagcacttcggtggtgtgcctgggcaggcaggggcgatatggggccagatatggagctgcctagccacagcaagcagcttctcctgcaactgaatcagcaaagaacgaaaggtttcctctgtgatgtaattattatggttgaaaatagcatttttcgggcacacaaaaacgtgctggcggcatcatcaatctactttaagtcattggtgctgcatgacaacctgatcaatctggatacagacatggtgtcttcaaccgtcttccagcaaatattggattttatctatacgggtaagctgctcccttccgatcagcctgctgagcccaatttctccacactgttgacagctgcaagttaccttcagctccccgagcttgcagccctgtgtcgaaggaaactcaagcgcgcagggaaaccttttggctctggaagagccggatcaaccggaatgggcaggccccctcggagccaaagactgtcgactgccagcgtgattcaggccaggtaccagggccttgtggatgggcgtaagggcgcacatgccccacaggaactcccccaggctaaagggtccgatgacgagctctttctcgggggtagcaaccaggatagcgtgcaaggccttgggagagccgtctgccctgctgggggagaagctggattgggagggtgcagcagctctactaatgggtcctctgggggatgcgagcaggaactgggactggacctctctaaaaagtccccaccactgcctccagcaaccccagggcctcacttgacacctgacgatgctgcccagctgagcgattctcagcatggatcgccacccgcagctagcgcgccacctgtcgccaatagcgcaagctacagcgagctgggcggtaccccagacgagcccatggatcttgagggggcagaggacaatcatctgagcctcctggaagcgcctggtggtcagcccagaaaatccctccgccacagcacccgcaaaaaagagtgggggaagaaagaacctgtcgccggaagcccattcgagagacgcgaagccggacccaagggaccatgtcctggagaggaaggagaaggagttggagatcgggtgcccaacggaatcctggctagcggcgctggcccatcaggcccttacggcgaacccccttatccctgtaaggaagaggaggagaacgggaaggacgccagcgaggacagcgcccagtcagggagcgagggcggtagtggccatgcctccgcacattacatgtaccggcaggaggggtacgaaacagtatcttatggggataatctgtacgtgtgcatcccatgtgcaaaaggcttcccctcgtcagagcaattaaatgctcatgtggaaacccacactgaggaggagctgttcatcaaggaggaaggagcttatgagaccggctcagggggagcagaagaggaggccgaggacctctcagctcctagcgctgcttacacagctgaacccaggcccttcaagtgtagcgtttgcgaaaagacctacaaagaccctgcgacgctccggcagcacgaaaaaacccactggctgactcggccattcccgtgcaatatttgcggaaagatgttcacgcagagaggcacgatgaccagacacatgaggagccatttgggcttaaaacccttcgcatgtgatgagtgcggtatgaggttcaccagacagtaccgacttaccgaacatatgcgggtccatagcggggagaagccctatgagtgccagctttgtggcggtaagtttacccagcagcgaaatcttatatcacatctgaggatgcacacctctccttcttag

SEQ ID NO: 184456 - DNA, 1848 bp, Artificial Sequence
  derived and/or modified sequence
atggtatccggtcccctcgctttgcggtggtgtgcctgggccggaagaggtgacatgggaccagacatggagctgcctagccactctaagcagctgctgcttcagttgaatcagcagcggaccaaggggtttctttgtgacgtcatcatcatggttgagaactccatcttcagggcccataagaacgtgcttgccgcttcttccatttacttcaaatccctcgtgttgcatgacaatttgattaaccttgacaccgatatggtgagcagcacagtcttccagcagatcctggatttcatctataccggcaagcttctcccaagtgaccagccagccgagccaaatttctctactctgttaacagccgcttcttacctgcagctaccagagctcgctgcactgtgcaggcggaaactgaagcgagccggaaagcccttcggaagcggaagagccggaagtactgggatggggcgacctcccaggtcccagaggctaagcaccgcgagcgtcatccaggctaggtatcagggtctggttgatgggagaaagggagctcatgcccctcaggaactgcctcaggcaaaaggctcagacgacgaactttttctgggcggtagcaatcaggacagcgtgcaaggtctgggacgcgctgtgtgtcctgctgggggagaggccggactgggaggctgcagctcttcaaccaacgggagctctggagggtgtgaacaggagttggggctcgatctgtcaaagaaatcacctcccctgccacctgctactccaggtccccacttgaccccagacgatgccgctcaactcagcgatagtcagcatggatcccccccagccgcttcagcccctccagttgctaatagcgcttcttatagcgaactgggtggcacaccagatgagcctatggatcttgaaggggcagaagacaaccacctctctcttcttgaggccccaggcggtcagccacgtaagagtttgcgtcattccacaaggaagaaggagtggggcaagaaagaaccggttgccggttccccttttgagcgcagagaggcaggccctaagggcccatgcccaggggaggagggagaaggggtaggtgaccgcgtccctaatggaatcttagcgagcggggctggacctagcggtccttatggggagcctccctacccctgcaaagaagaggaggagaatggcaaggacgcttcagaggatagtgctcagagtggcagtgaggggggatctgggcatgcaagcgcccactacatgtataggcaggagggctatgagaccgtcagctacggggacaatctttatgtctgcatcccctgtgcgaaaggcttcccgtcatctgaacagttgaatgcacacgtggagacccatacagaagaagagctgttcatcaaggaagagggagcctatgagaccgggagcggtggcgctgaggaggaggctgaggatctgtccgccccttccgccgcatacactgcagagcctaggcccttcaagtgttcagtttgtgaaaagacatacaaggatcctgcgactctgagacaacacgaaaagacgcattggttaacccggcctttcccctgcaacatttgtgggaaaatgttcacccaacgtgggacaatgactcggcacatgcgcagccacctggggctgaagccctttgcttgcgatgaatgcggtatgcggtttaccaggcagtaccggcttacagaacacatgagggtccactccggggagaagccctatgagtgccagctctgcggtggtaaattcacccaacagcggaatctaatttcccacttgcgaatgcacactagcccgtcttag

SEQ ID NO: 184457 - DNA, 1848 bp, Artificial Sequence
  derived and/or modified sequence
atggtgagtggcccattggccctgagatggtgtgcatgggccggtaggggcgacatgggacctgacatggagctcccctcccacagcaagcagctgcttctccagctgaatcagcagcggacaaaggggttcctttgtgatgttatcatcatggtcgaaaatagcattttccgtgcccataaaaatgtgctggcagcttctagcatctattttaaatccctcgtgctgcacgacaacttgatcaacctggacactgatatggtctcatcaactgtgtttcagcagatactggactttatctataccggaaaactcctgccttcagaccagcctgccgagcccaacttctcaacccttctcactgctgcatcttacctccagcttcctgagctcgctgctttatgcagaaggaagctaaagagagcgggtaaaccatttggcagcggcagagccggtagcaccgggatgggtcgccctcccaggtcccagcggctctccaccgcttctgtgatacaggctcgataccaaggcttagtcgacgggaggaagggggctcatgctccacaggagctgccccaggctaaagggagtgatgatgagctgttccttgggggatcaaatcaagacagcgtccagggcttagggagggctgtatgtccagccggaggtgaagccggtctgggcggatgttcttccagtaccaacggtagctcagggggatgtgagcaggaattagggctggatctgagtaagaagtcccctccactgcccccagctactcccggacctcacctgacccctgatgacgccgctcagctgtcagattcccagcatgggtcccctcctgctgcctctgctccccctgttgctaattccgcttcttacagcgaactggggggaacacccgatgaaccaatggatctggaaggggcagaagataaccatctttcactcctcgaggctccaggaggtcagcctagaaagtctctccgccatagtactaggaagaaagaatggggcaagaaggagccggtggccggatcgccctttgagagacgcgaagcaggcccaaaagggccatgcccgggagaggaaggggagggggttggcgatcgcgttcctaacgggatcctggcctcaggtgctgggccttccggcccatatggagagccaccctatccttgtaaagaggaggaggagaatggcaaggatgcctcagaggactcggcccagtcaggtagcgaggggggttcagggcatgcgtcagcacactacatgtatcggcaggaggggtacgagactgtatcttacggagacaatttgtacgtctgcattccctgtgctaaagggttcccctcctctgagcagctgaacgcccacgtggaaacacacacagaagaagagctgtttattaaagaagagggtgcttacgagacaggctcaggcggtgcagaagaggaggctgaagatctctctgcccctagcgctgcctacaccgccgagccacgaccttttaagtgcagcgtctgtgagaaaacatataaggacccggctactctccggcagcatgagaagactcactggctcacaagaccttttccatgcaatatctgcgggaaaatgttcacccagaggggaaccatgaccagacacatgagaagtcaccttggcttaaagcccttcgcatgtgatgagtgtggcatgagatttacaagacagtaccggctgacagagcacatgagggtccactccggagagaaaccatacgaatgtcaattatgcggagggaaatttacacaacagcgcaatctaattagccacctcagaatgcacacatcacccagctag

SEQ ID NO: 184458 - DNA, 1848 bp, Artificial Sequence
  derived and/or modified sequence
atggtgagcggccccctggccctgagatggtgcgcctgggccggcagaggcgacatgggccccgacatggagctgcccagccacagcaagcagctgctgctgcagctgaaccagcagagaaccaagggcttcctgtgcgacgtgatcatcatggtggagaacagcatcttcagagcccacaagaacgtgctggccgccagcagcatctacttcaagagcctggtgctgcacgacaacctgatcaacctggacaccgacatggtgagcagcaccgtgttccagcagatcctggacttcatctacaccggcaagctgctgcccagcgaccagcccgccgagcccaacttcagcaccctgctgaccgccgccagctacctgcagctgcccgagctggccgccctgtgcagaagaaagctgaagagagccggcaagcccttcggcagcggcagagccggcagcaccggcatgggcagaccccccagaagccagagactgagcaccgccagcgtgatccaggccagataccagggcctggtggacggcagaaagggcgcccacgccccccaggagctgccccaggccaagggcagcgacgacgagctgttcctgggcggcagcaaccaggacagcgtgcagggcctgggcagagccgtgtgccccgccggcggcgaggccggcctgggcggctgcagcagcagcaccaacggcagcagcggcggctgcgagcaggagctgggcctggacctgagcaagaagagcccccccctgccccccgccacccccggcccccacctgacccccgacgacgccgcccagctgagcgacagccagcacggcagcccccccgccgccagcgccccccccgtggccaacagcgccagctacagcgagctgggcggcacccccgacgagcccatggacctggagggcgccgaggacaaccacctgagcctgctggaggcccccggcggccagcccagaaagagcctgagacacagcaccagaaagaaggagtggggcaagaaggagcccgtggccggcagccccttcgagagaagagaggccggccccaagggcccctgccccggcgaggagggcgagggcgtgggcgacagagtgcccaacggcatcctggccagcggcgccggccccagcggcccctacggcgagcccccctacccctgcaaggaggaggaggagaacggcaaggacgccagcgaggacagcgcccagagcggcagcgagggcggcagcggccacgccagcgcccactacatgtacagacaggagggctacgagaccgtgagctacggcgacaacctgtacgtgtgcatcccctgcgccaagggcttccccagcagcgagcagctgaacgcccacgtggagacccacaccgaggaggagctgttcatcaaggaggagggcgcctacgagaccggcagcggcggcgccgaggaggaggccgaggacctgagcgcccccagcgccgcctacaccgccgagcccagacccttcaagtgcagcgtgtgcgagaagacctacaaggaccccgccaccctgagacagcacgagaagacccactggctgaccagacccttcccctgcaacatctgcggcaagatgttcacccagagaggcaccatgaccagacacatgagaagccacctgggcctgaagcccttcgcctgcgacgagtgcggcatgagattcaccagacagtacagactgaccgagcacatgagagtgcacagcggcgagaagccctacgagtgccagctgtgcggcggcaagttcacccagcagagaaacctgatcagccacctgagaatgcacaccagccccagctag

SEQ ID NO: 184459 - protein, 1514 aa, Artificial Sequence
  derived and/or modified sequence
MEPRSMEYFCAQVQQKDVGGRLQVGQELLLYLGAPGAISDLEEDLGRLGKTVDALTGWVGSSNYRVSLMGLEILSAFVDRLSTRFKSYVAMVIVALIDRMGDAKDKVRDEAQTLILKLMDQVAPPMYIWEQLASGFKHKNFRSREGVCLCLIETLNIFGAQPLVISKLIPHLCILFGDSNSQVRDAAILAIVEIYRHVGEKVRMDLYKRGIPPARLEMIFAKFDEVQSSGGMILSVCKDKSFDDEESVDGNRPSSAASAFKVPAPKTSGNPANSARKPGSAGGPKVGAGASKEGGAGAVDEDDFIKAFTDVPSIQIYSSRELEETLNKIREILSDDKHDWDQRANALKKIRSLLVAGAAQYDCFFQHLRLLDGALKLSAKDLRSQVVREACITVAHLSTVLGNKFDHGAEAIVPTLFNLVPNSAKVMATSGCAAIRFIIRHTHVPRLIPLITSNCTSKSVPVRRRSFEFLDLLLQEWQTHSLERHAAVLVETIKKGIHDADAEARVEARKTYMGLRNHFPGEAETLYNSLEPSYQKSLQTYLKSSGSVASLPQSDRSSSSSQESLNRPFSSKWSTANPSTVAGRVSAGSSKASSLPGSLQRSRSDIDVNAAAGAKAHHAAGQSVRSGRLGAGALNAGSYASLEDTSDKLDGTASEDGRVRAKLSAPLAGMGNAKADSRGRSRTKMVSQSQPGSRSGSPGRVLTTTALSTVSSGVQRVLVNSASAQKRSKIPRSQGCSREASPSRLSVARSSRIPRPSVSQGCSREASRESSRDTSPVRSFQPLGPGYGISQSSRLSSSVSAMRVLNTGSDVEEAVADALLLGDIRTKKKPARRRYESYGMHSDDDANSDASSACSERSYSSRNGSIPTYMRQTEDVAEVLNRCASSNWSERKEGLLGLQNLLKNQRTLSRVELKRLCEIFTRMFADPHGKVFSMFLETLVDFIQVHKDDLQDWLFVLLTQLLKKMGADLLGSVQAKVQKALDVTRESFPNDLQFNILMRFTVDQTQTPSLKVKVAILKYIETLAKQMDPGDFINSSETRLAVSRVITWTTEPKSSDVRKAAQSVLISLFELNTPEFTMLLGALPKTFQDGATKLLHNHLRNTGNGTQSSMGSPLTRPTPRSPANWSSPLTSPTNTSQNTLSPSAFDYDTENMNSEDIYSSLRGVTEAIQNFSFRSQEDMNEPLKRDSKKDDGDSMCGGPGMSDPRAGGDATDSSQTALDNKASLLHSMPTHSSPRSRDYNPYNYSDSISPFNKSALKEAMFDDDADQFPDDLSLDHSDLVAELLKELSNHNERVEERKIALYELMKLTQEESFSVWDEHFKTILLLLLETLGDKEPTIRALALKVLREILRHQPARFKNYAELTVMKTLEAHKDPHKEVVRSAEEAASVLATSISPEQCIKVLCPIIQTADYPINLAAIKMQTKVIERVSKETLNLLLPEIMPGLIQGYDNSESSVRKACVFCLVAVHAVIGDELKPHLSQLTGSKMKLLNLYIKRAQTGSGGADPTTDVSGQS

SEQ ID NO: 184460 - DNA, 4545 bp, Artificial Sequence
  derived and/or modified sequence
atggagccaaggtctatggaatacttttgcgctcaggttcaacaaaaagacgtggggggacgacttcaagtgggccaagagctgcttctttatttgggtgcccctggcgctatttcggatctcgaagaagacctgggacggctggggaaaaccgtggacgctctgaccgggtgggtcggcagctcgaattacagagtgagcctgatgggattggagattctttcagcgtttgttgatagattaagtacacgtttcaaaagctacgtggccatggtgatcgtcgccttaatcgacagaatgggagatgcaaaggataaggtgagagatgaagctcagacactgattctcaaactaatggaccaggtggctccccccatgtacatctgggagcagttggcaagcggttttaagcacaaaaacttcagaagccgggaaggtgtatgtctttgcctgatcgaaaccttaaacatttttggcgcgcaacctcttgtgatcagtaaactcattccccacctctgtatcctctttggggattcaaacagccaggtacgcgacgcggctatattggccattgtcgagatttaccgccacgtgggggagaaagttagaatggatttatacaagcgcggtatcccgcccgcgcggttggaaatgatttttgccaagtttgatgaggtgcagtcaagtggtggtatgatcctgtccgtatgtaaggacaagtcatttgacgacgaagagagtgtcgacggaaataggcctagcagtgccgcctcggcattcaaggtccccgcgcccaagacctctggcaaccccgccaattctgctcggaaaccagggagtgccggcgggcccaaggtcggggcaggagcaagcaaggagggcggggccggggccgtagatgaggacgatttcatcaaggcatttaccgacgttccctctattcaaatctattcctcccgagagcttgaagagacactgaataaaatacgcgagattctgagcgacgacaagcacgattgggatcaacgcgccaatgccttaaagaaaatccggagcctcctggtggccggggctgcccaatacgattgcttctttcagcatttgagacttttagacggcgctctcaagctctccgctaaagatctgcgctcgcaggtcgtgagagaggcctgcatcactgtcgcacacctttcaaccgtgttaggcaacaagtttgaccatggtgccgaggcgattgtccctactcttttcaatctcgttcccaattctgccaaggttatggctaccagtggctgtgccgccattcggtttatcattaggcacacccatgtccccagactaattcctcttatcacatccaattgtacatctaagagtgtgcccgttcgaagacgatccttcgagtttcttgacttgctcctgcaggagtggcaaacccactcgctagagaggcatgcagcggtactggtggagacaatcaaaaaggggattcacgacgctgacgccgaagcccgtgtcgaggctagaaaaacatacatgggactgcgcaatcacttcccaggtgaagcagagaccctctacaactccttagaaccatcttatcagaaaagtctgcaaacatacctgaagagttccgggtctgtggcgtccttgccacagtcagatagaagcagttctagtagccaggaatcccttaaccggcccttctctagtaaatggtccacagccaacccaagtacggtagctgggcgcgttagcgcggggagtagtaaagcgtccagcttgccaggctcgctgcaacggagtcggtccgacattgatgtgaatgcagctgctggggcaaaagcccaccacgcagcaggacaatctgttcgaagtggccgcctcggggctggtgcacttaatgctggctcttatgcgtcactggaagatacctctgacaaattggatggcacagcctccgaagacggccgggtccgtgcaaagctttctgcccctctggcgggaatgggtaatgctaaggcggacagtcgcggccgtagtaggacgaagatggtgagccagagtcagccagggagtcggtctggttcaccaggaagagtgctcactacaacagcgctgagcacagtgagtagtggggtgcagagagttctcgttaacagcgcgtcagcgcagaaacggtctaagatcccccgctcccagggctgtagcagggaggcctcacctagtcgtcttagcgtggctagatccagtaggatcccaagaccaagtgtcagccaagggtgtagtcgcgaggcctctcgcgagtcatctcgagatacctctcccgtgcgaagcttccagccgcttggtcccggttacggcatcagccaaagctcacgcttgtcgagtagcgtcagcgcgatgcgggttctgaacaccgggtcagatgtggaggaggccgtggccgacgcactgctcctgggggacatcaggaccaaaaaaaagccggcccgcagaaggtacgaatcctacggaatgcactccgacgatgacgccaattcagacgcctctagcgcatgcagcgagaggtcttattcaagcagaaacggcagcatccctacatatatgaggcaaacagaagacgtggctgaggtgctgaataggtgcgcctccagtaactggtcagagcgaaaggaaggcctgctcgggctgcagaatttattgaagaatcaacggactctcagtagagttgaacttaaacgcctgtgcgagatcttcactcgcatgtttgccgacccacatggcaaagtcttcagcatgtttttggagactctagtcgacttcatacaagtccataaagatgacctgcaggactggctgtttgttcttctgacccaactcctgaagaagatgggcgctgacctcctaggctccgtacaggccaaagtccagaaggccttggacgtcaccagagagtctttccctaatgatctccaattcaatatcttaatgcgcttcacggtagatcagacacagactccgtctctaaaagttaaggtagcaatactcaagtacatagagactctggcaaaacagatggaccctggagattttatcaattcctccgagacgcggctcgcggtctcccgggtgataacttggaccacggagcccaagagcagcgatgtgcgcaaagccgcccagagcgtcctcatttccctgtttgaactcaacacccccgagtttactatgctgctcggggcactccccaagaccttccaggatggtgctactaagctactgcataatcacctgcggaatactggaaatgggacccaaagtagtatggggagtcccctcacccggccaacacccagatctcctgccaattggtcatcccctctgacatccccaaccaacaccagtcagaacactctaagccccagcgcatttgattatgacactgaaaacatgaattctgaggacatatattcctcattgcggggggtcaccgaagccattcagaatttcagctttaggtcgcaagaagatatgaacgagcctttaaagagggacagcaagaaggacgacggggatagcatgtgtgggggccctgggatgagcgaccccagagccgggggggatgccacggattcaagccagactgccttggataacaaggcatcactgctgcatagcatgccgacccatagttctccccgctctcgcgactataatccctataactactccgactccatctcaccctttaacaaaagcgccttgaaagaagctatgtttgatgacgacgcggatcaatttccagacgatctgtctttagatcattcggacctggtagccgagctgctgaaggagctgtccaatcacaatgaacgggtcgaagaaagaaagattgcgctttacgagctgatgaaactcacacaggaagagtcattctctgtttgggacgaacattttaagaccattctgctcctgctgctcgaaaccttgggcgacaaggagcccaccattcgtgccttggctctgaaggtcctgagagaaattctgcggcatcagcccgccaggtttaaaaactatgccgaattgaccgtgatgaaaacactcgaggcccacaaggatccccacaaggaggtagtccgctcggccgaggaagcagccagcgtcttggccacttctataagccccgagcagtgcatcaaagtgctctgcccgatcattcaaaccgctgattaccctataaaccttgccgcaataaaaatgcagacgaaggtgatcgaacgcgtaagtaaagagactcttaacctgttgctgcccgagattatgcctgggttgatccaggggtatgataacagcgaaagctccgtgcggaaagcttgtgtcttttgcctcgtagcagtgcatgctgtgataggggacgaactgaaacctcatctttcgcaactgactggctcaaaaatgaaattgctcaacttgtacatcaagagagcccagacaggttcgggtggcgctgaccccaccaccgatgtatccggccagagctag

SEQ ID NO: 184461 - DNA, 4545 bp, Artificial Sequence
  derived and/or modified sequence
atggagcccaggtccatggagtacttctgtgcccaggtgcagcagaaggatgtgggcggccgcctgcaggtgggccaggagctgctgctgtacctgggcgcccctggggccatcagtgacctggaggaggacctgggccgcctgggcaagacagtggatgccctgaccggctgggtgggcagcagcaactacagagtgtccctgatgggcctggagatcctgagcgcctttgtggaccggctgagcacccgcttcaagagctatgtggccatggtgattgtggccctgattgacaggatgggagatgccaaggacaaggtgagagatgaggcccagaccctcatcctgaagctgatggaccaggtggccccacccatgtacatctgggagcagctggccagcggcttcaagcacaagaacttccgcagccgggagggcgtgtgcctgtgcctgattgagaccctgaacatctttggagcccagcccctggtgatcagcaagctgatcccccacctgtgcatcctgtttggagacagcaacagccaggtgagagatgctgccatcctggccatcgtggagatctacagacatgtgggggagaaggtgaggatggacctgtacaagaggggcatccccccagcccggctggagatgatctttgccaagtttgatgaggtgcagagcagcggcggcatgatcctgtctgtgtgcaaggacaagagctttgatgatgaggagagcgtggatggcaaccggcccagcagcgctgccagcgccttcaaggtgcctgcccccaagaccagcggcaacccagccaacagcgccaggaagccaggcagcgctgggggccccaaggtgggcgctggggccagcaaggagggcggggccggggctgtggatgaagatgacttcatcaaggccttcacagatgtgcccagcatccagatctacagcagccgggagctggaggagaccctgaacaagatccgggagatcctgagtgatgacaagcatgactgggaccagagggccaatgccctgaagaagatccgcagcctgctggtggccggggccgcccagtatgactgcttcttccagcacctgcggctgctggatggagccctgaagctgagcgccaaggacctgcggagccaggtggtgcgggaggcctgcatcaccgtggcccacctgagcacagtgctgggcaacaagtttgaccatggagctgaggccatcgtgcccaccctcttcaacctggtgcccaacagcgccaaggtgatggccaccagcggctgtgccgccatccgcttcatcatccgccacacccacgtgcccaggctcatccccctcatcaccagcaactgcaccagcaagtctgtgcctgtgagaagaagaagctttgagttcctggacctgctgctgcaggagtggcagacccacagcctggagagacatgctgctgtgctggtggagaccatcaagaagggcatccatgatgctgatgctgaggcccgggtggaggccaggaagacctacatgggcctgaggaaccacttccctggagaggccgagaccctgtacaacagcctggagcccagctaccagaagagcctgcagacctacctgaagagcagcggctctgtggccagcctgccccagagcgacaggagcagcagcagcagccaggagagcctgaaccggcccttcagcagcaagtggagcacagccaaccccagcacagtggccggccgggtgtctgctggcagcagcaaggccagcagcctgcccggcagcctgcagaggagcagaagtgacattgatgtgaatgctgctgctggggccaaggcccaccacgccgccggccagagcgtgcgcagcggccgcctgggcgctggggccctgaatgccggcagctatgccagcctggaggacaccagtgacaagctggatggaacagcctctgaagatggccgggtgcgggccaagctgagcgcccccctggccggcatgggaaatgccaaggctgacagccggggccgcagcaggaccaagatggtgtcccagagccagcccggcagccgcagcggcagccctggccgggtgctgaccaccacagccctgagcacagtgagcagcggcgtgcagagggtgctggtgaacagcgccagcgcccagaagaggagcaagatccccaggagccagggctgcagccgggaggccagccccagccggctgtctgtggcccggagcagccgcatcccccggcccagcgtgtcccagggctgcagccgggaggccagccgggagagcagccgggacaccagccctgtgcgctccttccagcccctgggccctggctacggcatcagccagagcagccggctgagcagctctgtgtctgccatgagggtgctgaacacaggcagtgatgtggaggaggccgtggctgatgccctgctgctgggggacatccgcaccaagaagaagccagccaggagaagatatgagagctatggcatgcacagtgatgatgatgccaacagtgatgccagcagcgcctgcagcgagaggagctacagcagcagaaatggcagcatccccacctacatgaggcagacagaagatgtggccgaggtgctgaacagatgtgccagcagcaactggagcgagaggaaggagggcctgctgggcctgcagaacctgctgaagaaccagaggaccctgagccgggtggagctgaagaggctgtgtgagatcttcaccaggatgtttgctgacccccacggcaaggtgttctccatgttcctggagaccctggtggacttcatccaggtgcacaaggatgacctgcaggactggctgtttgtgctgctgacccagctgctgaagaagatgggcgctgacctgctgggctctgtgcaggccaaggtgcagaaggccctggatgtgacccgggagagcttccccaatgacctgcagttcaacatcctgatgaggttcaccgtggaccagacccagacccccagcctgaaggtgaaggtggccatcctgaagtacatcgagaccctggccaagcagatggaccccggggacttcatcaacagcagcgagacccggctggccgtgtccagggtcatcacctggaccacagagcccaagagcagtgatgtgaggaaggccgcccagagcgtgctgatcagcctgtttgagctgaacaccccagagttcaccatgctgctgggcgccctgcccaagaccttccaggatggagccaccaagctgctgcacaaccacctgaggaacacaggaaatggcacccagagctccatgggcagccccctgacccggcccacccccaggagccctgccaactggagcagccccctgaccagccccaccaacaccagccagaacaccctgagccccagcgcctttgattatgacacagagaacatgaacagcgaggacatctacagcagcctgcggggcgtgacagaggccatccagaacttctccttccgcagccaggaggacatgaatgagcccctgaagagggacagcaagaaggatgatggagacagcatgtgtggcggccctggcatgtctgaccccagggctggaggagatgccacagacagcagccagacagccctggacaacaaggccagcctgctgcacagcatgcccacccacagcagccccaggagccgggactacaacccctacaactacagcgacagcatcagccccttcaacaagagcgccctgaaggaggccatgtttgatgatgatgctgaccagttcccagatgacctgagcctggaccacagcgacctggtggccgagctgctgaaggagctgagcaaccacaatgaaagagtggaggagaggaagatcgccctgtatgagctgatgaagctgacccaggaggagagcttctctgtgtgggatgagcacttcaagaccatcctgctgctgctgctggagaccctgggggacaaggagcccaccatccgggccctggccctgaaggtgctgcgggagatcctgcggcaccagcctgcccgcttcaagaactatgcagagctgactgtgatgaagaccctggaggcccacaaggacccccacaaggaggtggtgcgctctgctgaggaggccgcctctgtgctggccaccagcatcagccctgagcagtgcatcaaggtgctgtgccccatcatccagacagctgactaccccatcaacctggccgccatcaagatgcagaccaaggtgattgaaagagtgtccaaggagaccctgaacctgctgctgcctgagatcatgcctggcctcatccagggctatgacaacagcgagagctctgtgaggaaggcctgtgtgttctgcctggtggccgtgcatgctgtgattggagatgagctgaagccccacctgagccagctgaccggcagcaagatgaagctgctgaacctgtacatcaagagggcccagacaggcagcggcggcgctgaccccaccacagatgtgtctggccagagctag

SEQ ID NO: 184462 - DNA, 4545 bp, Artificial Sequence
  derived and/or modified sequence
atggagccccggagcatggagtacttctgcgcccaggtgcagcagaaagatgtgggcggtagactccaggtgggccaggaactcctgctctatttaggggccccaggcgcaatcagcgatctggaagaagatctcggcagacttggcaaaacggtggatgctctgaccgggtgggtaggatcttctaattatcgcgtgagtcttatgggattggaaattttgtccgcttttgtagaccgactttcaacacgcttcaagtcctacgtggccatggtgattgtagcattgattgaccgaatgggcgacgcaaaggacaaagttcgtgatgaggcccaaacccttatattgaagctcatggatcaagttgcccctcctatgtatatatgggagcagttagcctccggttttaaacacaaaaattttcgcagcagagaaggtgtctgtctctgtctcattgaaactttgaacatatttggtgcacagcccctagtcatctctaagcttattccccacctatgcatcctgttcggggatagtaattcacaggtacgggatgcagccattctggcgattgtggagatttatcgacatgtcggtgaaaaagtcaggatggacctctataaacgcgggataccccctgctagactggagatgatattcgccaaattcgacgaggtccagtcgagtggcggcatgatcctgagcgtgtgcaaagataagtcttttgacgacgaggaatctgtggatgggaaccgaccctcaagcgccgcttctgcttttaaggtgccagcaccgaaaacttccgggaacccagcgaactcagcacgaaagcccgggagtgcgggggggcctaaggtgggcgctggcgcctctaaggaggggggcgccggggcggtggacgaggacgatttcatcaaggcatttacagacgttccaagcatccagatctactcatcacgtgaactcgaagagacattgaataagatccgggagatccttagcgatgacaaacacgactgggaccaacgggccaatgccctgaaaaagattcgctcgttactggtggccggagctgcacaatacgactgtttttttcagcacctgcggctgcttgatggcgccctgaagttatctgctaaggatctgagatcacaggttgtgagagaagcatgcattacagtggcacacctgtccactgttttaggaaataagttcgaccacggggccgaggctatcgtccctactctgtttaatctagtaccgaatagtgctaaagtgatggctaccagcggatgcgcagccatcagatttatcattcgccacacgcatgtgccgagactgatccctctgatcacctccaattgcacctctaagtcggtaccagttcggaggagatccttcgagtttttggacctccttcttcaggagtggcagacgcactctctggaacggcacgctgctgtcctcgtggagacaattaaaaaaggaatacacgacgcagacgccgaggcacgggtggaggcccggaagacgtatatgggacttagaaaccactttccaggagaggcagagactctgtacaattctcttgaaccgtcctatcagaaaagcctgcagacttatctcaagtcttccggctccgtcgccagcttgccacagagcgatcgctcatcatcttcttcacaagaatccttgaaccggccattcagctccaagtggtccactgccaatccctccaccgttgccggccgagttagcgctggaagctctaaggcatcctccctgcccggcagcctgcagcgctctcggtccgacatcgacgttaacgctgctgctggagctaaggcacaccacgccgccggccaatccgtgcgttctggccgactgggtgcaggagcactcaatgccggcagttacgcatcactggaggacactagcgacaagctcgacggtaccgcctcagaggatggccgggttcgggctaaactgtcagcccccctcgctggaatgggcaatgccaaggctgactcccgcggcagatccaggaccaaaatggtgtcgcagagccagcccggttctcgttccgggtctccgggccgcgtgctgaccactacagcccttagtaccgtttcatccggagtgcagcgggtattggtgaatagcgcatcggcccagaagcgctcaaaaattcctcgatctcagggctgctcccgcgaggccagtcctagcaggctgagtgtagcccggtcttctagaatacctaggcctagcgttagtcagggatgttcccgggaagcctcccgggaatcttccagagacacttctcccgttcgctcctttcaacctttaggccccggatatggcatcagtcagtcttctaggttgtcctccagtgtgtccgcaatgagggttctcaatacagggagtgacgtcgaagaggccgtggctgacgccctgctcttgggggatatccgcacaaaaaagaagccagccagacgccggtatgagtcctacgggatgcattcagatgacgacgccaactctgacgcttcaagtgcatgtagtgaacgatcttactcgagtaggaatggaagcatccccacttacatgagacagaccgaagacgtggctgaggtactgaatcgctgcgccagctctaactggagcgagcgaaaggaaggacttctggggctgcagaatctgcttaaaaaccagaggaccttaagccgggttgaactcaagcgactgtgcgaaattttcactagaatgtttgctgacccccatggaaaagtcttttcgatgtttcttgaaacactggtggattttatccaggtacacaaggacgacctccaggactggttatttgtgcttctgacccaactactcaaaaaaatgggcgccgatctgttgggatccgtacaggcaaaggtgcagaaggcactagacgtaacaagagagtcattccccaacgacttacagttcaatatattaatgaggttcaccgtggatcagacgcagactccgtccctcaaagtcaaggtggccattctgaagtacatcgagacacttgcaaagcagatggaccccggagacttcatcaattcatcggaaacccggcttgctgttagccgtgtgataacctggaccactgagcctaagagctccgacgtgaggaaggcggcccagtccgttctaattagtctattcgagctgaacactccagaattcacaatgttgcttggtgccctgcctaagacctttcaggatggagcaactaaactcctccataaccacctcagaaacaccggtaacggtacacagagttccatggggagccctcttacccgtcccacgccaagatcccctgcgaactggtcatcccccctcacatcgcccactaacaccagtcagaacacactctctcccagtgcatttgactatgacactgagaacatgaattccgaagatatctacagctctttacggggcgtcacagaggcaatacagaacttttcctttagatcacaggaggacatgaatgaacctctcaagagggactctaagaaagatgatggcgattctatgtgcggcgggccgggaatgtccgatcctagagcgggaggcgacgccacagatagcagtcagacagcactggacaacaaggcaagtctccttcattctatgcccactcatagcagtccacggagcagagactacaacccatacaactactctgattcgattagtcctttcaataaaagcgctctcaaagaggccatgttcgatgacgatgcagatcaattccccgatgatctatccctggaccacagtgaccttgtggccgagttgctgaaagaactctcaaaccataatgagcgtgtggaggagcggaagattgcattgtatgaactgatgaaactgacacaggaggaaagcttcagtgtgtgggacgagcacttcaaaactattctgctgctgctgttggagaccctcggtgacaaggagcctaccattcgtgccctagccttgaaggtgctacgcgaaattctgcggcaccagccagcccgcttcaagaattatgcagagctgacggtgatgaagacgctggaggcacacaaggacccccacaaggaggtcgtccgcagtgcggaggaagcagcaagtgtcctcgcaacgagtatcagtcccgaacagtgcataaaggtgctatgccccattatccagaccgccgactaccctataaacctagcagctattaagatgcaaacaaaggtgatagagagggtctctaaggaaacactgaacctgctgctccccgaaatcatgcctggcctgatccagggttatgacaatagcgagtctagtgttaggaaggcttgcgttttttgcctcgtcgccgtccacgccgtgataggggacgagctcaaaccccacctgtcgcaacttacgggaagcaagatgaagctcctaaacctgtatattaagcgtgcgcagactggctctggaggggcagatccaactacagatgtgtcagggcagtcttag

SEQ ID NO: 184463 - DNA, 4545 bp, Artificial Sequence
  derived and/or modified sequence
atggagcctagatccatggaatacttttgtgcccaggtgcaacaaaaggacgtgggcggtcgcctgcaggttggccaggagttgctcctatatctgggcgctcccggagcaatctccgacctcgaggaggacctcggtcggttaggaaaaaccgtagacgccctgaccggttgggttggctcctccaattatagggttagcttgatgggactagaaatcctgagcgccttcgtagaccggctgagcacacggtttaaatcctacgtggccatggtcatcgtggcactgatcgataggatgggagatgccaaggataaggtccgggacgaagcacagaccctgatcctgaagttaatggaccaggttgccccacccatgtatatttgggagcagcttgctagcgggttcaaacacaagaatttccgcagtcgagaaggcgtgtgtctatgccttattgaaaccctgaatatcttcggcgctcagcccttggtgatttcaaaactgataccacatttgtgcattcttttcggtgatagtaactcgcaagtgcgagacgctgccatcctcgccattgtagaaatctatcgtcacgtgggggaaaaagtgaggatggatctgtacaagagagggattcctcctgcacgactggagatgatctttgctaaattcgacgaagtgcagtcaagtgggggaatgatcctgtctgtgtgcaaggataagtcatttgacgacgaggagtctgttgacggtaaccggccttcgtccgccgcttcagcctttaaagtgccagcacctaaaacctctgggaacccagctaactccgccagaaagccgggaagtgccggaggacctaaggttggagccggtgcaagcaaagaaggcggtgccggagctgtcgatgaagacgactttattaaggcgttcactgatgtcccttctatccagatatatagctcccgcgagctagaggagacgctcaacaaaattagggagatcctgtcagacgataagcacgactgggatcagcgcgctaacgcgctgaaaaagataagaagtctgttggtcgcaggagctgctcagtatgactgtttttttcagcatctgaggctactggacggggctctgaagctgtccgctaaagatctacgctcgcaggtagtaagggaggcctgcatcacagtggcccacctctccacagtgctgggtaataagtttgatcatggcgctgaggccatcgttccaacactctttaatttggtaccgaactcggccaaggttatggctactagtggctgcgccgcaattagattcatcataagacacacacacgtgccgagactgatccccttaattacgtctaattgtacttcgaaatccgttcccgtgagaaggaggagcttcgaattcctggacctcctactgcaggaatggcagacacactcgttagagcgtcatgctgcagttctggtggaaactatcaagaaaggaattcacgatgccgatgccgaggctagagtagaagcaaggaagacatacatggggctgcgcaaccactttccgggtgaagctgagacactttataattcgctggaacccagttatcaaaagagcctgcagacttaccttaaatcttctggctctgtggctagcctgccacagagcgaccgttccagctcttcctcacaggaaagtcttaaccgccctttcagcagcaagtggtctacagcaaacccaagcaccgtggctggaagagtttccgccggatcctctaaagccagctcccttccagggtccctacagagatcacgcagcgacatcgatgtgaacgcagctgcgggtgccaaagctcaccatgcagcaggtcaatccgtgagaagtgggcgtctgggggctggcgctctgaacgcaggctcctacgctagtttagaggacacttctgataagctcgacggcacagcctccgaagatggcagggttcgggctaagctctccgcgccattagcgggaatgggtaacgcaaaggccgattctagaggacgctctaggactaagatggtgagccaaagccagcctgggagccgatccgggagtccaggtcgggtactgacgacaacggcattatccacagtgtcctctggcgtgcaaagggtgctggtgaacagcgcctcagcacagaaaagatccaagattcccaggtcacagggctgctccagggaagcgagtccctcccgcttatctgtggcacgttcatcccgcatcccgaggccatcggtgtcccaggggtgcagccgggaggcctcccgagagagtagtagggatacctctccggtacggtccttccagccactggggcctggctacggtatctctcagtcaagcagattgtcttcttccgttagtgcaatgagagttttgaacacaggctccgatgtggaagaagccgtggcagatgccctccttctgggggacattcgcaccaagaagaagccagctagaagacgctacgagagttacgggatgcacagtgacgatgacgccaacagtgatgcatcatcagcatgcagtgaaaggtcctacagctccagaaacggttctattccgacttatatgaggcagaccgaggacgtggctgaggtcctgaatagatgtgcctcctcaaattggagcgagcgcaaggaaggcctgctggggttgcagaacctgctgaagaatcaacgaaccctgtcccgggtcgagctgaagcggctgtgcgaaatttttacacggatgttcgccgacccacacggtaaggtcttctccatgttcctggaaaccctggtggattttatccaggtgcataaagatgatcttcaggactggttgtttgttctgctcactcagcttctgaaaaagatgggggcagacctcctcggaagtgtccaggcgaaggtgcaaaaagctctggatgtgacgcgagagtcgtttcctaatgacctccagtttaacatccttatgaggtttactgtagaccagacacaaacgccttcgctgaaggtcaaggtggccatcctcaagtacattgaaaccctggccaaacagatggatcccggagattttatcaattcgtccgaaactcgactggccgtttcaagagtgatcacgtggactacagaaccaaagtcatccgatgtgcggaaggctgcccagagcgttctgatttccctatttgaactgaacaccccagagttcaccatgctcctcggcgctctgccaaaaacgttccaggacggggcaacaaaattacttcacaatcacctgcgcaacaccggaaatggcactcagtcttccatgggcagtcctcttactcgaccaacacctaggtcgcctgcaaactggtctagtccactcacttctcccactaatactagccagaataccttgagcccttccgcctttgactacgacactgagaacatgaattctgaagacatttattcttctctcaggggtgtcacagaggccatccagaatttcagttttcggtcccaggaagacatgaatgagcccctgaagagggactccaaaaaggatgatggcgattccatgtgcggtggtcctggcatgtctgaccctcgagcgggtggcgatgcaaccgactctagccagactgcgctggacaataaggcctcacttttacactcaatgcctactcatagctccccgagatcacgcgattataatccgtataattatagcgacagcatctcaccattcaataaatccgcccttaaggaggctatgttcgacgatgatgccgaccagtttcccgacgatctgagcctggatcactctgacctggtggccgagctcctgaaggagctgtctaatcacaatgaacgagtggaagagcgcaaaattgcactctacgagctcatgaagctgacacaggaggagtctttcagtgtgtgggacgagcatttcaaaacgattctgttgctgctgttggagactcttggcgacaaagagcctaccatccgagcgctggcgctcaaggttctgcgtgagatccttcgacatcagcctgctcggttcaaaaactacgcagaacttaccgttatgaagactcttgaggcgcataaggatccccacaaggaggtggtacggagcgccgaggaagccgctagtgtgctagccacctccattagccctgagcagtgtattaaggtactttgtccgatcatccaaaccgcagactacccaatcaacttagcagccattaaaatgcagaccaaggtgatagaaagggtctccaaagagactctgaacttactgctgcccgagataatgccgggacttattcagggatatgacaactcagagtcgtctgtgcggaaagcctgtgttttctgtcttgtcgctgtacacgctgtaatcggggacgagctgaagcctcatttgtctcaactcaccggatctaaaatgaaacttttaaatctttatataaaaagggcccaaactgggagtggcggagccgaccctacaaccgacgtgtcagggcaaagttag

SEQ ID NO: 184464 - DNA, 6978 bp, Artificial Sequence
  derived and/or modified sequence
gaaagttggccgctcacagactggcaggcgggcgggcggccgcagccatggagccccgcagcatggagtacttctgcgcccaggtgcagcagaaggacgtcggcggccggctgcaggtcggccaggagctcctgctctaccttggcgcccccggcgccatctcggacctggaggaggacctgggccgcctaggcaagacagtcgacgcgctcaccggctgggtgggttcgagcaactaccgggtatcattaatgggattggaaattttaagtgcctttgtggacagattatcaacacgctttaaatcctatgtagcaatggttattgtagctttaatagacagaatgggagatgccaaagacaaggttcgagatgaagctcagactctgatattgaagttaatggatcaagtagcaccacctatgtacatttgggagcagttggcttctggttttaaacacaagaattttcgatctcgagaaggcgtgtgtctgtgtcttattgaaaccttaaacatttttggggctcagccactagtcatcagcaaattgataccacatttgtgtatcctgtttggagactccaacagtcaggtgagagatgctgcaatattggctatagtggagatttatagacatgtgggagaaaaagtgaggatggatctttataagagaggaattccccctgctagattagaaatgatatttgccaaatttgatgaagtgcaaagttcaggcggtatgattttgagtgtctgcaaagataaaagcttcgatgatgaagaatcagtggatggaaataggccatcatcagctgcatcagccttcaaggttcctgcacctaaaacatccggaaatcctgccaacagtgcaaggaagcctggttcagcaggtggccctaaggttggagcaggtgcttctaaggaaggaggtgctggagcagttgatgaagatgattttataaaagcttttacagatgtcccttctattcagatttattctagtcgagaactcgaagaaacattaaataaaatcagggaaattttgtcagatgataaacatgactgggatcagcgtgccaatgcactgaagaaaattcgatcactgcttgttgctggagctgcacagtatgattgcttttttcaacatttacgattgttggatggagcacttaaactttcagctaaggatcttagatcccaggtggttagagaagcttgtattactgtagcccacctttcaacagttttgggaaacaagtttgatcatggcgctgaagccattgtacctacactttttaatctcgtccccaatagtgcaaaagtcatggcaacttctggatgtgcagcaatcagatttatcattcggcatactcatgtacccagacttatacctttaataacaagcaattgcacatcaaaatcagttcccgtgaggagacgttcatttgaatttttagatttattgttgcaagagtggcagactcattcattggaaagacatgcagccgtcttggttgaaactattaaaaagggaattcatgatgctgacgctgaggccagagtggaggcaagaaagacatacatgggtcttagaaaccactttcctggtgaagctgaaacattatataattcccttgagccatcttatcagaagagtcttcaaacttacttaaagagttctggcagtgtagcatctcttccacaatcagacaggtcctcatccagctcacaggaaagtctcaatcgccctttttcttccaaatggtctacagcaaatccatcaactgtggctggaagagtatcagcaggcagcagcaaagccagttcccttccaggaagcctgcagcgttcacgaagtgacattgatgtgaatgctgctgcaggtgccaaggcacatcatgctgctggacagtctgtgcgaagcgggcgcttaggtgcaggtgccctgaatgcaggttcctatgcgtcactagaggatacttctgacaagctggatggaacagcatctgaagatggccgggtgagagcaaaactttcagcaccacttgctggcatgggaaatgccaaggcagattctagaggaagaagtcgaacaaaaatggtgtctcaatcacagcctggtagccggtctgggtctccaggaagagttctgaccacaacagccctgtccactgtgagctctggtgttcaaagagtcctggtcaattcagcctcagcacaaaaaagaagcaagataccacggagccagggctgtagcagagaggctagtccatctaggctttcagtggcccgaagcagtcgtattcctcgaccaagtgtgagtcaaggatgcagccgggaagctagtcgggagagcagcagagacacaagtcctgttcgctcttttcagcccctcggtccaggttatgggatcagccaatcaagtcgactgtcgtcttctgttagtgccatgcgagtcctgaacacaggttctgatgtggaggaggcggtggcagatgccttgctcttaggagacatacggactaagaaaaaaccagctcgaagaagatatgaatcatatggaatgcattcagatgatgacgccaacagcgatgcatctagtgcttgttcagaacgctcctatagttctcgaaatggtagtattcctacatatatgaggcagacggaagatgtggcagaagtcctcaatagatgtgctagttccaattggtcagaaaggaaagaaggcctcctaggtctgcagaacttattaaaaaatcagagaacactaagtcgagttgaactgaaaagattatgtgaaattttcacaagaatgtttgctgaccctcatggcaaggtattcagcatgtttttggagactctagtggatttcatacaagtccacaaagatgatcttcaagattggttgtttgtactgctgacacaactactaaaaaaaatgggtgctgatttgcttggatctgttcaggcaaaagttcagaaagcccttgatgttacaagagagtcttttccaaatgatcttcagttcaatattctaatgagatttacagttgatcagacccagacaccaagcttaaaggtgaaggttgctatccttaaatacatagaaactctggccaaacagatggatccaggagattttataaattccagtgaaactcgcctagcagtgtctcgggtcatcacttggacaacagaacccaaaagttctgatgttcggaaggcagcacagtcagtgctgatttcattatttgaactcaataccccagagtttacaatgttattaggagctttaccaaaaacttttcaggatggtgctaccaagcttcttcataatcaccttcgaaacactggcaatggaacccagagttccatggggagtcctttgacaagaccaacaccacgatcaccagctaactggtccagtcctcttacttctcctaccaatacatcacagaatactttatctccaagtgcatttgattatgacacagaaaatatgaactctgaagatatttatagctctcttagaggtgtcactgaagcaatccagaatttcagcttccgtagccaagaagatatgaatgagccattgaaaagggattctaaaaaagatgatggcgattcaatgtgtggtggtcctgggatgtctgacccaagagcaggaggtgatgctactgactcaagtcaaacagctcttgataataaagcttcattgctccattcaatgcctactcactcctctccacgctctcgagactataatccatataactattcagatagcatcagtcccttcaacaagtctgccctcaaggaagccatgtttgatgatgatgctgaccagtttcctgacgatctttccctagatcattctgacctagttgcagagttgttgaaggagctgtctaaccataatgagcgtgtagaagaaagaaaaattgccctctatgaacttatgaaactgacacaggaagaatcttttagtgtttgggatgaacacttcaaaacaatattgcttttattgcttgaaacgcttggagataaagagcctacaatcagggctttggcattaaaggttttaagagaaatcctaaggcatcaaccagcaagatttaaaaactatgcagaattgactgtcatgaaaacattggaagcacataaagatcctcataaggaggtggtgagatctgctgaggaagcggcatcagtgttggccacttcaattagtccagagcagtgcatcaaagtgctttgtcctatcattcaaactgcagactacccaattaatctggctgcaatcaaaatgcaaacaaaagtgatagagagagtgtccaaggaaaccctaaacctgcttttgccagagattatgccaggtctaatacagggttatgataattcagagagcagtgttcggaaagcttgtgtcttctgcctggtggctgttcatgcggtaattggtgatgaactaaaaccacatctcagtcaacttactggcagtaaaatgaagctactgaatctttacatcaaacgtgcacaaacaggttctggaggagctgatcccactactgatgtttctggacaaagttagtgaagctcatcacagcgaaccaggtctctcaaaagaaaggacagatagaccaccctcatcaatgaaaggaagttctcaaacacatcctttggaacttactattgtttcccagttttagttttttgtttcgtttcgttttgtattttctgtaacagaggactatcctcagtctgcatgtaacttttatgatagttattccaaattcaagaagaagcagtattaacatcaattgatcgacacaaagtaatttttaatttaattcatcatttcacatgtttgtactttgtcttcccattaacctttgccagtgttatgattgtataaatttttttaaatgctggttaaacaggaatgcttaaagctttaaaagtttaacagtctaaaacatttttgcttttattcaactgcagaataatatttttattgctactttgagttttgtttcgtatcatgtcctatgctagaaatatttaaatgatgtgaaacaaagcaggactaatttgaactacagctggactccgtttgtgtgatggtgatacatgtcattagttgcaacttctttggggtgatctatagtttgaaaactaaaacctcaaagacagatgttacagaatcagccagttctgtaaaactgatattgtctattggttattgatcttgccatctttatttaaaaccatgtcccttctatgatcccttaagaaagctgcaccaaatcatctgcctgttttttcttgatacttactgaaatagaaggttttattgcagggtttattttggtttgtttatatctttgttgtgaatgatgcttttttgtatttattaatatcaaattcacttatgaataaacttgataatggaaacggacaaaaaaaatcaagtgcgtgtgtgtccttgaccgtcttctgtttctcacgtaataaacaaattatcgagacatgggagtgaccagcaccttttctttaaatggtggaacctggtttccttttaccatgaaattgtcttacttgaaaatattgatcctgatgagagagaagatggtgccaaggctgtctttgtataatgggctcaaattctctacctcttcagggctaatacttttaactgagctgctgcctatagtgtcttttggaaaactacttaaagggtgattttctgttactttttagcaaatttttttaatcacctcttgctacacccattcttttcatgtgcagccgactcaaaaattaccagttttggtgaaaggctaaattagataatttggaaccaggatactaatgatttctcatctttacttttttttaatcctaatataaagtgaatttgattgaaaaggcaaatagctattagggaagcagtttgccattgttgcagagttatctgtactttgtttaactgaaaaaaatgtagaaatatatgtaaagaatttaagacaagagtactgaatggatgatttgtcataggctttcccctttctttctgttctagcagcaggaaaagtttctctatatcctctccctctacctgtaacaattttgttttctactgttaattacattgtgtatttatagttctatgcttactgttgtgcatatactggcaataaaactgtacataacattacttgaaaaagttaataatgtatatcagtttttctgtctcactgtgtaacaagtcactcagttttattttaactttagacggtcttgtatcagtggtggtctcttgaattttgtaagttcatctgaggagaaaagatttttcaggtgtagctaccacaatcaaaggtatatagctacatacgcatgtatatattacagcttatctgtaagaagaaaatgcattttaaacacaactcttctcagtagcattttatgacctttggatatgtttgtaatcatttcgaatcaaaatattgatttaattttgacctctggtttaagatactgctttaactactgttgacaaccaagtagagtgacttaagctgaacagtaactaactggaaaattagataagcacctggcatctaatggcaggcaggcactcaagaaatgaattaactacataatggaaaagtatggtttaatgtgtccaaatgaaagctagtagatgtaaacatggaaaaattgtgtttacaattttataatctcagttgataagactataagaaagctgattatttaaatcactatatacaatacacccttaatttgttcattccagaaacatactgagatgtcagctacttaaaaatggtcacaaaaagctactgtttatatttttcctcctgctattctctcccaaattaattattaataagtgttgttcatttactgcactgctgagaactaattaaaattatatattccagattgtaaaa

SEQ ID NO: 184465 - DNA, 4545 bp, Artificial Sequence
  derived and/or modified sequence
atggagcccagaagcatggagtacttctgcgcccaggtgcagcagaaggacgtgggcggcagactgcaggtgggccaggagctgctgctgtacctgggcgcccccggcgccatcagcgacctggaggaggacctgggcagactgggcaagaccgtggacgccctgaccggctgggtgggcagcagcaactacagagtgagcctgatgggcctggagatcctgagcgccttcgtggacagactgagcaccagattcaagagctacgtggccatggtgatcgtggccctgatcgacagaatgggcgacgccaaggacaaggtgagagacgaggcccagaccctgatcctgaagctgatggaccaggtggccccccccatgtacatctgggagcagctggccagcggcttcaagcacaagaacttcagaagcagagagggcgtgtgcctgtgcctgatcgagaccctgaacatcttcggcgcccagcccctggtgatcagcaagctgatcccccacctgtgcatcctgttcggcgacagcaacagccaggtgagagacgccgccatcctggccatcgtggagatctacagacacgtgggcgagaaggtgagaatggacctgtacaagagaggcatcccccccgccagactggagatgatcttcgccaagttcgacgaggtgcagagcagcggcggcatgatcctgagcgtgtgcaaggacaagagcttcgacgacgaggagagcgtggacggcaacagacccagcagcgccgccagcgccttcaaggtgcccgcccccaagaccagcggcaaccccgccaacagcgccagaaagcccggcagcgccggcggccccaaggtgggcgccggcgccagcaaggagggcggcgccggcgccgtggacgaggacgacttcatcaaggccttcaccgacgtgcccagcatccagatctacagcagcagagagctggaggagaccctgaacaagatcagagagatcctgagcgacgacaagcacgactgggaccagagagccaacgccctgaagaagatcagaagcctgctggtggccggcgccgcccagtacgactgcttcttccagcacctgagactgctggacggcgccctgaagctgagcgccaaggacctgagaagccaggtggtgagagaggcctgcatcaccgtggcccacctgagcaccgtgctgggcaacaagttcgaccacggcgccgaggccatcgtgcccaccctgttcaacctggtgcccaacagcgccaaggtgatggccaccagcggctgcgccgccatcagattcatcatcagacacacccacgtgcccagactgatccccctgatcaccagcaactgcaccagcaagagcgtgcccgtgagaagaagaagcttcgagttcctggacctgctgctgcaggagtggcagacccacagcctggagagacacgccgccgtgctggtggagaccatcaagaagggcatccacgacgccgacgccgaggccagagtggaggccagaaagacctacatgggcctgagaaaccacttccccggcgaggccgagaccctgtacaacagcctggagcccagctaccagaagagcctgcagacctacctgaagagcagcggcagcgtggccagcctgccccagagcgacagaagcagcagcagcagccaggagagcctgaacagacccttcagcagcaagtggagcaccgccaaccccagcaccgtggccggcagagtgagcgccggcagcagcaaggccagcagcctgcccggcagcctgcagagaagcagaagcgacatcgacgtgaacgccgccgccggcgccaaggcccaccacgccgccggccagagcgtgagaagcggcagactgggcgccggcgccctgaacgccggcagctacgccagcctggaggacaccagcgacaagctggacggcaccgccagcgaggacggcagagtgagagccaagctgagcgcccccctggccggcatgggcaacgccaaggccgacagcagaggcagaagcagaaccaagatggtgagccagagccagcccggcagcagaagcggcagccccggcagagtgctgaccaccaccgccctgagcaccgtgagcagcggcgtgcagagagtgctggtgaacagcgccagcgcccagaagagaagcaagatccccagaagccagggctgcagcagagaggccagccccagcagactgagcgtggccagaagcagcagaatccccagacccagcgtgagccagggctgcagcagagaggccagcagagagagcagcagagacaccagccccgtgagaagcttccagcccctgggccccggctacggcatcagccagagcagcagactgagcagcagcgtgagcgccatgagagtgctgaacaccggcagcgacgtggaggaggccgtggccgacgccctgctgctgggcgacatcagaaccaagaagaagcccgccagaagaagatacgagagctacggcatgcacagcgacgacgacgccaacagcgacgccagcagcgcctgcagcgagagaagctacagcagcagaaacggcagcatccccacctacatgagacagaccgaggacgtggccgaggtgctgaacagatgcgccagcagcaactggagcgagagaaaggagggcctgctgggcctgcagaacctgctgaagaaccagagaaccctgagcagagtggagctgaagagactgtgcgagatcttcaccagaatgttcgccgacccccacggcaaggtgttcagcatgttcctggagaccctggtggacttcatccaggtgcacaaggacgacctgcaggactggctgttcgtgctgctgacccagctgctgaagaagatgggcgccgacctgctgggcagcgtgcaggccaaggtgcagaaggccctggacgtgaccagagagagcttccccaacgacctgcagttcaacatcctgatgagattcaccgtggaccagacccagacccccagcctgaaggtgaaggtggccatcctgaagtacatcgagaccctggccaagcagatggaccccggcgacttcatcaacagcagcgagaccagactggccgtgagcagagtgatcacctggaccaccgagcccaagagcagcgacgtgagaaaggccgcccagagcgtgctgatcagcctgttcgagctgaacacccccgagttcaccatgctgctgggcgccctgcccaagaccttccaggacggcgccaccaagctgctgcacaaccacctgagaaacaccggcaacggcacccagagcagcatgggcagccccctgaccagacccacccccagaagccccgccaactggagcagccccctgaccagccccaccaacaccagccagaacaccctgagccccagcgccttcgactacgacaccgagaacatgaacagcgaggacatctacagcagcctgagaggcgtgaccgaggccatccagaacttcagcttcagaagccaggaggacatgaacgagcccctgaagagagacagcaagaaggacgacggcgacagcatgtgcggcggccccggcatgagcgaccccagagccggcggcgacgccaccgacagcagccagaccgccctggacaacaaggccagcctgctgcacagcatgcccacccacagcagccccagaagcagagactacaacccctacaactacagcgacagcatcagccccttcaacaagagcgccctgaaggaggccatgttcgacgacgacgccgaccagttccccgacgacctgagcctggaccacagcgacctggtggccgagctgctgaaggagctgagcaaccacaacgagagagtggaggagagaaagatcgccctgtacgagctgatgaagctgacccaggaggagagcttcagcgtgtgggacgagcacttcaagaccatcctgctgctgctgctggagaccctgggcgacaaggagcccaccatcagagccctggccctgaaggtgctgagagagatcctgagacaccagcccgccagattcaagaactacgccgagctgaccgtgatgaagaccctggaggcccacaaggacccccacaaggaggtggtgagaagcgccgaggaggccgccagcgtgctggccaccagcatcagccccgagcagtgcatcaaggtgctgtgccccatcatccagaccgccgactaccccatcaacctggccgccatcaagatgcagaccaaggtgatcgagagagtgagcaaggagaccctgaacctgctgctgcccgagatcatgcccggcctgatccagggctacgacaacagcgagagcagcgtgagaaaggcctgcgtgttctgcctggtggccgtgcacgccgtgatcggcgacgagctgaagccccacctgagccagctgaccggcagcaagatgaagctgctgaacctgtacatcaagagagcccagaccggcagcggcggcgccgaccccaccaccgacgtgagcggccagagctag

SEQ ID NO: 184466 - protein, 626 aa, Artificial Sequence
  derived and/or modified sequence
MAARPAATLAWSLLLLSSALLREGCRARFVAERDSEDDGEEPVVFPESPLQSPTVLVAVLARNAAHTLPHFLGCLERLDYPKSRMAIWAATDHNVDNTTEIFREWLKNVQRLYHYVEWRPMDEPESYPDEIGPKHWPTSRFAHVMKLRQAALRTAREKWSDYILFIDVDNFLTNPQTLNLLIAENKTIVAPMLESRGLYSNFWCGITPKGFYKRTPDYVQIREWKRTGCFPVPMVHSTFLIDLRKEASDKLTFYPPHQDYTWTFDDIIVFAFSSRQAGIQMYLCNREHYGYLPIPLKPHQTLQEDIENLIHVQIEAMIDRPPMEPSQYVSVVPKYPDKMGFDEIFMINLKRRKDRRDRMLRTLYEQEIEVKIVEAVDGKALNTSQLKALNIEMLPGYRDPYSSRPLTRGEIGCFLSHYSVWKEVIDRELEKTLVIEDDVRFEHQFKKKLMKLMDNIDQAQLDWELIYIGRKRMQVKEPEKAVPNVANLVEADYSYWTLGYVISLEGAQKLVGANPFGKMLPVDEFLPVMYNKHPVAEYKEYYESRDLKAFSAEPLLIYPTHYTGQPGYLSDTETSTIWDNETVATDWDRTHAWKSRKQSRIYSNAKNTEALPPPTSLDTVPSRDEL

SEQ ID NO: 184467 - protein, 363 aa, Artificial Sequence
  derived and/or modified sequence
MFSDCWLCPSLGSSGIQMYLCNREHYGYLPIPLKPHQTLQEDIENLIHVQIEAMIDRPPMEPSQYVSVVPKYPDKMGFDEIFMINLKRRKDRRDRMLRTLYEQEIEVKIVEAVDGKALNTSQLKALNIEMLPGYRDPYSSRPLTRGEIGCFLSHYSVWKEVIDRELEKTLVIEDDVRFEHQFKKKLMKLMDNIDQAQLDWELIYIGRKRMQVKEPEKAVPNVANLVEADYSYWTLGYVISLEGAQKLVGANPFGKMLPVDEFLPVMYNKHPVAEYKEYYESRDLKAFSAEPLLIYPTHYTGQPGYLSDTETSTIWDNETVATDWDRTHAWKSRKQSRIYSNAKNTEALPPPTSLDTVPSRDEL

SEQ ID NO: 184468 - DNA, 1881 bp, Artificial Sequence
  derived and/or modified sequence
atggccgccagacccgccgccaccctggcctggagcctgctgctgctgagcagcgccctgctgagagagggctgcagagccagattcgtggccgagagagacagcgaggacgacggcgaggagcccgtggtgttccccgagagccccctgcagagccccaccgtgctggtggccgtgctggccagaaacgccgcccacaccctgccccacttcctgggctgcctggagagactggactaccccaagagcagaatggccatctgggccgccaccgaccacaacgtggacaacaccaccgagatcttcagagagtggctgaagaacgtgcagagactgtaccactacgtggagtggagacccatggacgagcccgagagctaccccgacgagatcggccccaagcactggcccaccagcagattcgcccacgtgatgaagctgagacaggccgccctgagaaccgccagagagaagtggagcgactacatcctgttcatcgacgtggacaacttcctgaccaacccccagaccctgaacctgctgatcgccgagaacaagaccatcgtggcccccatgctggagagcagaggcctgtacagcaacttctggtgcggcatcacccccaagggcttctacaagagaacccccgactacgtgcagatcagagagtggaagagaaccggctgcttccccgtgcccatggtgcacagcaccttcctgatcgacctgagaaaggaggccagcgacaagctgaccttctaccccccccaccaggactacacctggaccttcgacgacatcatcgtgttcgccttcagcagcagacaggccggcatccagatgtacctgtgcaacagagagcactacggctacctgcccatccccctgaagccccaccagaccctgcaggaggacatcgagaacctgatccacgtgcagatcgaggccatgatcgacagaccccccatggagcccagccagtacgtgagcgtggtgcccaagtaccccgacaagatgggcttcgacgagatcttcatgatcaacctgaagagaagaaaggacagaagagacagaatgctgagaaccctgtacgagcaggagatcgaggtgaagatcgtggaggccgtggacggcaaggccctgaacaccagccagctgaaggccctgaacatcgagatgctgcccggctacagagacccctacagcagcagacccctgaccagaggcgagatcggctgcttcctgagccactacagcgtgtggaaggaggtgatcgacagagagctggagaagaccctggtgatcgaggacgacgtgagattcgagcaccagttcaagaagaagctgatgaagctgatggacaacatcgaccaggcccagctggactgggagctgatctacatcggcagaaagagaatgcaggtgaaggagcccgagaaggccgtgcccaacgtggccaacctggtggaggccgactacagctactggaccctgggctacgtgatcagcctggagggcgcccagaagctggtgggcgccaaccccttcggcaagatgctgcccgtggacgagttcctgcccgtgatgtacaacaagcaccccgtggccgagtacaaggagtactacgagagcagagacctgaaggccttcagcgccgagcccctgctgatctaccccacccactacaccggccagcccggctacctgagcgacaccgagaccagcaccatctgggacaacgagaccgtggccaccgactgggacagaacccacgcctggaagagcagaaagcagagcagaatctacagcaacgccaagaacaccgaggccctgcccccccccaccagcctggacaccgtgcccagcagagacgagctgtag

SEQ ID NO: 184469 - DNA, 5177 bp, Artificial Sequence
  derived and/or modified sequence
cacaactcgcggctctagggaaggccacagacctcagctgtacgagcggaacctggactagaggaactttcctcaggactcagggcacacagcccctcggccactactgtctgcgagcccgaggcgcaggggagcgccagcggctgcaggtacgctgcgcacccgcactggggcctgggcggtgcagcggcggcgggagggtcctgggaaccgcagccgccgaggccagtgtgtgagccggccggccgcggcaagccgcatcccccggccgcccctcgcagccccttgctccccggcagccgccgccgccctcaggcagcccagccgggcgctcgcgccaggacttccccgccgcccgcctcggcccggaacatggctgcgcgccctgctgccaccctcgcctggtcgctactgctcctctcctcagccctgctccgcgaaggctgccgagcgcgcttcgtcgccgagcgggactcggaggacgacggagaggagccggtggttttcccggagtcgcccctgcagagccccacggtgctcgtggcggtcctcgcccgcaacgcggcgcacacgctgccgcacttcctcggctgcctggagcggctggactaccccaagagcaggatggccatctgggcagccactgatcacaatgtggataatacaacagaaatattcagggagtggttgaaaaatgtacagagactctatcactatgtggagtggaggcctatggatgaaccagagtcttaccctgatgaaattggaccaaagcactggccaacctcccggtttgcccatgtgatgaaactacgacaggcagcccttcgaactgcgagggaaaaatggtcagactacattctgttcatagatgttgacaatttcctgactaatccacagaccctcaatctactgattgcagaaaacaaaactattgtggcccccatgctggagtctcggggcctgtattctaatttctggtgcggaatcacccctaagggcttctataagaggaccccagactacgttcagattcgagaatggaagaggacaggctgcttccccgtccccatggtccactccaccttcctaattgacctcaggaaggaggcctcggacaagctgactttctaccccccacaccaggactacacctggacctttgatgacatcattgtctttgccttctccagcaggcaagcaggcatccagatgtacctctgcaacagagagcactatggctacctgcccatccccctgaagccccatcagacactgcaggaagacatcgagaacctcatccatgtgcagattgaagcaatgattgaccgtcctccaatggaaccctcccagtatgtctcagttgtccctaaatatccagacaagatgggatttgatgagattttcatgataaacctcaaacgcagaaaggacaggcgggaccggatgctgcgcacactgtatgaacaggagattgaggtcaagattgtcgaggctgtggatggaaaggcactcaacacaagccagctgaaggcactgaatattgaaatgctgcctggctatcgagatccctattcctccaggcctctaacaaggggtgaaatcggctgctttctcagccactactcagtctggaaagaggtaattgatcgagagctagagaagactcttgtaattgaagacgatgtgcgttttgagcatcagtttaagaagaagctgatgaagctgatggataacattgaccaggctcagctggactgggaactgatttatattggtaggaagaggatgcaagtaaaggagccagagaaagcagtgcccaatgtggcaaacctggtcgaagccgactattcctactggaccctgggctacgtcatctctctggaaggagcacagaagctggttggagccaatccttttgggaagatgctgccagtggatgagtttctgccagtcatgtacaacaagcatcccgtagccgagtacaaggagtattatgaatccagggacctgaaagccttctctgcagaacccttgctcatctaccctacgcactacacaggccagccggggtacctgagtgacacggagacctccaccatctgggacaatgagacagtggccaccgactgggataggacacatgcctggaagtcccggaagcaaagccgcatctacagcaatgccaagaacacagaggccctgccaccgccaacctccctggacactgtgccttcaagggatgagctatgaaggctccctgggagtgtggcccacatcagttcaacatcctctggtttttctaaagggctattcatctgtttgctccagttttctgttttgttttgttcttagtggtcacagtcatctaaccaaagtgatctagtgtgatagatcgaaattaacatatttttgaccatggaaggaaataaggaaattcaacccaaatttcccaagacggctgaaagacaggttttttggaaactgttaagataaactgtaatccagacacctaattcttcagttcactactcatgtgatactgattcccacattaaggttgaacaacatggctcagagtcttgttcaagagaaagtgatcaccgagctgtcacatcagcaaatatgtagtcaaggcagccaggccaactagaccacacttattggtctagtttgtccgttttatatgacattgaaaacttgtgtgtgcaacttttgggggacaggaatcacttaaaatcatatttatttggctttttatttaaaggattctgtcacaagtcttattgaaaagtagattttttaaaaaaaaaaaatcttagtccctgttatccagtaggggtgggtatttgggtccgactgagacttggcctgtgaccatcatggcagttggagttctcatatagaggtgaccagtttgccatgtggatataatttagtagatatttgacagtttgtgtaggtatttgagggaaaaaactcaatgtttggcttttttattatggccactcgagtcaggatgctctatttataaagataaatgtaatatataaagggtgaggactggctgtgcatcctgccctgtcccgggtttgcgcgctgctacagagcttcacgctctccgctccaccccttagcctgggaacccaccgcaggtgtgagttctgtgagtcactgctaagagacagagcacattttcaggccagcaactatccttgccagagttttttcattatattttgaattatttattttacaaaatgggcgaagatattgtctttaggataaggcagagaaacagatgttgcagacttccacggcacccgggggagtggtgggtgtggacacattggttcggcaatctgattctcctgaatttcccagccaggctcttgtggggaggcctgtggatggggggatttgaactatttggaaacaaatgattctctatctcaggtgagaaacctggtcagaaacaaagggctggtcacctgatttaggccagcaaccagggaagctcttagaatcccaggcggacaccctttctcaaaagatatcccctaagagtcctttctgctttcttcacagattgattttatgtaaaatgcagagttggactacacgatttcttcccactccacaatctgtcatcctagtatagatcatggtggtttccctcaagtttatgttctcatgccctcaatctgtaaatttttgtctccagaaaaaccctcccaggcatcccataccagcaccgttcctcatcactgtccatgcaccatgcagccatatggggggccgtgcacaccccaaaccctgagcttcacacttaaactcatggggagggcccttcagagcagagtccacaggcgggtggtgctacatacacaagcttagtgtacgagtgtaagatacactttaagccagacacctaattcttcagttcactgcccatgtgatactgattgccacattaaggttgaacagcatggctcagagtctagagaaagtgatcaccaagctgtctcatcaccaaataggtagtcaaggcagcctcatctccccaggtgaggggcgggtccccactttaggacaagaggcagcttgccttccaccagacgccagcctcggccttccttcccgactcactgtgggtacccttctacactgaccagcaagctaggccgctggaggaaagggaactcacccaactctaaattgtgccgcttagacttagctgtcagtgtgacttcctttcccacccacccccagaaaaacagaaagagcatctggggagcgagtgaaaattccttaggtgattcctaagatttccttgggtatctggtttttgttttcatatttgagtgtgtgcatgtgtgcatgactttaatgacttttttaatggggtgggaggtggctggggtgctggggttgaaggaagtttgggttgatttttgtggtgttttgtttaatagagaattttttttttcctgttcccctgtcagctggtctgacagatttaagaactctcattcttaaaagactttggacttaaattctagcattttagactaggactgttctactgtgaagaaagttctgtctcctttagcccggtttgtttctccctgctcaggtctagaatcccaagcagtgttcttttctggtgaacactgtgagccgcagatgtgactttttttttaaagtcatctcttcagcaatccagaggttccttgacctcattatttgtcctatctctcccttatagtcctaagccaagacatttgacctttgacatttgacctttgcagtgtcatgtgagggcgtcagtatagaggcctttgcatctgggcctggcacccgctctctgcctctggaggctaaaccctgtctggatttctcttgggatctaacgtgggatcttctggacagacaaccgtgacatcagcagtgctggtgctgctgtgtgtggactgaacacctgcactttgcagaggacacgctgcatgggccccgcttgcggttcattcaggcctgctgcaggagctctgagaacaagaaagagtggacacccgttcccctgcatcatctgtcttgcgtgctatttcagagtggggaagtgataaactatttgccttctggagctctttgtgaaaaattaaaaaaaaacttagctc

SEQ ID NO: 184470 - DNA, 1881 bp, Artificial Sequence
  derived and/or modified sequence
atggcggcaagaccggccgcgactctggcttggagcttattgcttctgtcttctgccctgttgcgggagggctgcagggcacgctttgtcgcggagcgtgactcagaagatgacggggaggaacctgtcgtctttcctgagagcccactgcagagtccgacagtgctcgtcgcggtattagcccgcaatgctgctcacacccttccccacttcctggggtgtttagaaagactggattatccaaaaagtaggatggctatatgggccgcgaccgatcacaatgtcgacaacaccaccgaaattttccgggaatggctgaaaaatgtgcaaagattgtaccactacgttgaatggcgcccaatggacgagccagagagctatcctgacgaaatcgggccaaaacactggcccacatcccgatttgcccatgtgatgaaactgaggcaggctgctctcaggaccgcacgcgaaaagtggtctgattatatcctcttcattgatgtggacaactttctgaccaatccccagaccctcaatttgttgatcgcagagaacaagacaatagtcgccccaatgctcgagtctagaggactgtattccaacttctggtgtgggattacccccaagggcttttataagaggacccccgattatgtgcagatccgtgagtggaagagaaccggatgtttcccagtcccgatggtgcattccacctttttaattgacctgcgcaaagaagcatccgacaaactgaccttctaccccccccaccaggactacacctggaccttcgatgacatcatcgtatttgctttctcaagccggcaggccggtatacagatgtacctgtgtaacagggaacactatgggtacttgcctatcccgttgaagccacatcagacccttcaagaggacatcgagaatcttattcatgtgcaaattgaagcaatgattgatcggccccctatggagccaagccagtacgtgagtgtggtccccaagtaccctgacaaaatgggattcgatgaaatttttatgatcaatcttaagcggaggaaggacaggagggacaggatgctgaggaccttatacgagcaggagatcgaggtgaaaattgtggaggctgtggacggcaaggcattgaacacctcccaattgaaagcattgaatattgagatgcttccaggctacagggatccctatagcagtcgaccccttactagaggggaaattggctgcttccttagccactactctgtgtggaaagaggtcatcgatagggaactagagaagaccctggtcattgaggatgatgttcgttttgaacatcagtttaagaaaaaattgatgaagctgatggacaatattgaccaggcgcagctggattgggagttaatttacattgggcgcaaaagaatgcaggtcaaggagccagaaaaggctgttcccaacgtggctaatttagtggaggcagactacagctactggactctgggctatgtgatttctttggaaggggcccaaaaactcgtcggggcgaacccatttgggaaaatgctaccagtagacgagtttctgcctgtaatgtacaataaacacccagtggccgaatataaggagtactatgagtccagggacttaaaagctttctctgccgagccgctgttgatttacccaacacactacactggacagcccggatacctttctgatactgaaacgtctacaatctgggacaatgagacagttgctacagattgggaccgaacgcacgcctggaaatctcgtaagcaaagccgtatctattcaaatgcgaagaataccgaagcactgccaccccccacatccctcgacacagtgcctagtagagacgagttatag

SEQ ID NO: 184471 - DNA, 1881 bp, Artificial Sequence
  derived and/or modified sequence
atggccgcccggcctgctgccaccctggcctggagcctgctgctgctgagcagcgccctgctgcgggagggctgccgggccaggtttgtggccgagcgggacagtgaagatgatggagaggagcctgtggtgtttcctgagagccccctgcagagccccaccgtgctggtggccgtgctggccagaaatgctgcccacaccctgccccacttcctgggctgcctggagcggctggactaccccaagagcaggatggccatctgggccgccacagaccacaacgtggacaacaccacagagatcttccgggagtggctgaagaatgtgcagaggctgtaccactacgtggagtggaggcccatggatgagcctgagagctacccagatgaaattggccccaagcactggcccaccagcagatttgcccacgtgatgaagctgcggcaggccgccctgaggacagcccgggagaagtggagcgactacatcctcttcattgatgtggacaacttcctgaccaacccccagaccctgaacctgctgattgctgagaacaagaccatcgtggcccccatgctggagagccggggcctgtacagcaacttctggtgtggcatcacccccaagggcttctacaagaggaccccagactatgtgcagatccgggagtggaagaggacaggctgcttccctgtgcccatggtgcacagcaccttcctgattgacctgaggaaggaggccagtgacaagctgaccttctacccaccccaccaggactacacctggacctttgatgacatcatcgtgtttgccttcagcagccggcaggccggcatccagatgtacctgtgcaaccgggagcactacggctacctgcccatccccctgaagccccaccagaccctgcaggaggacattgaaaatctcatccacgtgcagatcgaggccatgattgacaggcctcccatggagcccagccagtatgtgtctgtggtgcccaagtacccagacaagatgggctttgatgagatcttcatgatcaacctgaagaggaggaaggacagaagagacaggatgctgcggaccctgtatgagcaggagattgaggtgaagatcgtggaggccgtggatggcaaggccctgaacaccagccagctgaaggccctgaacatcgagatgctgcccggctacagagacccctacagcagccggcccctgaccagaggagaaattggctgcttcctgagccactacagcgtgtggaaggaggtgattgaccgggagctggagaagaccctggtgattgaagatgatgtgcgctttgagcaccagttcaagaagaagctgatgaagctgatggacaacatcgaccaggcccagctggactgggagctgatctacatcggcaggaagaggatgcaggtgaaggagcctgagaaggctgtgcccaacgtggccaacctggtggaggccgactacagctactggaccctgggctacgtgatcagcctggagggcgcccagaagctggtgggcgccaacccctttgggaagatgctgcctgtggatgagttcctgcctgtgatgtacaacaagcaccctgtggccgagtacaaggagtactatgagagccgggacctgaaggccttctctgctgagcccctgctgatctaccccacccactacacaggccagcccggctacctgagtgacacagagaccagcaccatctgggacaatgagaccgtggccacagactgggacaggacccacgcctggaagagcaggaagcagagccgcatctacagcaatgccaagaacacagaggccctgcccccacccaccagcctggacacagtgcccagcagagatgagctgtag

SEQ ID NO: 184472 - DNA, 1881 bp, Artificial Sequence
  derived and/or modified sequence
atggccgcccggcccgccgccaccctggcctggagcctgctgctgttgtcttctgcactgctgcgcgaaggatgtagggcacggttcgtggccgagcgcgattcagaagacgacggagaagaacctgtggttttccccgaatcacccctgcagtcaccgactgtgttggttgcggtcctggcacgaaacgccgctcatactctccctcattttctgggctgcctagaaaggctggattaccccaagtcccgtatggccatttgggcagctactgaccacaatgttgacaacaccacggaaatttttcgagagtggctgaaaaatgtgcaaaggctttaccactatgtcgaatggcgacctatggatgagcccgaatcgtaccccgatgagattggacctaagcattggccaacttcacggtttgcccacgtgatgaagctgaggcaagccgctcttagaactgcacgcgaaaagtggtccgattacatactcttcatcgacgttgataatttcctgaccaacccccagaccctgaatcttcttatcgctgagaataaaactatcgtcgcccccatgctggaatcccgcggcttatactccaacttctggtgcggcattacacccaagggcttttataagcggactcctgattacgtccagatcagagaatggaaaagaacaggctgcttccccgtgcctatggttcattcgacgttcctgatcgacctgaggaaagaggctagcgataagttgactttctaccccccgcaccaggactacacatggacctttgatgacatcatcgttttcgcgttttcctcacgccaggcaggaatccaaatgtatctctgtaatagagagcactatggctacctgcccattccgctcaagccacaccagacactccaggaagacatcgaaaacctgattcacgtgcagatagaagcaatgatcgatcggccccctatggagcccagccagtacgtgtccgtggtaccaaaataccctgataagatgggcttcgacgaaatcttcatgattaatctgaaacgcaggaaggaccggagggaccgcatgctgcgaacgctgtacgaacaagagattgaggtgaagatagttgaggcagtagatggtaaggccctcaacacatctcagctgaaggctctaaatatcgaaatgcttcccggctacagagatccttacagtagcaggcctctgactaggggcgaaataggctgtttcctaagtcattactccgtctggaaggaggtaatcgaccgggaactagagaaaacccttgtcatcgaggatgacgtacggtttgagcatcagttcaagaagaaattgatgaaactcatggataatatcgatcaggcccaacttgattgggagctgatttatattgggaggaagcgcatgcaggtcaaggagcctgagaaggctgtacccaacgtggccaacctggttgaggcagattattcctactggaccctgggatacgtgatatctctggagggcgctcagaagctagtaggtgcaaacccgtttggcaaaatgctccctgtcgatgagttcttacccgttatgtataataagcaccccgttgccgaatataaagaatactacgagagccgggacctgaaagcattttcagcagagcctctgcttatctaccctacacattataccggccaacctgggtaccttagcgatactgaaacttcaacaatatgggacaatgagactgtggcaaccgattgggaccgaactcacgcttggaaaagtcgaaaacagtccaggatttattctaatgctaagaacaccgaagcgctgcctccgcctacttccttggatacagtccccagccgtgacgaactatag

SEQ ID NO: 184473 - DNA, 1881 bp, Artificial Sequence
  derived and/or modified sequence
atggccgctcgccctgcagcgactctggcttggtcattactgttgctgtctagcgccctgctgagggagggctgcagagctcgctttgtcgcggaaagggatagtgaggacgacggagaggaacccgtggtcttccccgagagccctctccaatctccaacagtgttagttgcagttctagcaagaaacgcggcacacacactgccacatttcctgggctgtctggaacgcctggactatcctaagtcaaggatggcaatctgggccgcaactgaccacaacgtcgataatacaactgagattttccgggagtggctcaagaatgtacaaaggttgtaccactacgtagagtggagacctatggacgaacctgaaagttaccctgacgagattgggcctaaacactggcctacatcacgtttcgcccatgtcatgaaactgaggcaggccgctctccggacggcccgagaaaaatggagcgactacatcctgtttatcgatgtggacaatttccttacgaatccgcagactttgaacctgctcatagccgaaaataaaacgatagttgccccaatgctggagtccagagggctatatagcaatttctggtgtggaatcacaccaaaaggcttttacaagcgcacacccgattatgtgcagattcgtgagtggaagcgtaccggttgctttccggtaccaatggtccacagcaccttccttatcgacctgagaaaggaggcctctgacaagctgaccttctatcctcctcatcaggactacacttggacctttgatgacattatcgtgtttgctttcagctcccggcaggcaggaatacagatgtatctttgtaatagggaacactacgggtatcttcctatcccgttgaaaccgcaccaaacactgcaagaggatatcgagaatctcatccatgtccagatcgaggctatgatcgatagacccccaatggaacccagtcaatacgtctccgtcgttccaaaatatcctgacaagatgggatttgatgagattttcatgattaatctaaaacgaaggaaagatagacgggaccggatgcttcgcacgttgtatgagcaggagatcgaagttaaaattgtggaggcagtggacggcaaagctctcaacacttcccagttgaaagccctgaacatcgagatgttacccggataccgcgacccttactcctctagacccctcactcgtggagagatcggatgttttctgagtcattactccgtgtggaaagaagtgatcgatcgcgaacttgagaagactcttgtgattgaagacgatgtgcgattcgaacaccaattcaagaagaagcttatgaagctgatggacaacatcgaccaggctcagctagactgggagctgatatatattggcaggaaaaggatgcaagtaaaagagccagaaaaagcggttcctaacgtagctaatctggtagaggccgactactcgtactggacccttggatatgtaatttcactagagggcgcacaaaagctggtaggcgcaaacccttttggaaaaatgctgcctgtggatgagttcctgcctgtcatgtacaataagcatccagtggcggagtataaagagtactacgagagtcgcgacctaaaagcctttagtgccgagcccttgctgatttatccgacgcattatacaggccagccgggatacctcagcgacaccgagacgagcaccatttgggataacgaaaccgtcgctacagactgggaccgcactcacgcctggaagagtcgtaaacagagtcgcatttattctaatgccaaaaacacagaagccttaccgccacctactagtcttgacaccgtcccttcaagggatgagctatag

SEQ ID NO: 184474 - protein, 1925 aa, Artificial Sequence
  derived and/or modified sequence
MAPRAAGGAPLSARAAAASPPPFQTPPRCPVPLLLLLLLGAARAGALEIQRRFPSPTPTNNFALDGAAGTVYLAAVNRLYQLSGANLSLEAEAAVGPVPDSPLCHAPQLPQASCEHPRRLTDNYNKILQLDPGQGLVVVCGSIYQGFCQLRRRGNISAVAVRFPPAAPPAEPVTVFPSMLNVAANHPNASTVGLVLPPAAGAGGSRLLVGATYTGYGSSFFPRNRSLEDHRFENTPEIAIRSLDTRGDLAKLFTFDLNPSDDNILKIKQGAKEQHKLGFVSAFLHPSDPPPGAQSYAYLALNSEARAGDKESQARSLLARICLPHGAGGDAKKLTESYIQLGLQCAGGAGRGDLYSRLVSVFPARERLFAVFERPQGSPAARAAPAALCAFRFADVRAAIRAARTACFVEPAPDVVAVLDSVVQGTGPACERKLNIQLQPEQLDCGAAHLQHPLSILQPLKATPVFRAPGLTSVAVASVNNYTAVFLGTVNGRLLKINLNESMQVVSRRVVTVAYGEPVHHVMQFDPADSGYLYLMTSHQMARVKVAACNVHSTCGDCVGAADAYCGWCALETRCTLQQDCTNSSQQHFWTSASEGPSRCPAMTVLPSEIDVRQEYPGMILQISGSLPSLSGMEMACDYGNNIRTVARVPGPAFGHQIAYCNLLPRDQFPPFPPNQDHVTVEMSVRVNGRNIVKANFTIYDCSRTAQVYPHTACTSCLSAQWPCFWCSQQHSCVSNQSRCEASPNPTSPQDCPRTLLSPLAPVPTGGSQNILVPLANTAFFQGAALECSFGLEEIFEAVWVNESVVRCDQVVLHTTRKSQVFPLSLQLKGRPARFLDSPEPMTVMVYNCAMGSPDCSQCLGREDLGHLCMWSDGCRLRGPLQPMAGTCPAPEIHAIEPLSGPLDGGTLLTIRGRNLGRRLSDVAHGVWIGGVACEPLPDRYTVSEEIVCVTGPAPGPLSGVVTVNASKEGKSRDRFSYVLPLVHSLEPTMGPKAGGTRITIHGNDLHVGSELQVLVNDTDPCTELMRTDTSIACTMPEGALPAPVPVCVRFERRGCVHGNLTFWYMQNPVITAISPRRSPVSGGRTITVAGERFHMVQNVSMAVHHIGREPTLCKVLNSTLITCPSPGALSNASAPVDFFINGRAYADEVAVAEELLDPEEAQRGSRFRLDYLPNPQFSTAKREKWIKHHPGEPLTLVIHKEQDSLGLQSHEYRVKIGQVSCDIQIVSDRIIHCSVNESLGAAVGQLPITIQVGNFNQTIATLQLGGSETAIIVSIVICSVLLLLSVVALFVFCTKSRRAERYWQKTLLQMEEMESQIREEIRKGFAELQTDMTDLTKELNRSQGIPFLEYKHFVTRTFFPKCSSLYEERYVLPSQTLNSQGSSQAQETHPLLGEWKIPESCRPNMEEGISLFSSLLNNKHFLIVFVHALEQQKDFAVRDRCSLASLLTIALHGKLEYYTSIMKELLVDLIDASAAKNPKLMLRRTESVVEKMLTNWMSICMYSCLRETVGEPFFLLLCAIKQQINKGSIDAITGKARYTLSEEWLLRENIEAKPRNLNVSFQGCGMDSLSVRAMDTDTLTQVKEKILEAFCKNVPYSQWPRAEDVDLEWFASSTQSYILRDLDDTSVVEDGRKKLNTLAHYKIPEGASLAMSLIDKKDNTLGRVKDLDTEKYFHLVLPTDELAEPKKSHRQSHRKKVLPEIYLTRLLSTKGTLQKFLDDLFKAILSIREDKPPLAVKYFFDFLEEQAEKRGISDPDTLHIWKTNSLPLRFWVNILKNPQFVFDIDKTDHIDACLSVIAQAFIDACSISDLQLGKDSPTNKLLYAKEIPEYRKIVQRYYKQIQDMTPLSEQEMNAHLAEESRKYQNEFNTNVAMAEIYKYAKRYRPQIMAALEANPTARRTQLQHKFEQVVALMEDNIYECYSEA

SEQ ID NO: 184475 - protein, 1785 aa, Artificial Sequence
  derived and/or modified sequence
MAPRAAGGAPLSARAAAASPPPFQTPPRCPVPLLLLLLLGAARAGALEIQRRFPSPTPTNNFALDGAAGTVYLAAVNRLYQLSGANLSLEAEAAVGPVPDSPLCHAPQLPQASCEHPRRLTDNYNKILQLDPGQGLVVVCGSIYQGFCQLRRRGNISAVAVRFPPAAPPAEPVTVFPSMLNVAANHPNASTVGLVLPPAAGAGGSRLLVGATYTGYGSSFFPRNRSLEDHRFENTPEIAIRSLDTRGDLAKLFTFDLNPSDDNILKIKQGAKEQHKLGFVSAFLHPSDPPPGAQSYAYLALNSEARAGDKESQARSLLARICLPHGAGGDAKKLTESYIQLGLQCAGGAGRGDLYSRLVSVFPARERLFAVFERPQGSPAARAAPAALCAFRFADVRAAIRAARTACFVEPAPDVVAVLDSVVQGTGPACERKLNIQLQPEQLDCGAAHLQHPLSILQPLKATPVFRAPGLTSVAVASVNNYTAVFLGTVNGRLLKINLNESMQVVSRRVVTVAYGEPVHHVMQFDPADSGYLYLMTSHQMARVKVAACNVHSTCGDCVGAADAYCGWCALETRCTLQQDCTNSSQQHFWTSASEGPSRCPAMTVLPSEIDVRQEYPGMILQISGSLPSLSGMEMACDYGNNIRTVARVPGPAFGHQIAYCNLLPRDQFPPFPPNQDHVTVEMSVRVNGRNIVKANFTIYDCSRTAQVYPHTACTSCLSAQWPCFWCSQQHSCVSNQSRCEASPNPTSPQDCPRTLLSPLAPVPTGGSQNILVPLANTAFFQGAALECSFGLEEIFEAVWVNESVVRCDQVVLHTTRKSQVFPLSLQLKGRPARFLDSPEPMTVMVYNCAMGSPDCSQCLGREDLGHLCMWSDGCRLRGPLQPMAGTCPAPEIHAIEPLSGPLDGGTLLTIRGRNLGRRLSDVAHGVWIGGVACEPLPDRYTVSEEIVCVTGPAPGPLSGVVTVNASKEGKSRDRFSYVLPLVHSLEPTMGPKAGGTRITIHGNDLHVGSELQVLVNDTDPCTELMRTDTSIACTMPEGALPAPVPVCVRFERRGCVHGNLTFWYMQNPVITAISPRRSPVSGGRTITVAGERFHMVQNVSMAVHHIGREPTLCKVLNSTLITCPSPGALSNASAPVDFFINGRAYADEVAVAEELLDPEEAQRGSRFRLDYLPNPQFSTAKREKWIKHHPGEPLTLVIHKEQDSLGLQSHEYRVKIGQVSCDIQIVSDRIIHCSVNESLGAAVGQLPITIQVGNFNQTIATLQLGGSETAIIVSIVICSVLLLLSVVALFVFCTKSRRAERYWQKTLLQMEEMESQIREEIRKGFAELQTDMTDLTKELNRSQGIPFLEYKHFVTRTFFPKCSSLYEERYVLPSQTLNSQGSSQAQETHPLLGEWKIPESCRPNMEEGISLFSSLLNNKHFLIVFVHALEQQKDFAVRDRCSLASLLTIALHGKLEYYTSIMKELLVDLIDASAAKNPKLMLRRTESVVEKMLTNWMSICMYSCLRETVGEPFFLLLCAIKQQINKGSIDAITGKARYTLSEEWLLRENIEAKPRNLNVSFQGCGMDSLSVRAMDTDTLTQVKEKILEAFCKNVPYSQWPRAEDVDLEWFASSTQSYILRDLDDTSVVEDGRKKLNTLAHYKIPEGASLAMSLIDKKDNTLGRVKDLDTEKYFHLVLPTDELAEPKKSHRQSHRKKVLPEIYLTRLLSTKGTLQKFLDDLFKAILSIREDKPPLAVKYFFDFLEEQAEKRGISDPDTLHIWKTNRWRPSSPVLGEHPEEPPVCL

SEQ ID NO: 184476 - DNA, 5778 bp, Artificial Sequence
  derived and/or modified sequence
atggctcctcgagcagccgggggtgcgccactgagcgcaagggctgcagccgcctcgccccctccgtttcagacacctcctcgttgcccagtgccattgctgctccttttgctgctgggcgccgcaagggctggcgctctcgagatccagagacgctttccttctccaactcccacaaacaactttgccctggatggagctgccggaacagtctacctcgcagctgtcaacagactgtatcagctgagcggggccaatctaagcctcgaggcagaggctgccgtcggacccgtccccgactccccactctgccacgcaccccagttacctcaggcctcgtgtgagcaccctcggagactaactgacaactacaataagatactgcagttggaccccggccagggcctggtggtcgtttgcggctccatctaccagggtttttgccagctgagacgccgagggaatatcagtgcagtggccgtcagatttccgccggcggccccacccgcagaaccagtgacggtgttccccagtatgcttaacgtggccgcgaatcaccccaacgccagtaccgtgggattggtgctcccccccgccgccggagcgggtggttccaggctattggtaggggcgacatacacaggctacgggagctctttctttccccgcaaccggtcgctcgaagaccaccgattcgaaaatacacccgagattgctatacgttctctggacaccaggggcgatcttgcgaaactgtttacattcgacctgaacccatcagatgataatatattgaagattaaacaaggtgccaaagagcaacacaagctgggatttgtgtcggccttcctccaccccagtgacccaccccccggagcacaaagctacgcatatctagccctgaactccgaggctagggctggagacaaggagtcccaagctcggagcctgctagcccgcatatgcctgcctcatggggccggcggcgacgccaagaaattgactgagtcgtacatccaactaggacttcagtgtgcaggtggggctggtagaggcgatctgtacagtcgcttggtatccgtatttcctgcccgggaaagactgttcgccgtgttcgagagacctcagggctcccccgctgccagagcagctcctgccgctctctgtgccttcaggttcgccgacgtgcgagccgccatcagggccgcccggactgcgtgttttgtggaacctgctcccgatgtggtcgcagtcctcgatagcgtggtgcagggaacaggaccggcttgcgagaggaaactcaatattcagctgcagcccgagcagctggactgtggtgcagctcatctgcagcacccactctcgatcctccagccactcaaagcaacgcccgtgttccgggcacccgggttaacttccgtggccgtggccagtgtgaacaattatacagcggtgtttcttgggactgtaaacggcaggcttctcaaaattaaccttaatgaatctatgcaggtggtctcaagacgtgtggtgacagtagcttacggtgaacctgtacaccacgtgatgcagttcgatcctgcagattcaggttacctctatctcatgaccagccaccaaatggcacgggtgaaggtcgccgcttgtaacgtccactccacctgcggcgattgtgtgggggctgcagatgcttattgtggatggtgcgccctcgagacccgatgcacactccagcaggattgtactaactcctctcagcagcatttctggacctcagcgtctgagggcccctcacggtgccccgcaatgactgttctcccctctgagattgatgtccgacaggaatacccgggcatgattctgcagatcagcggatccctcccctctttgagtggcatggagatggcctgcgattacggtaataacatcagaacagttgcgagagtacctggccccgctttcgggcaccagatcgcttactgcaatctgctcccacgggatcaattccctcctttcccccccaaccaggatcatgttacagttgaaatgtctgttcgagtgaatggacgcaatattgtgaaggccaatttcacaatatatgactgctcacggacagctcaagtgtatccacacacagcctgcaccagctgcctgtctgctcagtggccctgtttctggtgtagccagcaacattcatgtgtgtctaatcagtccaggtgcgaggcatcccccaatcccacctcgccacaggactgccctcggactctactctccccactcgctccagtgcctacgggagggtcacagaacattctcgtgcccctggcaaacacagccttctttcagggggccgctctggagtgcagcttcggactagaagaaatctttgaagcagtatgggtgaacgaaagcgttgtgcgctgtgatcaggtggtgctgcatacgactaggaaaagccaagtctttcccttgtcattgcaactgaagggtagaccagccaggttcctcgactcaccagaacccatgaccgtaatggtgtacaattgcgcaatgggcagtcctgactgctcccagtgtctgggcagggaggacctgggccatctttgcatgtggagcgacggatgccgtctccgtggaccattgcaacctatggccggaacctgcccagcgccagaaattcatgccattgaaccacttagcggccccctagacggaggaaccctgctgacgatccgtgggcgtaacctcggaaggcggctctctgacgttgctcatggcgtgtggattggcggcgttgcctgtgaacctctacccgacaggtatacagtgtctgaggagattgtgtgtgtgaccggcccggctcccggtccgttgtcaggagtggtgaccgtcaatgccagtaaggaaggaaaatcaagggacagattctcctacgtccttcctttggttcacagcttagagcctacaatgggcccgaaggccggtggcacccggatcacaatacacggaaacgatttgcatgtcggaagtgaacttcaagtgctggtgaacgatactgacccctgtacagaattgatgagaactgataccagtatcgcttgcacaatgccagaaggggccctgccagcaccagtgcccgtgtgcgtgcggttcgagaggcgggggtgtgtgcacgggaaccttaccttttggtacatgcaaaaccccgttatcaccgctatctctccccggcggtccccggtctccggcggacggacaatcaccgtggctggcgaacgcttccatatggtccaaaacgtgtccatggccgtgcaccacatcggtagggaaccgacattatgtaaagttttaaacagtacactgattacctgcccaagccctggtgctctttccaatgccagcgcacccgtggacttttttattaacgggagagcttacgcagacgaggtggccgttgccgaggaactccttgatccagaagaagctcagagaggctctagattccgcctcgactatttgcccaacccccagttcagcactgctaagagagagaaatggatcaaacatcacccgggcgaaccattgacactggtgatccataaagaacaggactccctgggactgcaatctcatgaataccgagtgaagatcggtcaggtttcctgcgacatccagatagtcagcgatcggataattcactgtagtgttaatgagtcactcggggccgccgtggggcagttgcctataactatccaggttgggaacttcaatcaaaccattgctaccttacagcttggcggatctgagactgctatcattgtgtccattgttatttgctccgtcctgctgctgctgagcgtcgtggccctattcgtcttctgcacaaaaagccgccgtgcggagcgatactggcaaaaaaccttgttacaaatggaggagatggaatcgcagataagagaggagattcgcaagggatttgctgagttacagaccgatatgaccgatctgactaaagaactgaaccgaagtcagggcattccttttctggagtataaacacttcgtgactcgaacattcttccctaaatgttcctcactgtatgaagaaagatacgttttaccctctcagacgctgaatagccaggggtcctctcaggcccaggagacccatccgctgctgggcgagtggaaaattccagagtcctgtcgtccaaacatggaagaaggaatctcactgttctccagcttgctcaataacaaacatttcctgattgtgtttgtccacgctcttgagcagcagaaggacttcgcagtgcgggacagatgtagcttggcatcccttctcaccatcgccctccatgggaaactcgaatattatacgtccatcatgaaggaactccttgtggatctgatcgatgcttcagccgcgaagaatccaaaacttatgttgaggcgaaccgaatcagtggtggagaagatgctaaccaactggatgtccatttgcatgtacagctgcttgagggaaacagtcggggagcccttttttctactgctgtgtgctataaagcaacaaatcaacaagggttccatagacgctattacagggaaagctaggtacacactgtcagaagaatggttgttgcgcgaaaatatcgaagcgaagccacgaaatcttaacgtctcgttccaaggttgcggcatggattcactttccgtgcgcgcaatggatacggataccctgacccaagtgaaagaaaagatactcgaggcgttttgtaaaaacgtcccctactcccagtggccaagagctgaggatgtggacttagagtggtttgcatccagtacacaatcgtatatcctgagggatctggacgatacgagcgtagtggaggatgggagaaaaaagttgaacaccctcgcacactacaaaattcctgagggcgcttcactagctatgtctctaatcgacaagaaggataataccttgggcagggtgaaagatctggatacagaaaagtatttccacttggtcctgcctaccgacgagttggcagaacccaagaaatcccaccgtcaatcccaccgtaaaaaggtgttaccagagatctacctcacccgcttgctgtcaacaaaaggcacgctccagaaattcctagatgatttatttaaggcaattctctccatcagagaggacaagccaccccttgccgttaagtactttttcgactttctagaggagcaggccgagaagaggggcattagcgatccagataccctacacatttggaaaaccaactctctacctctccgattttgggtgaatattctaaaaaatccccaattcgtgtttgacatcgataaaactgaccacatcgacgcttgcttatctgtaatagcccaggccttcatcgacgcatgttcgattagcgacctgcagctaggcaaggactccccaactaataagctgctctatgcaaaagagatccctgaataccgaaagattgtgcaaaggtattataaacaaatccaggatatgacacccttgagcgagcaggagatgaacgcacacctggcagaagaatccaggaaataccagaacgaatttaacacaaacgtcgcaatggcagaaatttataaatatgcaaagcggtataggccccagataatggccgctttagaggccaaccctaccgctcgccgaacacaattacagcacaagttcgagcaggtcgttgccctgatggaagacaacatctacgagtgctactccgaggcctag

SEQ ID NO: 184477 - DNA, 5778 bp, Artificial Sequence
  derived and/or modified sequence
atggcccccagggctgctgggggcgcccccctgagcgcccgggctgctgctgccagccccccacccttccagaccccaccccgctgccctgtgcccctgctgctgctgctgctgctgggcgccgcccgggccggggccctggagatccagaggcgcttccccagccccacccccaccaacaactttgccctggatggagctgctggcaccgtgtacctggccgctgtgaacagactctaccagctgagcggggccaacctgagcctggaggccgaggccgctgtgggccctgtgcctgacagccccctgtgccacgccccccagctgccccaggccagctgtgagcacccccggcggctgacagacaactacaacaagatcctgcagctggaccccggccagggcctggtggtggtgtgtggcagcatctaccagggcttctgccagctgcggcggcggggcaacatctctgctgtggccgtgcgcttccccccagctgcccccccagctgagcctgtgaccgtcttccccagcatgctgaatgtggccgccaaccaccccaatgccagcacagtgggcctggtgctgcccccagctgctggggccggcggcagccggctgctggtgggcgccacctacacaggctacggcagcagcttcttccccaggaacagaagcctggaggaccacagatttgagaacaccccagagatcgccatccgcagcctggacaccaggggggacctggccaagctgttcacctttgacctgaaccccagtgatgacaacatcctgaagatcaagcagggcgccaaggagcagcacaagctgggctttgtgtctgccttcctgcaccccagcgaccccccacctggggcccagagctatgcctacctggccctgaacagcgaggcccgggccggggacaaggagagccaggcccggagcctgctggcccgcatctgcctgccccatggagctggaggagatgccaagaagctgacagagagctacatccagctgggcctgcagtgtgccggcggggccggccgcggggacctgtacagccggctggtgtctgtgtttcctgcccgggagcggctgtttgctgtgtttgagcggccccagggcagccctgctgcccgggccgccccagctgccctgtgtgccttccgctttgctgatgtgcgggccgccatccgggccgccaggacagcctgctttgtggagcccgccccagatgtggtggccgtgctggacagcgtggtgcagggcaccggccctgcctgtgagaggaagctgaacatccagctgcagcctgagcagctggactgtggggccgcccacctgcagcaccccctgagcatcctgcagcccctgaaggccacccctgtgttccgggcccctggcctgacctctgtggccgtggcctctgtgaacaactacacagctgtgttcctgggcaccgtgaatggccgcctgctgaagatcaacctgaatgaatccatgcaggtggtgtcccggcgggtggtgacagtggcctatggagagcctgtgcaccacgtgatgcagtttgatcctgctgacagcggctacctgtacctgatgaccagccaccagatggcccgggtgaaggtggccgcctgcaatgtgcacagcacctgtggggactgtgtgggcgctgctgatgcctactgcggctggtgtgccctggagacccgctgcaccctgcagcaggactgcaccaacagcagccagcagcacttctggaccagcgccagcgagggccccagccgctgcccagccatgacagtgctgcccagcgagattgatgtgcggcaggagtacccaggcatgatcctgcagatcagcggcagcctgcccagcctgagcggcatggagatggcctgtgactatggcaacaacatcagaacagtggcccgggtgcccggccctgccttcggccaccagatcgcctactgcaacctgctgccccgggaccagttcccccccttcccccccaaccaggaccacgtgacagtggagatgtctgtgcgggtgaatggaagaaacatcgtgaaggccaacttcaccatctatgactgcagcaggacagcccaggtgtacccccacacagcctgcaccagctgcctgagcgcccagtggccctgcttctggtgcagccagcagcacagctgtgtgagcaaccagagccgctgtgaggccagccccaaccccaccagcccccaggactgccccaggaccctgctgagccccctggcccctgtgcccactggaggcagccagaacatcctggtgcccctggccaacacagccttcttccagggcgccgccctggagtgcagctttggcctggaggagatctttgaggccgtgtgggtgaatgaatctgtggtgcgctgtgaccaggtggtgctgcacaccaccaggaagagccaggtgttccccctgagcctgcagctgaagggccggcctgcccgcttcctggacagccctgagcccatgacagtgatggtgtacaactgtgccatgggcagcccagactgcagccagtgcctgggccgggaggacctgggccacctgtgcatgtggagcgatggctgccgcctgcggggccccctgcagcccatggccggcacctgcccagcccctgagatccacgccatcgagcccctgagcggccccctggatggcggcaccctgctgaccatccggggcaggaacctgggccggcggctgagtgatgtggcccatggagtgtggattggaggagtggcctgtgagcccctgcctgaccgctacacagtgtctgaggagatcgtgtgtgtgactggacctgcccctggccccctgtctggagtggtgacagtgaatgccagcaaggagggcaagagccgggaccgcttctcctatgtgctgcccctggtgcacagcctggagcccaccatgggccccaaggccggcggcacccgcatcaccatccacggcaatgacctgcacgtgggcagcgagctgcaggtgctggtgaatgacacagacccctgcacagagctgatgaggacagacaccagcatcgcctgcaccatgcctgagggcgccctgcctgcccctgtgcctgtgtgtgtgcgctttgaaagaagaggctgtgtgcacggcaacctgaccttctggtacatgcagaaccctgtgatcacagccatcagccccaggaggagccctgtgtctgggggccgcaccatcaccgtggccggggagcgcttccacatggtgcagaatgtgtccatggctgtgcaccacatcggccgggagcccaccctgtgcaaggtgctgaacagcaccctcatcacctgccccagccctggggccctgagcaatgccagcgcccctgtggacttcttcatcaatggccgggcctatgcagatgaggtggccgtggccgaggagctgctggaccctgaggaggcccagaggggcagccgcttccggctggactacctgcccaacccccagttcagcacagccaagcgggagaagtggatcaagcaccaccctggagagcccctgaccctggtgatccacaaggagcaggacagcctgggcctgcagagccatgagtacagagtgaagattggccaggtgtcctgtgacatccagatcgtgtctgaccgcatcatccactgcagcgtgaatgaaagcctgggcgctgctgtgggccagctgcccatcaccatccaggtgggcaacttcaaccagaccatcgccaccctgcagctgggcggcagcgagacagccatcatcgtgtccatcgtcatctgcagcgtgctgctgctgctgtctgtggtggccctgtttgtgttctgcaccaagagccggcgggcagagcgctactggcagaagaccctgctgcagatggaggagatggagagccagatccgggaggagatcaggaagggctttgctgagctgcagacagacatgacagacctgaccaaggagctgaacagaagccagggcatccccttcctggagtacaagcactttgtgaccaggaccttcttccccaagtgcagcagcctgtatgaggagagatatgtgctgcccagccagaccctgaacagccagggcagcagccaggcccaggagacccaccccctgctgggggagtggaagatccctgagagctgccggcccaacatggaggagggcatcagcctcttcagcagcctgctgaacaacaagcacttcctgattgtgtttgtgcacgccctggagcagcagaaggactttgctgtgcgggaccgctgcagcctggccagcctgctgaccatcgccctgcacggcaagctggagtactacaccagcatcatgaaggagctgctggtggacctgattgatgccagcgctgccaagaaccccaagctgatgctgcggaggacagagagcgtggtggagaagatgctgaccaactggatgagcatctgcatgtacagctgcctgcgggagaccgtgggggagcccttcttcctgctgctgtgtgccatcaagcagcagatcaacaagggcagcattgatgccatcaccgggaaggcccgctacaccctgtctgaggagtggctgctgagagaaaatattgaggccaagcccaggaacctgaatgtgtccttccagggctgcggcatggacagcctgtctgtgcgggccatggacacagacaccctgacccaggtgaaggagaagatcctggaggccttctgcaagaatgtgccctacagccagtggcccagggcagaagatgtggacctggagtggtttgccagcagcacccagagctacatcctgcgggacctggatgacacctctgtggtggaggatggcaggaagaagctgaacaccctggcccactacaagatccctgagggcgccagcctggccatgagcctgattgacaagaaggacaacaccctgggccgggtgaaggacctggacacagagaagtacttccacctggtgctgcccacagatgagctggccgagcccaagaagagccaccggcagagccacaggaagaaggtgctgcctgagatctacctgacccggctgctgagcaccaagggcaccctgcagaagttcctggatgacctcttcaaggccatcctgagcatccgggaggacaagccacccctggccgtgaagtacttctttgacttcctggaggagcaggccgagaagaggggcatcagtgaccctgacaccctgcacatctggaagaccaacagcctgcccctgcgcttctgggtgaacatcctgaagaacccccagtttgtgtttgatattgacaagacagaccacattgatgcctgcctgagcgtcatcgcccaggccttcattgatgcctgcagcatcagtgacctgcagctgggcaaggacagccccaccaacaagctgctgtatgccaaggagatccctgagtacaggaagatcgtgcagcgctactacaagcagatccaggacatgacccccctgtctgagcaggagatgaatgcccacctggccgaggagagcaggaagtaccagaatgagttcaacaccaacgtggccatggccgagatctacaagtatgccaagcgctaccggccccagatcatggccgccctggaggccaaccccacagcccggaggacccagctgcagcacaagtttgagcaggtggtggccctgatggaggacaacatctatgagtgctacagcgaggcctag

SEQ ID NO: 184478 - DNA, 5778 bp, Artificial Sequence
  derived and/or modified sequence
atggccccccgggccgccggcggcgcccccctgagcgcccgggccgctgctgcgagtccccctccgttccaaaccccacctaggtgtccggtccctctgctcctgctgcttctccttggtgctgcaagagcgggggcgttggagattcaacggaggtttccatcaccgacccctacaaataatttcgccttggatggagccgcggggacagtatatcttgccgcagttaatcgcctttaccagctgtccggcgctaatctctccctggaagcggaggctgcagtcggacccgtcccagattccccattgtgtcacgctccccagttgccacaggcctcttgtgagcatccaagaagactgacagacaattataacaaaattctacagttagatcccggccaaggtctggtagtagtgtgcggaagcatataccaagggttttgtcagctgcgacgaagaggaaacatttccgccgtagccgtcagatttccaccagcagcgcctccggctgaaccagtaacggtgttcccttccatgttgaatgttgctgccaaccatccgaacgccagtaccgtgggtctcgtgctgcctcctgccgctggtgcaggtggaagtcgcttattagtcggagcgacctacactggatacggcagctctttctttcccaggaatcgcagtctggaggaccacagattcgaaaacacccccgaaatcgccatccgttccctggacacaagaggagacttagccaagctctttacgttcgatctgaacccttcggacgataacatcctcaagatcaagcagggagccaaagaacagcataagttaggctttgtgtcagccttcctgcatccgtctgaccccccccccggagcacagtcttacgcatacctcgccctaaactcggaggcgagagcgggagataaagagtcccaggcaagatctctgttagcaagaatttgcctcccacatggcgccggaggagacgcaaaaaaactgaccgaatcttatatccagctgggactgcagtgcgccggaggagctggccgaggtgacctgtactcaaggttggtctctgtgtttccggctagagaaaggctgtttgccgtgtttgagcggccacagggctccccggctgcaagagcagcacccgctgcactgtgcgccttcaggttcgccgacgttcgggcagcaattagagcagcacgcaccgcctgtttcgtggagcccgccccagacgtggtcgcagtcctggactccgtagttcagggtaccggccccgcctgtgaacggaagctgaacatacagttgcaacccgaacagctagattgtggcgcagcacacctgcagcatcccctgtctatactgcagccactgaaagccacgcctgtatttagagctcccggattgacatccgtcgctgtggcctccgtgaacaattatacggctgtctttcttggcactgtgaacggtcgactgttgaaaatcaatctgaacgagagtatgcaggtggtgtcccgtcgggtcgtgaccgtggcatatggagagcccgtgcaccacgtcatgcagtttgatcccgcggacagcggatatctatacctcatgactagtcaccagatggcccgggtgaaagtcgctgcatgcaatgtgcattcaacctgcggagactgtgtcggcgctgctgacgcctactgtggttggtgtgcactggaaacccgatgtacccttcagcaagactgcactaattctagccagcagcatttctggacgtcagctagcgagggaccttcccgctgccccgccatgaccgtgctgccttccgagattgatgttcgtcaagagtaccccgggatgatactgcagatcagcggatctcttcccagcctgtcgggcatggaaatggcttgtgactacggaaacaatatccgcactgtcgcccgtgtccctggtcctgcatttggacaccagatcgcatattgcaatctacttccacgcgaccagtttccaccattcccccccaatcaggaccatgttactgtcgaaatgtctgtgcgcgtcaacggacgcaatatagttaaagctaacttcacgatctatgattgcagccggaccgcacaggtgtacccccacaccgcctgcacctcttgtctttcagcccagtggccatgcttctggtgttcccagcagcactcctgtgtttccaaccaaagtcgatgcgaggcatctcccaaccccacttctccgcaagactgccctcgaactcttttatcgccgctcgcccctgtgccgacagggggctcccagaacattctggttcctctcgcgaacaccgccttctttcaaggggccgcgctggaatgctccttcggattggaagaaatctttgaagccgtctgggtaaatgagagcgtcgtgcgctgcgaccaagtggtgctgcatacaacacggaagtcacaggtttttccgctgagtttacaactcaagggtcggcctgctagatttctggactcacccgagcccatgaccgtaatggtgtacaactgtgccatgggttctcctgactgcagtcagtgtctgggccgtgaagacttggggcatctttgcatgtggagcgacggctgtaggctccgcggcccattacagccaatggcgggtacgtgccctgctccggaaatccacgcaatcgagcctttgtctgggcctttggacggaggaacactcttaactataaggggccgtaacctgggccggagactttctgacgtggcacacggagtgtggatcgggggagtcgcctgtgaaccgctgcccgacaggtataccgtctccgaggagatcgtctgcgtgacagggcccgctccaggtcctctttcaggcgttgttaccgttaatgcctcaaaagagggaaagtccagggatagattctcgtacgtcctgccccttgttcactctttggagccaactatgggccccaaagcaggcgggactcggatcacaatccacgggaacgacctgcacgtggggagcgagcttcaagtgctggttaacgacaccgacccatgcacagagctcatgcgcaccgacacttccattgcctgcaccatgccagagggcgcgttgcccgcccccgtgcccgtgtgtgtaagatttgagagaagaggctgcgtgcacgggaatttaactttctggtacatgcagaatcccgtcatcactgcgatcagcccaaggcgatctccggtgtccggaggccggactatcactgttgcaggcgagagatttcatatggtgcaaaacgtctcgatggccgtacatcatattggccgcgagcccacgttgtgtaaggtcctgaatagtacgctcataacttgtccgtcccccggtgcactgtcgaacgcctcggccccagtagacttttttatcaatgggagagcctatgctgacgaggttgcagtagcagaggaactgctcgatcccgaggaagctcaacggggatctagatttaggttagattatctccctaatcctcagttcagcactgcgaaacgggagaaatggatcaagcaccatcctggggagcccttgaccctggtgatacacaaggagcaggactctttaggcctgcagagccatgagtaccgcgtgaaaatcggccaggtgtcttgtgacattcagatagtctctgataggattatccactgttcggtgaacgaaagcctcggagcagcggtgggacagttgccaatcacaatccaggtcggcaatttcaaccagaccatcgcaactctgcagttgggtgggtctgaaactgccatcatcgtatctattgtgatttgttccgtattactgcttctgtcagtcgtggccctgtttgtgttctgcactaaatctcggcgcgcagagcgctactggcagaaaactctgttgcaaatggaggaaatggaaagccagattcgtgaagagattagaaagggcttcgccgagctgcagaccgatatgaccgatttgaccaaggagctgaatcgctcccaaggcattccgtttcttgagtataagcatttcgtaactagaactttcttcccaaaatgttcctcgctttatgaggagaggtacgttctacctagtcagaccctgaattcacagggcagttcccaggcccaagagacgcatcccctcctcggggagtggaaaatcccggagtcgtgccgccctaacatggaagagggcatatccctattcagctccctactcaacaacaagcactttctcatagtctttgtccatgccctggagcaacagaaagacttcgcagtaagagacaggtgtagtctagcttccctgctgactatcgcgctgcacggcaaattggagtactacacgagcataatgaaagagcttctggtggacctgatcgatgcctccgccgctaaaaatcctaaactcatgctacgaaggaccgaaagcgtagtcgaaaaaatgttaaccaattggatgtccatttgcatgtatagttgtttaagggagaccgtaggagagcccttctttctgttgttatgcgccatcaaacaacagataaacaaaggctctatcgatgccatcaccggtaaagccaggtacacgctttccgaagagtggctgcttcgggaaaatattgaggctaagcctcgaaacctcaatgtctcttttcagggatgtggcatggacagtttgagcgtaagagcaatggatacagacacgctaacgcaggtcaaagagaagattctggaagccttctgtaaaaacgttccatacagccagtggcctagagccgaggatgtggatctggagtggtttgcgtcctcaactcagtcttacattctgagggatttggatgacacctccgttgtggaagacggccgtaaaaagttaaacacactggcacactataagatccctgagggggcaagcctagccatgtctctgatcgataaaaaagataatacgcttggaagggttaaagatctcgacactgagaagtattttcaccttgttctgcccacggatgagcttgcagaacccaaaaagagtcacagacagtcccatagaaagaaggtcctgccagagatctatctgactcgcctgctctctactaaaggtacgttacaaaagtttttagatgacctcttcaaggctatattgtcaatacgggaagataagccaccactcgcagtgaaatatttctttgatttcttggaggaacaagccgagaagcgagggatatctgatcctgacacgctccacatatggaaaaccaattctttacctttgcggttttgggtgaacatactaaaaaacccacaattcgtgtttgacatcgataaaacagatcatatcgatgcctgtctgtctgtaattgcccaggcgttcatcgacgcttgctcaatatccgaccttcagctggggaaggacagcccaacaaacaagcttctatacgctaaggagatccccgaataccgcaaaatcgtgcagcggtattacaagcagattcaggacatgactcccttatctgaacaggagatgaacgcacaccttgctgaagagagccgcaagtaccagaatgaattcaatacaaatgtggctatggctgagatctataaatatgccaagcgttatcgaccccagataatggccgccttggaagctaacccgaccgcccggcgcacacagctccagcataagttcgagcaagtggtggcattaatggaggataatatatatgagtgctactcagaggcctag

SEQ ID NO: 184479 - DNA, 7094 bp, Artificial Sequence
  derived and/or modified sequence
ccgggctgcgcggcgaggctgacccgggcccgggcgccggggtcgggggcggctggcgcgggcaggaagcgcatcgcggcccgggcccgccccccgcctcccgccgcctccgggctcccggctcccggccgcgcctcgccccatgcactcgccgcgccgcgcagcccgcgcacgcccggatggctcctcgcgccgcgggcggcgcaccccttagcgcccgggccgccgccgccagccccccgccgttccagacgccgccgcggtgcccggtgccgctgctgttgctgctgctcctgggggcggcgcgggccggcgccctggagatccagcgtcggttcccctcgcccacgcccaccaacaacttcgccctggacggcgcggcggggaccgtgtacctggcggccgtcaaccgcctctatcagctgtcgggcgccaacctgagcctggaggccgaggcggccgtgggcccggtgcccgacagcccgctgtgtcacgctccgcagctgccgcaggcctcgtgcgagcacccgcggcgcctcacggacaactacaacaagatcctgcagctggaccccggccagggcctggtagtcgtgtgcgggtccatctaccagggcttctgccagctgcggcgccggggcaacatctcggccgtggccgtgcgcttcccgcccgccgcgccgcccgccgagcccgtcacggtgttccccagcatgctgaacgtggcggccaaccacccgaacgcgtccaccgtggggctagttctgcctcccgccgcgggcgcggggggcagccgcctgctcgtgggcgccacgtacaccggttacggcagctccttcttcccgcgcaaccgcagcctggaggaccaccgcttcgagaacacgcccgagatcgccatccgctccctggacacgcgcggcgacctggccaagctcttcaccttcgacctcaacccctccgacgacaacatcctcaagatcaagcagggcgccaaggagcagcacaagctgggcttcgtgagcgccttcctgcacccgtccgacccgccgccgggtgcacagtcctacgcgtacctggcgctcaacagcgaggcgcgcgcgggcgacaaggagagccaggcgcggagcctgctggcgcgcatctgcctgccccacggcgccggcggcgacgccaagaagctcaccgagtcctacatccagttgggcttgcagtgcgcgggcggcgcgggccgcggcgacctctacagccgcctggtgtcggtcttcccagcccgggagcggctctttgctgtcttcgagcggccccaggggtcccccgcggcccgcgctgctccggccgcactctgcgccttccgcttcgccgacgtgcgagccgccatccgagctgcgcgcaccgcctgcttcgtggaaccggcgcccgacgtggtggcggtgctcgacagcgtggtgcagggcacgggaccggcctgtgagcgcaagctcaacatccagctccagccagagcagctggactgtggagctgctcacctgcagcacccgctgtccatcctgcagcccctgaaggccacgcccgtgttccgcgccccgggcctcacctccgtggccgtggccagcgtcaacaactacacagcggtcttcctgggcacggtcaacgggaggcttctcaagatcaacctgaacgagagcatgcaggtggtgagcaggcgggtggtgactgtggcctatggggagcccgtgcaccatgtcatgcagtttgacccagcagactccggttacctttacctgatgacgtcccaccagatggccagggtgaaggtcgccgcctgcaacgtgcactccacctgtggggactgcgtgggtgcggcggacgcctactgcggctggtgtgccctggagacgcggtgcaccttgcagcaggactgcaccaattccagccagcagcatttctggaccagtgccagcgagggccccagccgctgtcctgccatgaccgtcctgccttccgagatcgatgtgcgccaggagtacccaggcatgatcctgcagatctcgggcagcctgcccagcctcagtggcatggagatggcctgtgactatgggaacaacatccgcactgtggctcgggtcccaggccctgcctttggtcaccagattgcctactgcaacctcctgccgagggaccagtttccgcccttcccccccaaccaggaccacgtgactgttgagatgtctgtgagggtcaatgggcggaacatcgtcaaggccaatttcaccatctacgactgcagccgcactgcacaagtgtacccccacacagcctgtaccagctgcctgtcggcacagtggccctgtttctggtgcagccagcagcactcctgtgtttccaaccagtctcggtgcgaggcctcaccaaaccccacgagccctcaggactgcccccggaccctgctctcacccctggcacccgtgcctacgggtggctcccagaacatcctggtgcctctggccaacactgcctttttccagggtgcagccctggagtgtagttttgggctggaggagatcttcgaggctgtgtgggtgaatgagtctgttgtacgctgtgaccaggtggtgctgcacacgacccggaagagccaggtgttcccgctcagcctccaactaaaggggcggccagcccgattcctggacagccctgagcccatgacagtcatggtctataactgtgccatgggcagccccgactgttcccagtgcctgggccgcgaagacctgggtcacctgtgcatgtggagtgatggctgccgcctgcgggggcctctgcagcccatggctggcacctgccccgcccccgagatccacgcgattgagcccctgagtggcccgttggacggtgggaccctgctgaccatccgaggaaggaacctgggccggcggctcagtgacgtggcccacggcgtgtggattggtggtgtggcctgtgagccactgcctgacagatacacggtgtcggaggagatcgtgtgtgtcacagggccagccccaggaccactctcaggtgtggtgaccgtgaacgcctctaaggagggcaagtcccgggaccgcttctcctacgtgctgcccctggtccactccctggagcctaccatgggccccaaggccgggggcaccaggatcaccatccatgggaatgacctccatgtaggctccgagctccaggtcctggtgaacgacacagacccctgcacggagctgatgcgcacagataccagcatcgcctgcaccatgcctgagggggccctgccggctccggtgcctgtgtgtgtgcgcttcgagcgtcggggctgcgtgcacggcaacctcaccttctggtacatgcagaacccggtcatcacggccatcagtccccgccgcagccctgtcagtggcggcaggaccatcacagtggctggtgagcgtttccacatggtgcagaatgtgtccatggccgtccaccacattggccgggagcccacgctctgcaaggttctcaactccaccctcatcacctgcccgtcccccggggccctgagcaacgcatcagcgccagtggacttcttcatcaatgggcgggcctacgcagacgaggtggctgtggctgaggagctactggaccccgaggaggcacagcggggcagcaggttccgcctggactacctccccaacccacagttctctacggccaagagggagaagtggatcaagcaccaccccggggagcctctcaccctcgttatccacaaggagcaggacagcctggggctccagagtcacgagtaccgggtcaagataggccaagtaagctgcgacatccagattgtctctgacagaatcatccactgctcggtcaacgagtccctgggcgcggccgtggggcagctgcccatcacaatccaggtagggaacttcaaccagaccatcgccacactgcagctggggggcagcgagacggccatcatcgtgtccatcgtcatctgcagcgtcctgctgctgctctccgtggtggccctgttcgtcttctgtaccaagagccgacgtgctgagcgttactggcagaagacgctgctgcagatggaggagatggaatctcagatccgagaggaaatccgcaaaggcttcgctgagctgcagacagacatgacagatctcaccaaggagctgaaccgcagccagggcatccccttcctggagtataagcacttcgtgacccgcaccttcttccccaagtgttcctccctttatgaagagcgttacgtgctgccctcccagaccctcaactcccagggcagctcccaggcacaggaaacccacccactgctgggagagtggaagattcctgagagctgccggcccaacatggaagagggaattagcttgttctcctcactactcaacaacaagcacttcctcatcgtctttgtccacgcgctggagcagcagaaggactttgcggtgcgcgacaggtgcagcctggcctcgctgctgaccatcgcgctgcacggcaagctggagtactacaccagcatcatgaaggagctgctggtggacctcattgacgcctcggccgccaagaaccccaagctcatgctgcggcgcacagagtctgtggtggagaagatgctcaccaactggatgtccatctgcatgtacagctgtctgcgggagacggtgggggagccattcttcctgctgctgtgtgccatcaagcagcaaatcaacaagggctccatcgacgccatcacaggcaaggcccgctacacactcagtgaggagtggctgctgcgggagaacatcgaggccaagccccggaacctgaacgtgtccttccagggctgtggcatggactcgctgagcgtgcgggccatggacaccgacacgctgacacaggtcaaggagaagatcctggaggccttctgcaagaatgtgccctactcccagtggccgcgtgcagaggacgtcgaccttgagtggttcgcctccagcacacagagctacatccttcgggacctggacgacacctcagtggtggaagacggccgcaagaagcttaacacgctggcccattacaagatccctgaaggtgcctccctggccatgagtctcatagacaagaaggacaacacactgggccgagtgaaagacttggacacagagaagtatttccatttggtgctgcctacggacgagctggcggagcccaagaagtctcaccggcagagccatcgcaagaaggtgctcccggaaatctacctgacccgcctgctctccaccaagggcacgttgcagaagtttctggatgacctgttcaaggccattctgagtatccgtgaagacaagcccccactggctgtcaagtactttttcgacttcctggaggagcaggctgagaagaggggaatctccgaccccgacaccctacacatctggaagaccaacagccttcctctccggttctgggtgaacatcctgaagaacccccagtttgtctttgacatcgacaagacagaccacatcgacgcctgcctttcagtcatcgcgcaggccttcatcgacgcctgctccatctctgacctgcagctgggcaaggattcgccaaccaacaagctcctctacgccaaggagattcctgagtaccggaagatcgtgcagcgctactacaagcagatccaggacatgacgccgctcagcgagcaagagatgaatgcccatctggccgaggagtcgaggaaataccagaatgagttcaacaccaatgtggccatggcagagatttataagtacgccaagaggtatcggccgcagatcatggccgcgctggaggccaaccccacggcccggaggacacaactgcagcacaagtttgagcaggtggtggctttgatggaggacaacatctacgagtgctacagtgaggcctgagacacatggagagttggtcaggctgctgctgggagaaatggacgcccactgggcctcaacttgatcttctaccccgtgcctgtgactcagactgggaaatactgagcagagacggctggggcgggggcaggaggaggggctgctctctgagacaggggcgcccccgccttgacccctgggcacctccatcccctcccacctgtccccagatcagtctctgggatggaggccagagagctggtcaggctcccccatctgcccagcacggcctgcactgtgcccacccacttgctccacaacgtccagttggtcctgctgccaagagccccgtgcatccaggcggccaagcacaaactgggggagaggaggccgccagcccggaggctgcagcccagaaactctacctcatccacactggtgcagggagccctccttgaactgacctttgattggtttctgcttcaactaccaaaatgttatctccacttccccctcacccgtagaggatcctggccacagacagtttcaagtagtgtcagatttttgttgcttgggcggctgttggtagagtgggcagtgcccgcgccatggggtgctctgtgggcttctccaggagcagggagggtggaggggagggatggggggcacaggagctgggagccccgtctccaggaaaaggagaggggttaagatgcaccgaggctgtagctgggctacttgatcttgctgaaagtgtttctaaagatagcaccacttttttttttaaagcttttatatattaaaaaacgtatcatgcaccaactgtgaatagctgccgcttgcgcagaggacccggggaggggtcccgagaggctccccatgcaacactggaaatgactgttccagagagcgggcagacctggcagagcgcccctggcgcctgagactaccacccactccgttcctgccagaaacgaccctctgtggccgatgggccatgcgggcccctcgcagccaactcagccagtgttgggactggctcagagcccatgggggctggaggggggcagctgggactctggaatcttctttataataaaagccttacggacaaacctactgtgggctccagcctttgtcctgagatagccaagcggg

SEQ ID NO: 184480 - DNA, 5777 bp, Artificial Sequence
  derived and/or modified sequence
atggctccgcgtgccgctggaggcgcacccttaagcgccagagctgccgcagccagtcccccaccttttcagacccctccacggtgtccggtcccgctgttgctcctcctgttgctgggcgctgcccgagctggagccttagaaatccagcggagattcccatcccccacgcccaccaacaattttgcattggacggtgcagccggtacagtgtacctcgcggcagtgaacaggctgtatcagctctccggcgcaaacctgagtctggaggcagaggccgctgtcgggccagttcccgatagtcccctctgtcatgcaccgcaactcccgcaggccagctgcgagcaccccaggagattaactgacaactataataaaatccttcaactggatccaggccagggactcgtcgtggtttgtggatcaatttaccaaggattctgtcagttacgcagacgcggaaacatctcagctgtcgccgtccggtttccaccagcagccccaccagccgagcccgttacagtattcccttccatgctaaacgtcgctgctaaccatccaaatgcttccaccgtgggtcttgttcttcctcctgctgcaggggctggaggaagtaggctgttagtgggtgctacctacaccggctacgggtcctcattttttccacggaaccgctctctagaggaccatagattcgaaaatactcctgagatcgccattagatcactggatacacggggagatctcgcgaagctgttcaccttcgatctcaacccatcagatgacaatatactcaaaattaaacagggcgctaaggagcaacacaagttgggctttgtgtctgcttttctgcatccctccgatccacctcctggggctcagtcctacgcttatttggccctaaacagcgaggcccgtgctggcgacaaggagtcccaggccaggagcctgctggcccgaatatgcctcccacatggagctggcggagacgcaaaaaaactgacggagagctatatacagctggggctacaatgcgctggcggagccggacgtggcgacctttactcgaggctggtgagtgtgttccctgcccgagagaggctctttgcagtcttcgagagacctcaaggtagccccgctgcccgagccgcaccggctgccttgtgcgcgttccggtttgctgatgtgcgggctgccattcgcgcagccaggaccgcatgttttgtggaaccagccccagacgtggtggcagtgttggacagtgtggtgcagggaactggacctgcctgcgagagaaaactgaacatccaactacagccggaacaactggactgtggcgcagcccatctccagcatcccctcagcatcctccaacccctaaaggctacccccgtgttcagggcccctggcctcacttctgttgctgtggcgagcgtgaataactataccgcggtgttcttaggtacggtaaatgggaggctgttaaagattaatctcaatgagagcatgcaggtggtttctcggagagtcgtgactgttgcatacggcgagccagttcatcacgtcatgcagttcgatcctgccgattccggatatctgtacctcatgacctcccatcagatggctagagtaaaagttgcagcgtgtaatgtgcactcgacatgcggcgactgtgtgggagccgctgatgcatactgcggttggtgtgccctagaaacccggtgcactctgcaacaagattgcacaaattcgagtcagcaacacttttggacatccgcatcagagggtccttcacgctgtccagccatgaccgtgctgccttccgagattgatgtgagacaggaatatcccggaatgatcttacagattagcggctccctcccgtcactatccggaatggagatggcatgcgattatggaaataatattaggactgtcgcacgcgtgccagggcctgcctttggtcatcagatcgcctattgcaatctcctgccccgagatcagtttccgccttttccccctaaccaggatcacgtgaccgtcgagatgagcgtcagggtcaatggtcggaatatcgtgaaggcgaactttacaatttacgactgttcacgcacggcccaggtctacccacacaccgcatgcacaagttgtctgtccgcacagtggccctgcttctggtgctcacagcaacactcgtgcgtgtctaatcaaagtagatgtgaagcttcgcccaatcccacaagcccacaggattgcccgaggacattattgagccccttagcaccagtgcctacgggcggttcccagaatattctggttcctctggcgaacacggccttctttcagggcgcagccctcgagtgtagttttggtctggaggaaatttttgaggccgtctgggttaacgaatccgtggtccggtgtgaccaggttgtgcttcacaccactcgtaagtcacaagtttttccattgtccctgcagttgaagggtaggcccgctcggtttttggattccccggaaccaatgacagtgatggtgtacaattgcgcgatgggcagccctgactgttcccaatgcttgggcagggaagatctgggccacctgtgtatgtggagtgatggctgccgcctgcggggaccactgcagccaatggcaggaacttgccctgctcctgagatccacgctatcgagccactgtccggccctctggacggcggtacgctactaacgatccgcggacggaatctgggaagaagactctccgatgtagcccacggcgtctggatcggcggtgtggcttgcgagcctctcccagacagatacacagtgtctgaggaaattgtatgtgtgacaggcccagcccctggacctctttcgggcgttgtgaccgtgaacgccagcaaggagggaaagtccagggacagattttcctacgttctacccctggtgcactctcttgagcctaccatgggcccaaaggccggaggtacccggatcacaatccacggaaatgacctccacgtgggttccgagctgcaggttctcgtgaacgacaccgacccttgtacagagctcatgagaaccgatacgtctatcgcctgtacaatgcccgaaggggctctccccgctccagtacccgtgtgtgtgcggtttgaacgacgaggttgtgttcatggaaacctcaccttttggtatatgcagaaccctgtcatcacggcgataagccctcggagatcccctgtgagcggaggaaggacaataactgtcgctggagaaagatttcacatggtgcagaacgtgtcaatggccgtacaccacataggtcgggagccgaccctctgtaaagtcctcaattccactctaattacctgtccctcacctggagccttatccaacgcaagcgcacccgtcgacttctttataaatgggagggcctacgctgatgaggtggcagtggctgaagagctcctcgaccccgaggaggcacaaagagggagcagatttcgcctggattatctgcccaatccccagttctccaccgccaagcgcgaaaagtggataaaacaccatcctggcgaaccacttactctcgtgattcacaaggagcaggatagccttggcctccagagtcatgagtaccgcgtaaaaatcggacaggttagctgtgacatacagatcgtctctgatcgcataattcactgttccgtcaatgagagccttggggcagccgttgggcaactgcctattacgattcaggtggggaacttcaatcagacaatcgcaactttgcagctcggcggtagtgagacagcaattatcgtttccattgtcatctgtagcgtgctgttgctgctgtccgtggtggctctctttgtattttgcaccaaaagccgacgcgctgaacgatactggcagaaaactctgctgcaaatggaagagatggagtcgcagataagggaagaaatccgcaaaggcttcgccgagctgcagaccgacatgactgatttaactaaggaactgaacagaagtcaggggatcccattcctggagtataaacacttcgtgactcgcacattttttccaaagtgcagctccttgtatgaggaacgatacgtccttccatcacagaccttgaactcacagggttcgtctcaggcccaagagactcaccctcttcttggagaatggaagatccctgagagctgcaggccgaacatggaagaaggtatttcactcttctcttcgctcctcaataataaacacttcctcatagtgtttgttcacgccctggaacagcagaaagactttgccgtgagggataggtgttcccttgcctccttactcaccatcgccctgcatgggaagctggaatattacacctctatcatgaaagagctgctcgtggacctcatagatgcctctgctgccaaaaatccaaagcttatgctcagaagaaccgagtccgtcgtcgagaagatgctaacaaattggatgtccatatgtatgtactcttgcttgcgagagacagtcggcgagcctttcttccttctgctgtgcgcaataaagcagcaaattaacaaaggttcaattgacgccataacaggtaaagccaggtacaccttgagcgaagagtggctcctgagagagaacattgaggccaagccgagaaacctaaatgtgagcttccagggctgcggaatggactcactgtctgtgagggcaatggatactgatacactcacccaggtcaaagagaagatactcgaggcgttttgtaagaacgtcccttactctcagtggccaagagcagaagatgtagacttggaatggttcgctagttccacacaaagttacatacttcgggatctggatgacacatctgtggtcgaggatggccgtaagaaattgaatacactcgctcattacaaaattccggagggagcgagcttggccatgtcactgattgacaagaaggacaacacactgggcagagttaaggacttggacaccgagaagtattttcacctggtactgcccacagacgaactagctgaacctaagaaatcccatcgccagtcacaccgtaaaaaagtgctgccagagatatacctgactcgccttctcagcaccaaaggcactcttcagaaatttttagatgatctgttcaaagcaattctgtccatccgggaagataagcctccactcgcagtgaagtatttctttgactttctcgaagagcaagccgaaaagcggggaattagtgatcccgacacgctgcatatttggaagactaattccctgccacttcgattttgggttaatatcctgaaaaaccctcagtttgtcttcgatatcgataaaaccgaccacatcgacgcatgcctgagcgtgatagcccaggcattcatagatgcatgcagcatcagcgatctgcagctcggaaaagactctcccactaataaactactgtatgccaaggagatccctgaatatcgaaagattgtgcagcgctattacaaacaaattcaggacatgacgcccctgtccgaacaggaaatgaacgcccatctcgctgaagagtcacggaagtaccaaaacgagtttaatactaatgtggctatggcggaaatttataaatacgctaagagatatcgtccccagataatggcagccttagaggctaaccccacagcgaggcggactcaacttcaacacaagtttgagcaagtggtggccctgatggaggacaatatctacgagtgctactctgaggccta

SEQ ID NO: 184481 - DNA, 5778 bp, Artificial Sequence
  derived and/or modified sequence
atggcccccagagccgccggcggcgcccccctgagcgccagagccgccgccgccagccccccccccttccagaccccccccagatgccccgtgcccctgctgctgctgctgctgctgggcgccgccagagccggcgccctggagatccagagaagattccccagccccacccccaccaacaacttcgccctggacggcgccgccggcaccgtgtacctggccgccgtgaacagactgtaccagctgagcggcgccaacctgagcctggaggccgaggccgccgtgggccccgtgcccgacagccccctgtgccacgccccccagctgccccaggccagctgcgagcaccccagaagactgaccgacaactacaacaagatcctgcagctggaccccggccagggcctggtggtggtgtgcggcagcatctaccagggcttctgccagctgagaagaagaggcaacatcagcgccgtggccgtgagattcccccccgccgccccccccgccgagcccgtgaccgtgttccccagcatgctgaacgtggccgccaaccaccccaacgccagcaccgtgggcctggtgctgccccccgccgccggcgccggcggcagcagactgctggtgggcgccacctacaccggctacggcagcagcttcttccccagaaacagaagcctggaggaccacagattcgagaacacccccgagatcgccatcagaagcctggacaccagaggcgacctggccaagctgttcaccttcgacctgaaccccagcgacgacaacatcctgaagatcaagcagggcgccaaggagcagcacaagctgggcttcgtgagcgccttcctgcaccccagcgaccccccccccggcgcccagagctacgcctacctggccctgaacagcgaggccagagccggcgacaaggagagccaggccagaagcctgctggccagaatctgcctgccccacggcgccggcggcgacgccaagaagctgaccgagagctacatccagctgggcctgcagtgcgccggcggcgccggcagaggcgacctgtacagcagactggtgagcgtgttccccgccagagagagactgttcgccgtgttcgagagaccccagggcagccccgccgccagagccgcccccgccgccctgtgcgccttcagattcgccgacgtgagagccgccatcagagccgccagaaccgcctgcttcgtggagcccgcccccgacgtggtggccgtgctggacagcgtggtgcagggcaccggccccgcctgcgagagaaagctgaacatccagctgcagcccgagcagctggactgcggcgccgcccacctgcagcaccccctgagcatcctgcagcccctgaaggccacccccgtgttcagagcccccggcctgaccagcgtggccgtggccagcgtgaacaactacaccgccgtgttcctgggcaccgtgaacggcagactgctgaagatcaacctgaacgagagcatgcaggtggtgagcagaagagtggtgaccgtggcctacggcgagcccgtgcaccacgtgatgcagttcgaccccgccgacagcggctacctgtacctgatgaccagccaccagatggccagagtgaaggtggccgcctgcaacgtgcacagcacctgcggcgactgcgtgggcgccgccgacgcctactgcggctggtgcgccctggagaccagatgcaccctgcagcaggactgcaccaacagcagccagcagcacttctggaccagcgccagcgagggccccagcagatgccccgccatgaccgtgctgcccagcgagatcgacgtgagacaggagtaccccggcatgatcctgcagatcagcggcagcctgcccagcctgagcggcatggagatggcctgcgactacggcaacaacatcagaaccgtggccagagtgcccggccccgccttcggccaccagatcgcctactgcaacctgctgcccagagaccagttcccccccttcccccccaaccaggaccacgtgaccgtggagatgagcgtgagagtgaacggcagaaacatcgtgaaggccaacttcaccatctacgactgcagcagaaccgcccaggtgtacccccacaccgcctgcaccagctgcctgagcgcccagtggccctgcttctggtgcagccagcagcacagctgcgtgagcaaccagagcagatgcgaggccagccccaaccccaccagcccccaggactgccccagaaccctgctgagccccctggcccccgtgcccaccggcggcagccagaacatcctggtgcccctggccaacaccgccttcttccagggcgccgccctggagtgcagcttcggcctggaggagatcttcgaggccgtgtgggtgaacgagagcgtggtgagatgcgaccaggtggtgctgcacaccaccagaaagagccaggtgttccccctgagcctgcagctgaagggcagacccgccagattcctggacagccccgagcccatgaccgtgatggtgtacaactgcgccatgggcagccccgactgcagccagtgcctgggcagagaggacctgggccacctgtgcatgtggagcgacggctgcagactgagaggccccctgcagcccatggccggcacctgccccgcccccgagatccacgccatcgagcccctgagcggccccctggacggcggcaccctgctgaccatcagaggcagaaacctgggcagaagactgagcgacgtggcccacggcgtgtggatcggcggcgtggcctgcgagcccctgcccgacagatacaccgtgagcgaggagatcgtgtgcgtgaccggccccgcccccggccccctgagcggcgtggtgaccgtgaacgccagcaaggagggcaagagcagagacagattcagctacgtgctgcccctggtgcacagcctggagcccaccatgggccccaaggccggcggcaccagaatcaccatccacggcaacgacctgcacgtgggcagcgagctgcaggtgctggtgaacgacaccgacccctgcaccgagctgatgagaaccgacaccagcatcgcctgcaccatgcccgagggcgccctgcccgcccccgtgcccgtgtgcgtgagattcgagagaagaggctgcgtgcacggcaacctgaccttctggtacatgcagaaccccgtgatcaccgccatcagccccagaagaagccccgtgagcggcggcagaaccatcaccgtggccggcgagagattccacatggtgcagaacgtgagcatggccgtgcaccacatcggcagagagcccaccctgtgcaaggtgctgaacagcaccctgatcacctgccccagccccggcgccctgagcaacgccagcgcccccgtggacttcttcatcaacggcagagcctacgccgacgaggtggccgtggccgaggagctgctggaccccgaggaggcccagagaggcagcagattcagactggactacctgcccaacccccagttcagcaccgccaagagagagaagtggatcaagcaccaccccggcgagcccctgaccctggtgatccacaaggagcaggacagcctgggcctgcagagccacgagtacagagtgaagatcggccaggtgagctgcgacatccagatcgtgagcgacagaatcatccactgcagcgtgaacgagagcctgggcgccgccgtgggccagctgcccatcaccatccaggtgggcaacttcaaccagaccatcgccaccctgcagctgggcggcagcgagaccgccatcatcgtgagcatcgtgatctgcagcgtgctgctgctgctgagcgtggtggccctgttcgtgttctgcaccaagagcagaagagccgagagatactggcagaagaccctgctgcagatggaggagatggagagccagatcagagaggagatcagaaagggcttcgccgagctgcagaccgacatgaccgacctgaccaaggagctgaacagaagccagggcatccccttcctggagtacaagcacttcgtgaccagaaccttcttccccaagtgcagcagcctgtacgaggagagatacgtgctgcccagccagaccctgaacagccagggcagcagccaggcccaggagacccaccccctgctgggcgagtggaagatccccgagagctgcagacccaacatggaggagggcatcagcctgttcagcagcctgctgaacaacaagcacttcctgatcgtgttcgtgcacgccctggagcagcagaaggacttcgccgtgagagacagatgcagcctggccagcctgctgaccatcgccctgcacggcaagctggagtactacaccagcatcatgaaggagctgctggtggacctgatcgacgccagcgccgccaagaaccccaagctgatgctgagaagaaccgagagcgtggtggagaagatgctgaccaactggatgagcatctgcatgtacagctgcctgagagagaccgtgggcgagcccttcttcctgctgctgtgcgccatcaagcagcagatcaacaagggcagcatcgacgccatcaccggcaaggccagatacaccctgagcgaggagtggctgctgagagagaacatcgaggccaagcccagaaacctgaacgtgagcttccagggctgcggcatggacagcctgagcgtgagagccatggacaccgacaccctgacccaggtgaaggagaagatcctggaggccttctgcaagaacgtgccctacagccagtggcccagagccgaggacgtggacctggagtggttcgccagcagcacccagagctacatcctgagagacctggacgacaccagcgtggtggaggacggcagaaagaagctgaacaccctggcccactacaagatccccgagggcgccagcctggccatgagcctgatcgacaagaaggacaacaccctgggcagagtgaaggacctggacaccgagaagtacttccacctggtgctgcccaccgacgagctggccgagcccaagaagagccacagacagagccacagaaagaaggtgctgcccgagatctacctgaccagactgctgagcaccaagggcaccctgcagaagttcctggacgacctgttcaaggccatcctgagcatcagagaggacaagccccccctggccgtgaagtacttcttcgacttcctggaggagcaggccgagaagagaggcatcagcgaccccgacaccctgcacatctggaagaccaacagcctgcccctgagattctgggtgaacatcctgaagaacccccagttcgtgttcgacatcgacaagaccgaccacatcgacgcctgcctgagcgtgatcgcccaggccttcatcgacgcctgcagcatcagcgacctgcagctgggcaaggacagccccaccaacaagctgctgtacgccaaggagatccccgagtacagaaagatcgtgcagagatactacaagcagatccaggacatgacccccctgagcgagcaggagatgaacgcccacctggccgaggagagcagaaagtaccagaacgagttcaacaccaacgtggccatggccgagatctacaagtacgccaagagatacagaccccagatcatggccgccctggaggccaaccccaccgccagaagaacccagctgcagcacaagttcgagcaggtggtggccctgatggaggacaacatctacgagtgctacagcgaggcctag

SEQ ID NO: 184482 - protein, 115 aa, Artificial Sequence
  derived and/or modified sequence
MASVPVYCLCRLPYDVTRFMIECDMCQDWFHGSCVGVEEEKAADIDLYHCPNCEVLHGPSIMKKRRGSSKGHDTHKGKPVKTGSPTFVRELRSRTFDSSDEVILKPTGNQLTVEF

SEQ ID NO: 184483 - protein, 1101 aa, Artificial Sequence
  derived and/or modified sequence
MATPSKKTSTPSPQPSKRALPRDPSSEVPSKRKNSAPQLPLLQSSGPFVEGSIVRISMENFLTYDICEVSPGPHLNMIVGANGTGKSSIVCAICLGLAGKPAFMGRADKVGFFVKRGCSRGMVEIELFRASGNLVITREIDVAKNQSFWFINKKSTTQKIVEEKVAALNIQVGNLCQFLPQDKVGEFAKLSKIELLEATEKSIGPPEMHKYHCELKNLREKEKQLETSCKEKTEYLQKMVQRNERYKQDVERFYERKRHLDLIEMLEAKRPWVEYENVRQEYEEVKLVRDRVKEEVRKLKEGQIPVTCRIEEMENERHNLEARIKEKATDIKEASQKCKQKQDVIERKDKHIEELQQALIVKQNEELDRQRRIGNTRKMIEDLQNELKTTENCENLQPQIDAITNDLRRIQDEKALCEGEIIDKRRERETLEKEKKSVDDHIVRFDNLMNQKEDKLRQRFRDTYDAVLWLRNNRDKFKQRVCEPIMLTINMKDNKNAKYIENHIPSNDLRAFVFESQEDMEVFLKEVRDNKKLRVNAVIAPKSSYADKAPSRSLNELKQYGFFSYLRELFDAPDPVMSYLCCQYHIHEVPVGTEKTRERIERVIQETRLKQIYTAEEKYVVKTSFYSNKVISSNTSLKVAQFLTVTVDLEQRRHLEEQLKEIHRKLQAVDSGLIALRETSKHLEHKDNELRQKKKELLERKTKKRQLEQKISSKLGSLKLMEQDTCNLEEEERKASTKIKEINVQKAKLVTELTNLIKICTSLHIQKVDLILQNTTVISEKNKLESDYMAASSQLRLTEQHFIELDENRQRLLQKCKELMKRARQVCNLGAEQTLPQEYQTQVPTIPNGHNSSLPMVFQDLPNTLDEIDALLTEERSRASCFTGLNPTIVQEYTKREEEIEQLTEELKGKKVELDQYRENISQVKERWLNPLKELVEKINEKFSNFFSSMQCAGEVDLHTENEEDYDKYGIRIRVKFRSSTQLHELTPHHQSGGERSVSTMLYLMALQELNRCPFRVVDEINQGMDPINERRVFEMVVNTACKENTSQYFFITPKLLQNLPYSEKMTVLFVYNGPHMLEPNTWNLKAFQRRRRRITFTQPS

SEQ ID NO: 184484 - DNA, 3306 bp, Artificial Sequence
  derived and/or modified sequence
atggccacccccagcaagaagaccagcacccccagcccccagcccagcaagagagccctgcccagagaccccagcagcgaggtgcccagcaagagaaagaacagcgccccccagctgcccctgctgcagagcagcggccccttcgtggagggcagcatcgtgagaatcagcatggagaacttcctgacctacgacatctgcgaggtgagccccggcccccacctgaacatgatcgtgggcgccaacggcaccggcaagagcagcatcgtgtgcgccatctgcctgggcctggccggcaagcccgccttcatgggcagagccgacaaggtgggcttcttcgtgaagagaggctgcagcagaggcatggtggagatcgagctgttcagagccagcggcaacctggtgatcaccagagagatcgacgtggccaagaaccagagcttctggttcatcaacaagaagagcaccacccagaagatcgtggaggagaaggtggccgccctgaacatccaggtgggcaacctgtgccagttcctgccccaggacaaggtgggcgagttcgccaagctgagcaagatcgagctgctggaggccaccgagaagagcatcggcccccccgagatgcacaagtaccactgcgagctgaagaacctgagagagaaggagaagcagctggagaccagctgcaaggagaagaccgagtacctgcagaagatggtgcagagaaacgagagatacaagcaggacgtggagagattctacgagagaaagagacacctggacctgatcgagatgctggaggccaagagaccctgggtggagtacgagaacgtgagacaggagtacgaggaggtgaagctggtgagagacagagtgaaggaggaggtgagaaagctgaaggagggccagatccccgtgacctgcagaatcgaggagatggagaacgagagacacaacctggaggccagaatcaaggagaaggccaccgacatcaaggaggccagccagaagtgcaagcagaagcaggacgtgatcgagagaaaggacaagcacatcgaggagctgcagcaggccctgatcgtgaagcagaacgaggagctggacagacagagaagaatcggcaacaccagaaagatgatcgaggacctgcagaacgagctgaagaccaccgagaactgcgagaacctgcagccccagatcgacgccatcaccaacgacctgagaagaatccaggacgagaaggccctgtgcgagggcgagatcatcgacaagagaagagagagagagaccctggagaaggagaagaagagcgtggacgaccacatcgtgagattcgacaacctgatgaaccagaaggaggacaagctgagacagagattcagagacacctacgacgccgtgctgtggctgagaaacaacagagacaagttcaagcagagagtgtgcgagcccatcatgctgaccatcaacatgaaggacaacaagaacgccaagtacatcgagaaccacatccccagcaacgacctgagagccttcgtgttcgagagccaggaggacatggaggtgttcctgaaggaggtgagagacaacaagaagctgagagtgaacgccgtgatcgcccccaagagcagctacgccgacaaggcccccagcagaagcctgaacgagctgaagcagtacggcttcttcagctacctgagagagctgttcgacgcccccgaccccgtgatgagctacctgtgctgccagtaccacatccacgaggtgcccgtgggcaccgagaagaccagagagagaatcgagagagtgatccaggagaccagactgaagcagatctacaccgccgaggagaagtacgtggtgaagaccagcttctacagcaacaaggtgatcagcagcaacaccagcctgaaggtggcccagttcctgaccgtgaccgtggacctggagcagagaagacacctggaggagcagctgaaggagatccacagaaagctgcaggccgtggacagcggcctgatcgccctgagagagaccagcaagcacctggagcacaaggacaacgagctgagacagaagaagaaggagctgctggagagaaagaccaagaagagacagctggagcagaagatcagcagcaagctgggcagcctgaagctgatggagcaggacacctgcaacctggaggaggaggagagaaaggccagcaccaagatcaaggagatcaacgtgcagaaggccaagctggtgaccgagctgaccaacctgatcaagatctgcaccagcctgcacatccagaaggtggacctgatcctgcagaacaccaccgtgatcagcgagaagaacaagctggagagcgactacatggccgccagcagccagctgagactgaccgagcagcacttcatcgagctggacgagaacagacagagactgctgcagaagtgcaaggagctgatgaagagagccagacaggtgtgcaacctgggcgccgagcagaccctgccccaggagtaccagacccaggtgcccaccatccccaacggccacaacagcagcctgcccatggtgttccaggacctgcccaacaccctggacgagatcgacgccctgctgaccgaggagagaagcagagccagctgcttcaccggcctgaaccccaccatcgtgcaggagtacaccaagagagaggaggagatcgagcagctgaccgaggagctgaagggcaagaaggtggagctggaccagtacagagagaacatcagccaggtgaaggagagatggctgaaccccctgaaggagctggtggagaagatcaacgagaagttcagcaacttcttcagcagcatgcagtgcgccggcgaggtggacctgcacaccgagaacgaggaggactacgacaagtacggcatcagaatcagagtgaagttcagaagcagcacccagctgcacgagctgaccccccaccaccagagcggcggcgagagaagcgtgagcaccatgctgtacctgatggccctgcaggagctgaacagatgccccttcagagtggtggacgagatcaaccagggcatggaccccatcaacgagagaagagtgttcgagatggtggtgaacaccgcctgcaaggagaacaccagccagtacttcttcatcacccccaagctgctgcagaacctgccctacagcgagaagatgaccgtgctgttcgtgtacaacggcccccacatgctggagcccaacacctggaacctgaaggccttccagagaagaagaagaagaatcaccttcacccagcccagctag

SEQ ID NO: 184485 - DNA, 3306 bp, Artificial Sequence
  derived and/or modified sequence
atggcaacaccatcaaagaaaacaagtactccttccccacaaccaagtaaacgcgccctgcctcgggacccgagttctgaggtccccagcaagcgcaaaaattcagcccctcaacttccactgctgcagtcctcagggcctttcgttgaaggatctatcgttagaatttctatggagaacttcctgacatacgatatctgtgaagtgagccctggtccgcacttaaatatgattgtgggagcgaacggaacaggaaaatcatccatcgtatgcgcaatttgtctcggcctcgcaggcaaaccagccttcatgggaagggctgataaggtgggctttttcgttaagcgcggctgctctaggggaatggtggagatcgagcttttcagagccagcggaaatctagttatcacacgcgagatagatgtagcaaaaaatcaatccttttggttcatcaacaaaaaatccacgacacagaagatcgttgaagagaaagtggcagcgttgaacattcaggtgggcaacctgtgtcagtttctgcctcaggacaaagttggtgaatttgccaagctttctaaaatcgagctgttggaggctaccgagaaatctatcgggccccctgaaatgcataagtaccactgtgagctgaagaatctcagagagaaagaaaagcagctcgagacttcttgtaaagaaaagacagaatacttacaaaaaatggtgcagcggaacgagaggtacaagcaagacgtggagagattctacgagagaaagcgccatctggatctcatcgaaatgctggaagccaagcggccctgggtagaatatgagaatgtgcgtcaagaatatgaggaagtgaaactggtgagagaccgtgtcaaagaggaagtacgcaagttaaaggaggggcagattccagtcacttgtagaattgaagaaatggagaatgaacgccataatttggaagctaggatcaaggaaaaggcaaccgacatcaaggaagcgtcccaaaaatgcaaacaaaagcaggacgtcattgagaggaaggacaaacatatagaggagctgcagcaggctcttatagtgaagcagaatgaagaactggacagacagcgtagaattggcaatacccgcaagatgatcgaggacctgcagaacgagctgaagacaacggaaaactgcgagaacctccagccacaaattgatgccataacaaacgatcttcggaggatccaggatgaaaaggctttatgtgagggggaaattattgacaaacggagagagagagagacacttgagaaggaaaaaaagagcgttgatgaccacatcgtccggttcgacaacctgatgaaccaaaaggaagataaactgagacaaaggtttagggatacatacgatgcagtgctttggctgcgcaacaatcgggacaagtttaaacaacgggtgtgtgagcctattatgctaacaatcaatatgaaggacaataaaaacgcaaagtacattgagaatcacattccttccaatgacttgcgcgccttcgtgttcgagagtcaggaggatatggaagtgttcttgaaagaagtgcgggacaacaaaaaactgcgggtaaacgcagtgatcgccccaaagtcctcttacgcggacaaggcgccctcccggtcacttaatgaactgaagcagtacgggtttttcagttatcttcgtgagctcttcgatgctccggaccccgtcatgagctacctctgctgtcaataccacatacacgaagtgcccgtgggaacggagaagactcgggaaagaattgagcgtgtgattcaagaaacacgcttaaaacaaatatataccgcagaggagaaatatgtcgtgaagacttccttctatagcaacaaggtgatctctagtaacaccagccttaaggttgctcagttcctgactgtgactgttgatctcgaacagcggcgacacctggaggagcagctgaaggagattcataggaagctccaggcagttgacagtggacttattgccctacgcgaaacctcgaagcacctggaacacaaagacaacgagttacggcagaagaaaaaggaactcctggaacgtaagaccaagaaacgccaactggaacagaaaatctcttcaaagctgggaagcctcaagctaatggagcaggatacctgtaatctcgaggaggaggagaggaaagcttctactaagatcaaagagattaacgtccagaaggccaagcttgtaacagagctcacgaacctcatcaaaatctgtacgagtctgcacatccagaaagtggatttaatcctccagaacactacagtaattagcgaaaagaataagctggaaagtgattacatggccgcttcctctcagctgcggctgactgaacagcatttcatcgagctggatgaaaaccgccaacggctcttgcagaagtgtaaggagttgatgaagcgggcaagacaagtgtgtaatcttggagctgagcagaccctgcctcaggaataccagacccaagttccaacgatccccaatggacacaatagctctctgccaatggtatttcaggatttgcctaacaccctcgatgaaatcgacgctctattgactgaggagcggagtagggcaagttgctttaccggtctgaatcccaccatcgtgcaggagtacacaaaacgggaagaagaaattgagcaactgaccgaggaactcaaggggaaaaaggtggaactcgaccagtaccgagagaatattagtcaggtgaaggagcgatggctgaatccgttaaaagaacttgtcgagaaaatcaatgaaaagttttctaactttttctcatccatgcagtgtgccggcgaggtcgacttgcacaccgaaaacgaggaggattatgacaagtatggaatacgaataagggtgaaatttcgatcatctacacaactccacgaacttacccctcatcaccaatccggaggagaaaggagcgtgagcactatgctctatctcatggcacttcaggagctaaatcggtgccctttcagagtcgtggatgagatcaaccagggaatggatcccatcaacgaacgtagagtcttcgagatggtcgtgaatactgcttgcaaggagaatacttcccaatacttcttcattacacccaagctcctccaaaacttaccttactccgagaagatgaccgttctgtttgtgtataatggccctcacatgctggaacctaatacctggaatctgaaggcattccagaggagaaggaggagaattacttttacacaaccctcatag

SEQ ID NO: 184486 - DNA, 3306 bp, Artificial Sequence
  derived and/or modified sequence
atggccacccccagcaagaagaccagcacccccagcccccagcccagcaagagggccctgccccgggaccccagcagcgaggtgcccagcaagaggaagaacagcgccccccagctgcccctgctgcagagcagcggcccctttgtggagggcagcatcgtgcgcatctccatggagaacttcctgacctatgacatctgtgaggtgtccccaggcccccacctgaacatgattgtgggcgccaacggcaccgggaagagcagcatcgtgtgtgccatctgcctgggcctggccggcaagccagccttcatgggccgggctgacaaggtgggcttctttgtgaagaggggctgcagccggggcatggtggagattgagctgttccgggccagcggcaacctggtgatcacccgggagattgatgtggccaagaaccagagcttctggttcatcaacaagaagagcaccacccagaagatcgtggaggagaaggtggccgccctgaacatccaggtgggcaacctgtgccagttcctgccccaggacaaggtgggggagtttgccaagctgagcaagattgagctgctggaggccacagagaagagcatcggccccccagagatgcacaagtaccactgtgagctgaagaacctgcgggagaaggagaagcagctggagaccagctgcaaggagaagacagagtacctgcagaagatggtgcagagaaatgaaagatacaagcaggatgtggagcgcttctatgaaaggaagaggcacctggacctgattgagatgctggaggccaagaggccctgggtggagtatgaaaatgtgcggcaggagtatgaggaggtgaagctggtgcgggacagagtgaaggaggaggtgaggaagctgaaggagggccagatccctgtgacctgccgcatcgaggagatggagaatgaaagacacaacctggaggcccgcatcaaggagaaggccacagacatcaaggaggccagccagaagtgcaagcagaagcaggatgtgattgaaaggaaggacaagcacatcgaggagctgcagcaggccctgattgtgaagcagaatgaggagctggaccggcagaggagaattggcaacaccaggaagatgattgaggacctgcagaatgagctgaagaccacagagaactgtgagaacctgcagccccagattgatgccatcaccaatgacctgcggcgcatccaggatgagaaggccctgtgtgagggggagatcatcgacaagagaagagagcgggagaccctggagaaggagaagaagtctgtggatgaccacatcgtgcgctttgacaacctgatgaaccagaaggaggacaagctgcggcagcgcttccgggacacctatgatgctgtgctgtggctgaggaacaacagagacaagttcaagcagagggtgtgtgagcccatcatgctgaccatcaacatgaaggacaacaagaatgccaagtacatcgagaaccacatccccagcaatgacctgcgggcctttgtgtttgagagccaggaggacatggaggtgttcctgaaggaggtgcgggacaacaagaagctgcgggtgaatgctgtgattgcccccaagagcagctatgctgacaaggcccccagccgcagcctgaatgagctgaagcagtatggcttcttctcctacctgcgggagctgtttgatgccccagaccctgtgatgagctacctgtgctgccagtaccacatccacgaggtgcctgtgggcacagagaagacccgggagcgcatcgagagggtcatccaggagacccggctgaagcagatctacacagctgaggagaagtatgtggtgaagaccagcttctacagcaacaaggtgatcagcagcaacaccagcctgaaggtggcccagttcctgactgtgacagtggacctggagcagaggaggcacctggaggagcagctgaaggagatccacaggaagctgcaggccgtggacagcggcctcatcgccctgcgggagaccagcaagcacctggagcacaaggacaatgagctgcggcagaagaagaaggagctgctggagaggaagaccaagaagaggcagctggagcagaagatcagcagcaagctgggcagcctgaagctgatggagcaggacacctgcaacctggaggaggaggagaggaaggccagcaccaagatcaaggagatcaacgtgcagaaggccaagctggtgacagagctgaccaacctgatcaagatctgcaccagcctgcacatccagaaggtggacctgatcctgcagaacaccaccgtcatcagcgagaagaacaagctggagagtgactacatggccgccagcagccagctgcggctgacagagcagcacttcatcgagctggatgaaaatcggcagaggctgctgcagaagtgcaaggagctgatgaagagggcccggcaggtgtgcaacctgggcgctgagcagaccctgccccaggagtaccagacccaggtgcccaccatccccaacggccacaacagcagcctgcccatggtgttccaggacctgcccaacaccctggatgaaattgatgccctgctgacagaggagaggagccgggccagctgcttcaccggcctgaaccccaccatcgtgcaggagtacaccaagcgggaggaggagattgagcagctgacagaggagctgaagggcaagaaggtggagctggaccagtaccgggagaacatcagccaggtgaaggagcgctggctgaaccccctgaaggagctggtggagaagatcaatgagaagttcagcaacttcttcagctccatgcagtgtgccggggaggtggacctgcacacagaaaatgaggaggactatgacaagtatggcatccgcatccgggtgaagttccgcagcagcacccagctgcacgagctgaccccccaccaccagagcggcggggagaggtctgtgtccaccatgctgtacctgatggccctgcaggagctgaaccgctgccccttccgggtggtggatgagatcaaccagggcatggaccccatcaatgaaagaagagtgtttgagatggtggtgaacacagcctgcaaggagaacaccagccagtacttcttcatcacccccaagctgctgcagaacctgccctacagcgagaagatgacagtgctgtttgtgtacaacggcccccacatgctggagcccaacacctggaacctgaaggccttccagaggagaagaagacgcatcaccttcacccagcccagctag

SEQ ID NO: 184487 - DNA, 3306 bp, Artificial Sequence
  derived and/or modified sequence
atggccacccccagcaagaagaccagcacccccagcccccagcccagcaaacgggccctccctagggacccaagtagtgaagtgccctctaaacgaaaaaactccgccccccagcttccacttctgcagtcttccggccctttcgtcgagggcagcatcgtgaggatctctatggagaactttctaacttacgacatttgtgaggtctcccctggccctcacctgaatatgattgtgggcgctaatggtactggcaaatcctctatcgtctgtgcaatttgtttggggttagccgggaaaccagccttcatgggcagggccgacaaagtcggattctttgtgaagaggggatgttcccgggggatggtggagattgaactctttcgcgcatctggtaatttggtcatcacccgcgaaatcgatgtcgcaaaaaatcagtcgttttggtttattaacaagaaaagcactactcaaaaaatcgtggaggaaaaagtagccgccctgaacatacaggtgggcaatctttgtcagttcctgcctcaggacaaggtgggcgaatttgcaaagttatccaagatcgaactgctggaagccacggaaaagtctatcggacccccagaaatgcacaagtaccactgtgagctgaagaacctgcgggagaaggagaaacagctggaaacttcttgtaaagaaaagactgagtaccttcaaaagatggtgcaacgtaatgaaaggtacaaacaggacgtagagcggttttacgagaggaaacgccatctcgacctaattgagatgcttgaggcaaagagaccttgggtggagtatgagaatgtgcgtcaggaatacgaggaggtgaaactggtccgggacagagtgaaggaagaggtgcgcaagttgaaagaagggcagattcccgtcacctgcagaatagaagagatggagaacgaaaggcataatctcgaggcacgaattaaggagaaagccactgatatcaaagaagccagccagaagtgcaaacagaaacaagatgtaatcgagagaaaggacaagcacattgaggagttacagcaagctctgatagtgaagcaaaatgaggagctggatcgccagagaagaatcgggaacacaaggaaaatgattgaagatttgcagaatgagcttaagactactgagaactgcgaaaatctccagccccaaatcgatgcaattacaaatgacttacgccgaattcaggacgaaaaggcactgtgtgagggcgaaatcatcgacaaacggcgagagcgagagacgcttgagaaggagaagaagagcgtcgacgaccatatcgtgcggttcgacaacttaatgaaccagaaagaggataaactgaggcagaggtttagagatacttacgatgccgtgctctggcttcgcaacaaccgcgacaagttcaagcagagagtctgtgagccaatcatgctcactattaacatgaaagacaataaaaatgcgaagtatattgagaaccacataccctctaacgatctgcgcgcctttgtcttcgaaagtcaggaagacatggaggtatttctgaaagaagtccgagacaataagaagctaagagttaatgcagttatcgccccaaagagttcatatgcggacaaagctccatcaaggtctctgaacgaactcaaacagtacggcttctttagctatctgcgggagctgtttgacgctccagatcctgtgatgagttatctgtgttgccaatatcacatccacgaagtgccagtgggaacggaaaagacaagagagaggatcgagcgcgtcatacaggagacaagactcaagcagatatataccgccgaggaaaaatacgtggtcaagacatcattctattctaataaggtgatctcttccaatacctccctgaaagttgcccaatttctgacagttaccgttgacttggaacagcggcgccacctcgaggaacagctgaaggaaatacacaggaagttacaggcagtagattctggactgatcgcactgagggagacatctaagcacctcgagcacaaggataacgaactcagacagaagaagaaggaacttctagagaggaagaccaaaaaacggcaacttgagcaaaagatcagctcgaagctgggcagcttaaaactgatggaacaagatacttgcaacctggaagaggaggagcgcaaggcgagcacaaagatcaaagaaatcaacgtgcagaaagctaagttggttaccgagctcacaaacctgatcaagatctgcacatcactgcacatccagaaggtggacctgatccttcagaatactactgttatcagcgaaaaaaataaattggagtccgattatatggccgcatccagccagttacggctaactgaacaacacttcatcgaacttgatgagaatcgccagcgacttctgcagaagtgtaaagaactcatgaaacgggctcggcaggtttgcaatttgggcgcggagcagacacttccccaggagtaccaaacccaggtgccaaccattcccaatggccataattcctcactccccatggtcttccaggatctgcccaatactctcgacgagattgatgctctactcacagaggagaggagtagagcctcctgtttcaccggcctcaaccctaccatcgttcaagagtatactaagcgggaagaagaaatcgagcagctaacggaggagctgaaaggtaagaaagtagagctggaccagtaccgggaaaacatcagccaggtcaaagaacgatggctcaaccccttaaaggagctcgtcgagaagatcaatgaaaagttttcgaacttctttagctccatgcagtgtgcgggggaggtagatctccataccgaaaacgaggaggattacgataagtacggtatccggatcagggtgaaattccgtagtagcacacagctccatgagctgactccccaccaccaaagtggaggcgaacggagcgtaagcaccatgttgtatctcatggcccttcaggaactgaacagatgcccctttcgtgtagttgacgaaatcaaccagggaatggacccaattaacgagagacgggtgttcgaaatggtggtgaataccgcctgcaaagaaaatacttcacagtatttctttatcactcctaaattgcttcagaatctcccttactctgaaaagatgacggtgctttttgtgtacaatggtccgcacatgttagagccaaatacctggaatctcaaagcctttcagcgccgcaggcgccgcatcacgttcacccaaccttcctag

SEQ ID NO: 184488 - DNA, 3306 bp, Artificial Sequence
  derived and/or modified sequence
atggcaactccatcaaagaaaacgagcactccatcgccacagccatcaaagcgagcgctaccgagggatccaagctcggaagtgcccagtaagaggaaaaactcagcccctcagctcccactccttcagtccagcggccctttcgtggaggggtctatagttaggattagcatggagaactttctgacctatgacatctgcgaggtaagtccaggccctcacctgaatatgatcgtgggagccaatggaacgggaaagtcatcaatcgtgtgcgcgatttgtctgggactggcaggcaagccggcatttatgggcagagccgataaggtagggttctttgttaagcgaggctgcagcagagggatggtggagatcgaactctttagagcaagcgggaatctggtcattacacgcgaaatcgatgtcgcaaagaatcagagtttttggttcatcaataagaagtcaacaacacagaaaattgttgaggagaaggttgcagcattgaacatccaagtcggtaatctgtgtcagtttcttccacaagacaaggtgggagagtttgcaaagctaagtaagatcgagttactggaagcaaccgagaagtcaatagggccaccggaaatgcacaagtatcattgcgagctcaagaacctgcgggaaaaggagaaacagctggagaccagttgcaaggagaagaccgaatatcttcagaagatggtgcagaggaatgagaggtacaagcaggatgtggaacgattctacgagcggaagcgtcaccttgacctgatcgagatgttggaggctaagcggccttgggtggagtacgagaatgtgcgacaggagtacgaagaagtcaagcttgtgcgagatagagtcaaggaggaggtgaggaaactgaaagaaggccaaattcctgttacctgcagaatcgaggagatggagaatgagaggcacaatttagaggccaggatcaaagagaaagctactgatatcaaagaggcgtcacagaagtgcaagcagaagcaggatgtaatcgagcgcaaagataaacacattgaggagctgcagcaagcgttgattgtcaagcagaatgaagagctggatagacagcgacggatcggcaacactcggaagatgatcgaggatctgcagaacgagctgaaaacaactgagaattgcgagaacctccagccgcagattgatgctatcactaatgacctacgcaggatccaggatgagaaggccttgtgcgagggggaaattatcgacaagaggagagagagagagactctggagaaagagaagaaatcagtggatgaccatatcgttcggttcgataacctgatgaaccagaaagaagacaagctgcgccagagattcagggatacctatgatgctgtcctctggctccggaacaacagggataagtttaaacagagggtttgtgagccaatcatgctgaccatcaacatgaaggacaacaaaaatgcgaaatatatcgaaaaccatatacccagcaacgacctccgagcttttgtctttgagagccaagaagatatggaggtttttcttaaggaggtgagggataacaagaaactaagggtgaatgctgtcattgccccaaagtcctcgtacgctgacaaggctccctcccgttccctcaacgagcttaagcagtatggattttttagctatcttagggaattgtttgacgcaccagacccagttatgtcgtacctctgctgtcagtatcatatccatgaagtccctgtgggcacagagaagacacgcgagagaatagaaagggtcattcaggaaacacgcctgaagcaaatttacacagctgaggaaaaatacgttgtgaagaccagcttttatagcaataaagtgatctctagcaatactagcctgaaagtagcccagtttctcacagtcactgtcgatctggaacagcgcagacacctagaagaacagctcaaagaaatccaccgaaaactccaggctgtggatagcggcctgatcgctctccgggagacaagtaagcacctagaacacaaagataatgaattgcgccagaagaaaaaggaactgctcgaaagaaaaacaaaaaagaggcagcttgaacagaagatatctagtaagttgggttctcttaagctgatggagcaggacacctgtaacctcgaggaggaggaaagaaaagcttctacaaagattaaagaaattaatgtccagaaggccaaactggtgaccgaactaacaaatttgatcaagatttgcacaagcctccacatccagaaggtagatcttatcctgcagaacacaacagtcatcagcgaaaaaaacaagttggaaagcgattacatggctgcaagctcccagttgagactgaccgagcagcattttattgaactggatgagaatagacaacgactgctgcagaaatgtaaagagctgatgaaacgagctaggcaggtgtgcaaccttggtgctgagcagactctgccacaggagtaccagacccaggtacctacaatccccaatgggcataattcctctctccctatggttttccaggacctgccaaacactttagacgaaattgacgcactgctgactgaagaacggtcgagggcctcctgctttaccgggctcaaccctaccatcgtgcaagagtatactaaaagagaggaagaaattgaacaactgactgaagagttgaagggaaaaaaggtggagctagatcaataccgcgagaacatttcgcaggttaaggaacggtggcttaatcctctcaaggagcttgtcgagaagatcaacgaaaagttctccaattttttttcttctatgcagtgcgcaggagaagtggatcttcacaccgaaaacgaggaagactacgacaagtacggcatccgcatccgggtcaagttccgctcatctacccaactgcacgaactgaccccacaccaccagtccgggggagaaagatccgtcagcacaatgctgtacctgatggcccttcaggagttgaacaggtgcccatttcgagtcgtagacgaaatcaatcaaggaatggatccaattaacgagaggcgagtgttcgagatggtggtcaatactgcctgtaaggagaacaccagtcagtacttttttataacacccaagctgctgcagaatcttccatactctgagaaaatgacagtgctgtttgtctacaacgggccacatatgcttgagccaaacacttggaatcttaaggccttccagcgcagacggaggcgcatcacattcacacaaccgtcctag

SEQ ID NO: 184489 - DNA, 5921 bp, Artificial Sequence
  derived and/or modified sequence
cgcctgggctgccggacggtgggaacggaagtcgctgtgggacgctgaggaagccaggatggcgactccgagcaagaagacgtcaactccaagcccccagccttccaagagagctctcccgagagacccttcgtcggaggtcccgagcaagaggaagaattcggccccgcagctgccgctgttgcagtcgtccgggcctttcgtggaaggctctatcgtccgcatctcgatggagaacttcctaacatatgatatttgtgaagtatctcctggaccccacttgaatatgatcgttggagccaatggaacagggaagtcgagcattgtgtgtgccatttgccttggtttagctggaaaacctgctttcatgggacgagcagataaggttgggttttttgtgaagagaggatgttctagaggcatggttgaaattgaattgttcagggcttctggaaatcttgtaatcacccgtgagattgatgtggcaaaaaatcagtccttttggttcatcaacaaaaaatctacaacccagaaaatagtggaagagaaagttgcagccttaaatattcaagtggggaatctttgccagtttctccctcaggacaaagttggagaatttgctaaactcagcaaaattgaactcctcgaagccactgaaaagtcaattggtcccccagaaatgcacaaatatcactgtgaactcaaaaacttaagggagaaagaaaaacagctcgagacctcatgcaaagagaaaactgagtatctacagaaaatggttcagaggaatgaaagatataaacaagatgtggagaggttctatgaacggaagcgacatttagatttaattgagatgcttgaagcaaaaaggccatgggtggaatatgaaaatgttcgtcaggaatatgaagaagtaaaactagttcgtgaccgagtgaaggaagaggtcagaaaacttaaagaagggcagattcctgtaacatgtcgaattgaagaaatggaaaacgagcgtcacaatttggaggctcgaatcaaagaaaaggcaacagatattaaggaggcatctcaaaaatgcaaacagaagcaagatgttatagaaaggaaagataaacatattgaggaacttcagcaggctttaatagtaaagcaaaatgaagagcttgaccgacagaggagaataggtaatacccgcaaaatgatagaggatttgcaaaatgaactaaagaccacggaaaactgcgagaatcttcagccccagattgatgccattacaaatgatctgagacggattcaggatgaaaaggcattatgtgaaggcgaaataattgataagcgaagagagagggaaactctagagaaggagaaaaagagtgtggacgatcatattgtacgttttgacaatcttatgaatcagaaggaagataagctaagacagagattccgtgacacgtatgatgctgttttatggctaagaaataacagagacaaatttaaacaaagagtctgtgagcccataatgctcacgatcaatatgaaagataataaaaatgccaaatatattgaaaatcatattccatcaaatgacttaagagcctttgtatttgaaagtcaagaagatatggaggttttcctcaaagaggttcgtgacaataaaaaattaagagtaaatgctgttattgctcccaagagttcatatgcagacaaagcaccttcaagatctttgaatgaacttaaacaatacggatttttctcttatttgagagaattatttgatgcacctgatcctgtaatgagttacctttgctgtcagtatcatattcatgaagttcctgtaggaactgaaaagaccagagaaagaattgaacgggtaatacaagaaacccgattaaaacagatttatacagcagaagaaaagtatgtggtgaaaacttctttttattcaaacaaagttatttctagtaacacatctctaaaagtagcgcagtttctcactgtcactgtggacctagagcagagaagacacttagaagaacagctaaaggaaattcatagaaaattgcaagcagtggattcagggttgattgccttacgtgaaacaagcaaacatctggagcacaaagacaatgaacttagacaaaagaagaaggagcttcttgagagaaaaaccaagaaaagacaactggaacaaaaaatcagttccaaactaggaagtttaaagctgatggaacaggatacttgcaatcttgaagaggaagagcgaaaagcaagtaccaaaatcaaagaaataaatgttcaaaaagcgaaacttgttaccgaattaacaaacctaataaagatttgtacttctttgcatatacaaaaagtagatttaattctccaaaatactacagtgatctctgagaagaacaaattagaatcagattatatggccgcatcttcacaactccgtcttacagagcaacatttcattgaattggatgaaaatagacagagattattgcagaaatgcaaggaacttatgaaaagagctaggcaagtatgtaacctgggtgcagagcagactcttcctcaagaataccagacacaagtacccaccattccaaatggacacaactcctcactccccatggttttccaagaccttccaaacacattggatgaaattgatgctttattaactgaagaaagatcaagagcttcctgcttcacgggactgaatcctacaattgttcaggaatatacaaaaagagaagaagaaatagaacagttaactgaggaactaaagggaaagaaagttgaactagatcaatacagggaaaacatttcacaggtaaaagaaaggtggcttaatcctttaaaagagctggtagaaaaaattaatgaaaaattcagcaatttttttagttccatgcagtgtgctggtgaagttgatctccatacagaaaatgaggaagattatgataaatatggaattcgaattagagtcaaatttcgaagtagtactcaactgcatgaattaactcctcatcatcaaagtggaggtgaaagaagtgtttctaccatgttatacttgatggcacttcaggagctaaatagatgtccattcagagtagttgatgaaatcaatcagggaatggacccaatcaatgaacggagagtgtttgaaatggttgtaaatactgcctgtaaagaaaatacatctcaatactttttcataacaccaaagctcctgcaaaatcttccttattctgaaaagatgacagttttgtttgtctacaatggccctcatatgctggaaccaaacacatggaatttaaaggctttccaaaggcggcggcgccgtattacattcactcaaccttcttaataaaagtaaagagagggaacttgggaattttttttgttaaattctgtttataagtatggctcaactgaataaaaggagattcactaaaacgaaaagcagttatttttggaaacctgcttttaaatacaaataggttgataatggaaactataatgacctttccaaaatagcagctggtagtaaaagttaagtcttcttcagtcttggttgaacttgagttcttggcactctgaccatgagtcattcagttctcatgttaaaatgtacttaatattacaaatcaaaggtacagtggaagaagggttaatcacaagaagttacttatatggtagccctgagctttaattgcagagtaactttaattacttttagagcctaaagatgactctagagcctaagtcctagtttctcccaatgttatatttaattttaaaaaattgatatgaaaatgtctaatgtatagtaataatttatgacagatctagtcatttcttcctattaaaaaagattaccttatctccagtaggaaatggaattttatgggcctttaaaagaaagttttatgaaacttgatgctataattttattggtatttcaaggggaaaaaagcactggggttcaaaaatggtagcagaactgctttgaaatgctgcaaggtggccactagatgatgcaaaatacaaccaaaagattgactgagaataaaattaggtgacaagggtttttaaagaataaccttttaaagtgtgggggcaggggttgcttttttttattttatttaaagtcaattatattttacatcttacatttctaaaagcattttataattatttttagtaagatttttcttaaaatttcatatactggtttctacaatttatatttgaaatttctcagtgttatgtaaagagtgatggaaaagcattgatttctttaaaaccgtaatgtttttagaacttaagcctatagggcctttcttacaatgttgatgtacccattatcttagaaaatctagtttaaactgttttctttcaccgcaaaagaattaaatgggaaaatcatttgtttatctctaagttatactaattagtagaaccaaacaaattatcttcttttaaaaaataaatcttataggaaaatagacagtccaaagtcatgtctttgaacagtggattggatctgtgccagtaatgacaaaattatttttttgacttgcttgcctgaataaattgaagaattgctttcagtttgggttttgtatattcttaagtagccattgaaatttatattcttaactaggtcaaaaaataatgagccataagtttatgtcctctcacttagacattttctctttaaaaaggtattttcttctttataaacattttaaaagagccttcccttcttaaactaactccagtgcatgaagtgtgaaaatattttaaaatgacatttttactaatatgagcaagtcatgtaaacattgaagaacttggtaacatattagtaaatggatattaccaaatgttttcatcgttaattactttgcgttccaccaaaatatctttactaaaatgtgcttggtgtagtttgtttattgtctaaattagtaccagtcatcttatttctgcaaaatgagtatcaatgtgaaaaagacacgtgaagattaagcatgtttgaaaataaaatggtcaattacatttcaatttacataggccaacaactgttccatactttgtttgtaaacatttaatttctctactggacaaaattaatatttggctttacattgaattttgagctgtgaagaataaattatgtatcattttagcatattaaacagtagtaagtctagcacatagtctcagccacttaaaacaaaagtttttttgtttgtttgtttgtttgtttttttgagatggagtctcactctgttgcccaggctggagtgcagtggcgtgatctcggcttactgcaacctccgcctcccgggttcaagcgattctcctgcctcagcctcccaagtaactgggacaacaggcgcgtcccaccacacccagctaattttttatacttttagtagagatggggtttcagcatattggccaggctggtctcgaactcctgaccttgtgatccacccgcctcggcctcccaaagtgctgggattataggcgtgagcccctgcacccggccaaaagttgatttttaattacataaaaatcgtaaaaacttctagtaaaaacttgatttggtgaatacagttatatttaaaaaccttaaggtgacaagcattttctatgcctaaatcttcattggtttgcctggaaagagtctctgttaaaagattttccatattcaaagtaaaaggaaagatttcttgctttctaattgtcttttggacacatgcctattttctttgaggtataaacctttagatgtgaaaaatgtaatttcattctgctattgtgtgtgcttgtgtgtgtgtaattgaaaaaactgggaaatcctgctttgttggtaataaatcaatatttttatattcttttggtgtatgtta

SEQ ID NO: 184490 - protein, 2961 aa, Artificial Sequence
  derived and/or modified sequence
MGNAPSHSSEDEAAAAGGEGWGPHQDWAAVSGTTPGPGVAAPALPPAAALLEPARLREAAAALLPTPPCESLVSRHRGALFRWLEERLGRGEESVTLEQFRELLEARGAGCSSEQFEEAFAQFDAEGDGTVDAENMLEALKNSSGANLQGELSHIIRQLQACSLVPGFTDIFSESKEGLDIHSSMILRFLHRNRLSSAVMPYPMLEHCNNMCTMRSSVLKESLDQLVQKEKESPGDLTRSPEMDKLKSVAKCYAYIETSSNSADIDKMTNGETSSYWQSDGSACSHWIRLKMKPDVVLRHLSIAVAATDQSYMPQQVTVAVGRNASDLQEVRDVHIPSNVTGYVTLLENANVSQLYVQINIKRCLSDGCDTRIHGLRAVGFQRVKKSGVSVSDASAIWYWSLLTSLVTASMETNPAFVQTVLHNTQKALRHMPPLSLSPGSTDFSTFLSPNVLEEVDSFLIRITSCCSTPEVELTLLAFALARGSVAKVMSSLCTITDHLDTQYDASSLILSMASVRQNLLLKYGKPLQLTLQACDVKGKEDKSGPENLLVEPWTRDGFLTETGKTRASTIFSTGTESAFQVTQIRIMVRRGGIGAQCGLVFAYNSSSDKFCAEEHFKRFEKYDKWKLQELRQFVKSRIGCSSDDLGEDDPIGWFELEEEWDEADVKLQQCRVAKYLMVKFLCTRQESAERLGVQGLTISGYLRPARAEAEQSVTCAHCRKDTEESVCGATLLLRTLQFIQQLAHDLVQQKESGLKYKSFLDFAGLDLQIFWNFYSKLKQNPREECVSAQTLLLQLLQSCFSVLQGDVLAASEEEKAPIQSPKGVEAAKELYTHLCDVVDKVDGDSVPMEILKQEVRNTLLNGAAIFFPNRQTRRNHLFTMMNVTEQEHKQSLQLTFRSLCTYFSDKDPGGLLLLPEKNDLAKMNISEVLAVMDTLVSVAARECELLMLSGAPGEVGSVLFSLFWSVQGSLLSWCYLQLKSTDSGAKDLAVDLIEKYVGQFLASMRAILESLFSQYSGKTIVERLCNSVFSMAARQLVIFLLDFCTLDIPHCVLLREFSVLTELLKKLCSGPEGGLRKLDVETWQQEQPVVLHTWTKESAHNYENNCHEVSVFVSPGATYFEVEFDDRCETEKRYDYLEFTDARGRKTRYDTKVGTDKWPKKVTFKAGPRLQFLFHSDSSHNEWGYKFTVTACGLPDVAVSWGLDLQLLVSRLMGRLASQCMALKSVRQLGSNMVVPQAKMALVLSSPLWKPVFRHQVCPELELEASWPTHPHRNSKEVKNIPDDPCRHFLLDFAQSEPAQNFCGPYSELFKGFIQACRKQAPKTDIVAGSTIDQAVNATFAALVYRTPDLYEKLQKYVNSGGKIALSEEFAQVYSLADGIRIWMLEMKQKSLMSLGNEAEEKHSSEATEVNPESLAKECIEKSLLLLKFLPTGISSKESCEKLETADETSHLQPLNKRQRTSSVVEEHFQASVSPTEAAPPATGDQSPGLGTQPKLPSSSGLPAADVSPATAEEPLSPSTPTRRPPFTRGRLRLLSFRSMEEARLVPTVKEKYPVLKDVMDFIKDQSLSHRSVVKVLSLRKAQAQSILEVLKITQHCAESLGQPHCFHPPFILFLLELLTCQKDFTNYFGHLEGCGADLHKEIRDTYYQLVLFLVKAVKGFSSLNDRSLLPALSCVQTALLHLLDMGWEPNDLAFFVDIQLPDLLMKMSQENISVHDSVISQWSEEDELADAKQNSEWMDECQDGMFEAWYEKIAQEDPEKQRKMHMFIARYCDLLNVDISCDGCDEIAPWHRYRCLQCSDMDLCKTCFLGGVKPEGHGDDHEMVNMEFTCDHCQGLIIGRRMNCNVCDDFDLCYGCYAAKKYSYGHLPTHSITAHPMVTIRISDRQRLIQPYIHNYSWLLFAALALYSAHLASAEDVDGEKLDPQTRSSATTLRSQCMQLVGDCLMKAHQGKGLKALALLGVLPDGDSSLEDQALPVTVPTGASEEQLEKKAVQGAELSEAGNGKRAVHEEIRPVDFKQRNKADKGVSLSKDPSCQTQISDSPADASPPTGLPDAEDSEVSSQKPIEEKAVTPSPEQVFAECSQKRILGLLAAMLPPLKSGPTVPLIDLEHVLPLMFQVVISNAGHLNETYHLTLGLLGQLIIRLLPAEVDAAVIKVLSAKHNLFAAGDSSIVPDGWKTTHLLFSLGAVCLDSRVGLDWACSMAEILRSLNSAPLWRDVIATFTDHCIKQLPFQLKHTNIFTLLVLVGFPQVLCVGTRCVYMDNANEPHNVIILKHFTEKNRAVIVDVKTRKRKTVKDYQLVQKGGGQECGDSRAQLSQYSQHFAFIASHLLQSSMDSHCPEAVEATWVLSLALKGLYKTLKAHGFEEIRATFLQTDLLKLLVKKCSKGTGFSKTWLLRDLEILSIMLYSSKKEINALAEHGDLELDERGDREEEVERPVSSPGDPEQKKLDPLEGLDEPTRICFLMAHDALNAPLHILRAIYELQMKKTDYFFLEVQKRFDGDELTTDERIRSLAQRWQPSKSLRLEEQSAKAVDTDMIILPCLSRPARCDQATAESNPVTQKLISSTESELQQSYAKQRRSKSAALLHKELNCKSKRAVRDYLFRVNEATAVLYARHVLASLLAEWPSHVPVSEDILELSGPAHMTYILDMFMQLEEKHEWEKILQKVLQGCREDMLGTMALAACQFMEEPGMEVQVRESKHPYNNNTNFEDKVHIPGAIYLSIKFDSQCNTEEGCDELAMSSSSDFQQDRHSFSGSQQKWKDFELPGDTLYYRFTSDMSNTEWGYRFTVTAGHLGRFQTGFEILKQMLSEERVVPHLPLAKIWEWLVGVACRQTGHQRLKAIHLLLRIVRCCGHSDLCDLALLKPLWQLFTHMEYGLFEDVTQPGILLPLHRALTELFFVTENRAQELGVLQDYLLALTTDDHLLRCAAQALQNIAAISLAINYPNKATRLWNVEC

SEQ ID NO: 184491 - DNA, 8886 bp, Artificial Sequence
  derived and/or modified sequence
atgggcaacgcccccagccacagcagcgaggacgaggccgccgccgccggcggcgagggctggggcccccaccaggactgggccgccgtgagcggcaccacccccggccccggcgtggccgcccccgccctgccccccgccgccgccctgctggagcccgccagactgagagaggccgccgccgccctgctgcccacccccccctgcgagagcctggtgagcagacacagaggcgccctgttcagatggctggaggagagactgggcagaggcgaggagagcgtgaccctggagcagttcagagagctgctggaggccagaggcgccggctgcagcagcgagcagttcgaggaggccttcgcccagttcgacgccgagggcgacggcaccgtggacgccgagaacatgctggaggccctgaagaacagcagcggcgccaacctgcagggcgagctgagccacatcatcagacagctgcaggcctgcagcctggtgcccggcttcaccgacatcttcagcgagagcaaggagggcctggacatccacagcagcatgatcctgagattcctgcacagaaacagactgagcagcgccgtgatgccctaccccatgctggagcactgcaacaacatgtgcaccatgagaagcagcgtgctgaaggagagcctggaccagctggtgcagaaggagaaggagagccccggcgacctgaccagaagccccgagatggacaagctgaagagcgtggccaagtgctacgcctacatcgagaccagcagcaacagcgccgacatcgacaagatgaccaacggcgagaccagcagctactggcagagcgacggcagcgcctgcagccactggatcagactgaagatgaagcccgacgtggtgctgagacacctgagcatcgccgtggccgccaccgaccagagctacatgccccagcaggtgaccgtggccgtgggcagaaacgccagcgacctgcaggaggtgagagacgtgcacatccccagcaacgtgaccggctacgtgaccctgctggagaacgccaacgtgagccagctgtacgtgcagatcaacatcaagagatgcctgagcgacggctgcgacaccagaatccacggcctgagagccgtgggcttccagagagtgaagaagagcggcgtgagcgtgagcgacgccagcgccatctggtactggagcctgctgaccagcctggtgaccgccagcatggagaccaaccccgccttcgtgcagaccgtgctgcacaacacccagaaggccctgagacacatgccccccctgagcctgagccccggcagcaccgacttcagcaccttcctgagccccaacgtgctggaggaggtggacagcttcctgatcagaatcaccagctgctgcagcacccccgaggtggagctgaccctgctggccttcgccctggccagaggcagcgtggccaaggtgatgagcagcctgtgcaccatcaccgaccacctggacacccagtacgacgccagcagcctgatcctgagcatggccagcgtgagacagaacctgctgctgaagtacggcaagcccctgcagctgaccctgcaggcctgcgacgtgaagggcaaggaggacaagagcggccccgagaacctgctggtggagccctggaccagagacggcttcctgaccgagaccggcaagaccagagccagcaccatcttcagcaccggcaccgagagcgccttccaggtgacccagatcagaatcatggtgagaagaggcggcatcggcgcccagtgcggcctggtgttcgcctacaacagcagcagcgacaagttctgcgccgaggagcacttcaagagattcgagaagtacgacaagtggaagctgcaggagctgagacagttcgtgaagagcagaatcggctgcagcagcgacgacctgggcgaggacgaccccatcggctggttcgagctggaggaggagtgggacgaggccgacgtgaagctgcagcagtgcagagtggccaagtacctgatggtgaagttcctgtgcaccagacaggagagcgccgagagactgggcgtgcagggcctgaccatcagcggctacctgagacccgccagagccgaggccgagcagagcgtgacctgcgcccactgcagaaaggacaccgaggagagcgtgtgcggcgccaccctgctgctgagaaccctgcagttcatccagcagctggcccacgacctggtgcagcagaaggagagcggcctgaagtacaagagcttcctggacttcgccggcctggacctgcagatcttctggaacttctacagcaagctgaagcagaaccccagagaggagtgcgtgagcgcccagaccctgctgctgcagctgctgcagagctgcttcagcgtgctgcagggcgacgtgctggccgccagcgaggaggagaaggcccccatccagagccccaagggcgtggaggccgccaaggagctgtacacccacctgtgcgacgtggtggacaaggtggacggcgacagcgtgcccatggagatcctgaagcaggaggtgagaaacaccctgctgaacggcgccgccatcttcttccccaacagacagaccagaagaaaccacctgttcaccatgatgaacgtgaccgagcaggagcacaagcagagcctgcagctgaccttcagaagcctgtgcacctacttcagcgacaaggaccccggcggcctgctgctgctgcccgagaagaacgacctggccaagatgaacatcagcgaggtgctggccgtgatggacaccctggtgagcgtggccgccagagagtgcgagctgctgatgctgagcggcgcccccggcgaggtgggcagcgtgctgttcagcctgttctggagcgtgcagggcagcctgctgagctggtgctacctgcagctgaagagcaccgacagcggcgccaaggacctggccgtggacctgatcgagaagtacgtgggccagttcctggccagcatgagagccatcctggagagcctgttcagccagtacagcggcaagaccatcgtggagagactgtgcaacagcgtgttcagcatggccgccagacagctggtgatcttcctgctggacttctgcaccctggacatcccccactgcgtgctgctgagagagttcagcgtgctgaccgagctgctgaagaagctgtgcagcggccccgagggcggcctgagaaagctggacgtggagacctggcagcaggagcagcccgtggtgctgcacacctggaccaaggagagcgcccacaactacgagaacaactgccacgaggtgagcgtgttcgtgagccccggcgccacctacttcgaggtggagttcgacgacagatgcgagaccgagaagagatacgactacctggagttcaccgacgccagaggcagaaagaccagatacgacaccaaggtgggcaccgacaagtggcccaagaaggtgaccttcaaggccggccccagactgcagttcctgttccacagcgacagcagccacaacgagtggggctacaagttcaccgtgaccgcctgcggcctgcccgacgtggccgtgagctggggcctggacctgcagctgctggtgagcagactgatgggcagactggccagccagtgcatggccctgaagagcgtgagacagctgggcagcaacatggtggtgccccaggccaagatggccctggtgctgagcagccccctgtggaagcccgtgttcagacaccaggtgtgccccgagctggagctggaggccagctggcccacccacccccacagaaacagcaaggaggtgaagaacatccccgacgacccctgcagacacttcctgctggacttcgcccagagcgagcccgcccagaacttctgcggcccctacagcgagctgttcaagggcttcatccaggcctgcagaaagcaggcccccaagaccgacatcgtggccggcagcaccatcgaccaggccgtgaacgccaccttcgccgccctggtgtacagaacccccgacctgtacgagaagctgcagaagtacgtgaacagcggcggcaagatcgccctgagcgaggagttcgcccaggtgtacagcctggccgacggcatcagaatctggatgctggagatgaagcagaagagcctgatgagcctgggcaacgaggccgaggagaagcacagcagcgaggccaccgaggtgaaccccgagagcctggccaaggagtgcatcgagaagagcctgctgctgctgaagttcctgcccaccggcatcagcagcaaggagagctgcgagaagctggagaccgccgacgagaccagccacctgcagcccctgaacaagagacagagaaccagcagcgtggtggaggagcacttccaggccagcgtgagccccaccgaggccgccccccccgccaccggcgaccagagccccggcctgggcacccagcccaagctgcccagcagcagcggcctgcccgccgccgacgtgagccccgccaccgccgaggagcccctgagccccagcacccccaccagaagaccccccttcaccagaggcagactgagactgctgagcttcagaagcatggaggaggccagactggtgcccaccgtgaaggagaagtaccccgtgctgaaggacgtgatggacttcatcaaggaccagagcctgagccacagaagcgtggtgaaggtgctgagcctgagaaaggcccaggcccagagcatcctggaggtgctgaagatcacccagcactgcgccgagagcctgggccagccccactgcttccacccccccttcatcctgttcctgctggagctgctgacctgccagaaggacttcaccaactacttcggccacctggagggctgcggcgccgacctgcacaaggagatcagagacacctactaccagctggtgctgttcctggtgaaggccgtgaagggcttcagcagcctgaacgacagaagcctgctgcccgccctgagctgcgtgcagaccgccctgctgcacctgctggacatgggctgggagcccaacgacctggccttcttcgtggacatccagctgcccgacctgctgatgaagatgagccaggagaacatcagcgtgcacgacagcgtgatcagccagtggagcgaggaggacgagctggccgacgccaagcagaacagcgagtggatggacgagtgccaggacggcatgttcgaggcctggtacgagaagatcgcccaggaggaccccgagaagcagagaaagatgcacatgttcatcgccagatactgcgacctgctgaacgtggacatcagctgcgacggctgcgacgagatcgccccctggcacagatacagatgcctgcagtgcagcgacatggacctgtgcaagacctgcttcctgggcggcgtgaagcccgagggccacggcgacgaccacgagatggtgaacatggagttcacctgcgaccactgccagggcctgatcatcggcagaagaatgaactgcaacgtgtgcgacgacttcgacctgtgctacggctgctacgccgccaagaagtacagctacggccacctgcccacccacagcatcaccgcccaccccatggtgaccatcagaatcagcgacagacagagactgatccagccctacatccacaactacagctggctgctgttcgccgccctggccctgtacagcgcccacctggccagcgccgaggacgtggacggcgagaagctggacccccagaccagaagcagcgccaccaccctgagaagccagtgcatgcagctggtgggcgactgcctgatgaaggcccaccagggcaagggcctgaaggccctggccctgctgggcgtgctgcccgacggcgacagcagcctggaggaccaggccctgcccgtgaccgtgcccaccggcgccagcgaggagcagctggagaagaaggccgtgcagggcgccgagctgagcgaggccggcaacggcaagagagccgtgcacgaggagatcagacccgtggacttcaagcagagaaacaaggccgacaagggcgtgagcctgagcaaggaccccagctgccagacccagatcagcgacagccccgccgacgccagcccccccaccggcctgcccgacgccgaggacagcgaggtgagcagccagaagcccatcgaggagaaggccgtgacccccagccccgagcaggtgttcgccgagtgcagccagaagagaatcctgggcctgctggccgccatgctgccccccctgaagagcggccccaccgtgcccctgatcgacctggagcacgtgctgcccctgatgttccaggtggtgatcagcaacgccggccacctgaacgagacctaccacctgaccctgggcctgctgggccagctgatcatcagactgctgcccgccgaggtggacgccgccgtgatcaaggtgctgagcgccaagcacaacctgttcgccgccggcgacagcagcatcgtgcccgacggctggaagaccacccacctgctgttcagcctgggcgccgtgtgcctggacagcagagtgggcctggactgggcctgcagcatggccgagatcctgagaagcctgaacagcgcccccctgtggagagacgtgatcgccaccttcaccgaccactgcatcaagcagctgcccttccagctgaagcacaccaacatcttcaccctgctggtgctggtgggcttcccccaggtgctgtgcgtgggcaccagatgcgtgtacatggacaacgccaacgagccccacaacgtgatcatcctgaagcacttcaccgagaagaacagagccgtgatcgtggacgtgaagaccagaaagagaaagaccgtgaaggactaccagctggtgcagaagggcggcggccaggagtgcggcgacagcagagcccagctgagccagtacagccagcacttcgccttcatcgccagccacctgctgcagagcagcatggacagccactgccccgaggccgtggaggccacctgggtgctgagcctggccctgaagggcctgtacaagaccctgaaggcccacggcttcgaggagatcagagccaccttcctgcagaccgacctgctgaagctgctggtgaagaagtgcagcaagggcaccggcttcagcaagacctggctgctgagagacctggagatcctgagcatcatgctgtacagcagcaagaaggagatcaacgccctggccgagcacggcgacctggagctggacgagagaggcgacagagaggaggaggtggagagacccgtgagcagccccggcgaccccgagcagaagaagctggaccccctggagggcctggacgagcccaccagaatctgcttcctgatggcccacgacgccctgaacgcccccctgcacatcctgagagccatctacgagctgcagatgaagaagaccgactacttcttcctggaggtgcagaagagattcgacggcgacgagctgaccaccgacgagagaatcagaagcctggcccagagatggcagcccagcaagagcctgagactggaggagcagagcgccaaggccgtggacaccgacatgatcatcctgccctgcctgagcagacccgccagatgcgaccaggccaccgccgagagcaaccccgtgacccagaagctgatcagcagcaccgagagcgagctgcagcagagctacgccaagcagagaagaagcaagagcgccgccctgctgcacaaggagctgaactgcaagagcaagagagccgtgagagactacctgttcagagtgaacgaggccaccgccgtgctgtacgccagacacgtgctggccagcctgctggccgagtggcccagccacgtgcccgtgagcgaggacatcctggagctgagcggccccgcccacatgacctacatcctggacatgttcatgcagctggaggagaagcacgagtgggagaagatcctgcagaaggtgctgcagggctgcagagaggacatgctgggcaccatggccctggccgcctgccagttcatggaggagcccggcatggaggtgcaggtgagagagagcaagcacccctacaacaacaacaccaacttcgaggacaaggtgcacatccccggcgccatctacctgagcatcaagttcgacagccagtgcaacaccgaggagggctgcgacgagctggccatgagcagcagcagcgacttccagcaggacagacacagcttcagcggcagccagcagaagtggaaggacttcgagctgcccggcgacaccctgtactacagattcaccagcgacatgagcaacaccgagtggggctacagattcaccgtgaccgccggccacctgggcagattccagaccggcttcgagatcctgaagcagatgctgagcgaggagagagtggtgccccacctgcccctggccaagatctgggagtggctggtgggcgtggcctgcagacagaccggccaccagagactgaaggccatccacctgctgctgagaatcgtgagatgctgcggccacagcgacctgtgcgacctggccctgctgaagcccctgtggcagctgttcacccacatggagtacggcctgttcgaggacgtgacccagcccggcatcctgctgcccctgcacagagccctgaccgagctgttcttcgtgaccgagaacagagcccaggagctgggcgtgctgcaggactacctgctggccctgaccaccgacgaccacctgctgagatgcgccgcccaggccctgcagaacatcgccgccatcagcctggccatcaactaccccaacaaggccaccagactgtggaacgtggagtgctag

SEQ ID NO: 184492 - DNA, 8886 bp, Artificial Sequence
  derived and/or modified sequence
atgggcaatgctccaagccactcatccgaggatgaagctgctgccgccgggggagaggggtggggtccacaccaggactgggccgctgtctcaggaacaacacctggccctggcgtagccgcccctgcgctgccacctgctgccgctctgcttgaacccgccagactacgagaggccgcggctgcattgctacctactcccccatgcgagtcgcttgtcagtaggcaccgcggcgctttattccgttggctggaggagcggcttgggcgcggcgaggaaagtgtgacactcgagcagtttagagaactgcttgaggcgagaggagccggctgcagctccgagcaattcgaggaagcattcgcccagttcgatgcagagggggacggaacagtggacgctgagaacatgctcgaggctttgaagaacagcagtggcgccaacttgcaaggggagctgtctcacatcattcggcagctccaggcttgttcgctggtgcctggctttacagatatattctcagagtcaaaggaaggcctcgacatccattcttccatgatcctccgcttcctccatagaaaccgtctgagtagcgctgtgatgccataccccatgctggaacattgtaacaatatgtgtaccatgaggtcctcggtgctgaaggaatctctcgaccagttagtccagaaggaaaaagagtcccccggcgacctgacccgaagtccagagatggacaagctgaagagcgttgctaagtgttacgcttacatagagacctcctctaactcagccgatatcgataagatgacgaacggcgagactagctcttactggcagtcggatggctcagcatgcagccattggatccggctcaaaatgaaaccagacgtggttctgaggcatctgtccattgctgttgccgccaccgatcaatcctatatgccccaacaggtcactgtggccgtaggcaggaatgcctccgatctgcaggaggttcgggatgtgcacatcccgagtaacgtcacaggatatgtaaccttgcttgagaatgctaacgttagccaactgtacgtgcagatcaacatcaagcggtgtctgtcagatggctgtgatacccgtatccatggactgcgggccgtcggatttcagcgggtgaagaagagtggggtgagcgtgtccgacgcctcggcaatctggtattggagcctgctaacctctctggtgaccgccagcatggaaaccaaccccgcctttgtgcaaacagtgttacacaatacacagaaagctctgaggcatatgccccctttgagcctaagtcctggctccaccgatttttctacatttctgtcccccaacgttttggaggaggtagactccttcctcatccgcatcaccagctgctgttctactccagaggtcgagcttactctgttggcatttgccctggccagggggtctgtggccaaagtcatgtccagcctctgtacaataactgaccatcttgatacacagtatgatgcatcctctctaattctgagtatggctagcgtgcgccagaaccttctcttaaaatatggtaagcccctccagctgacgctccaagcctgcgatgtgaaaggcaaggaagataagtcaggacccgaaaatctgttagtcgaaccgtggacacgggacggctttctgacagaaactgggaaaacgcgcgcgagtaccatcttcagcactggaaccgaaagcgctttccaggttactcagattcgcatcatggtaagacggggtgggattggcgctcagtgcggccttgtttttgcctataactcttcctccgataaattctgcgccgaagagcacttcaagaggttcgagaaatacgataaatggaagctgcaggagttgagacaattcgtcaaatcccgaattggatgctcatctgatgaccttggcgaagacgacccaatcgggtggtttgaactcgaagaggagtgggacgaagccgacgtgaaactccaacagtgccgtgttgccaaatatctgatggtgaagtttctctgtacacgccaagaatccgctgagaggctcggagttcagggactgacaatttctggctacttgaggccagcaagggccgaggccgaacagagcgttacatgcgcacactgtcggaaggataccgaggaatccgtgtgcggtgcaacgttgctgctgaggacactccagtttatccagcaactagcccacgatctggtgcagcagaaggagtcagggcttaaatataagtcgttcctggacttcgctgggctggatctgcagatcttctggaatttctattccaaactgaagcaaaaccccagagaagagtgtgtgagtgcacagacgctgctgctgcagttactgcagtcatgcttttcggtgctgcaaggcgacgtattggccgcctccgaggaggagaaggcacctattcagagcccaaaaggagtggaagccgctaaggagctttacacccacctgtgcgatgtagtggataaagtcgacggtgattccgtaccaatggagatcctgaaacaggaagtgaggaatactcttttaaacggcgcggctattttttttccaaatagacagacacgcagaaaccatctgttcactatgatgaatgtcaccgaacaagaacataagcagagcctgcagctcacctttcgctccctgtgtacatatttctcggacaaggatcccggaggactgctacttctgcctgaaaaaaatgacctggctaagatgaatatatccgaagtgctggccgtgatggatacattggtatcggtcgctgcccgcgagtgcgagctgttgatgctgagcggagctccaggagaggttggcagtgtgctgtttagtttgttctggtctgtgcagggtagcctgctgtcctggtgttacctccagctcaagtccacagactcgggcgcaaaagatctagctgtcgaccttatcgaaaaatatgtagggcagttcctggcttcgatgcgcgctattctcgaaagcttgttttcccagtactctggcaaaacgatcgtggaacgattgtgtaactccgtgttttccatggccgcgcgacagctcgtgatctttttactggacttctgcactctggacatcccacattgtgtgttattacgggagttttccgtgttaacggaactcctgaagaaattgtgcagtggaccagaaggggggctgcgcaagctcgatgtcgagacgtggcagcaagagcaacctgtcgtgctccacacatggacaaaggagtcagcccacaactacgaaaacaactgtcatgaggtaagcgtttttgtgtcccccggggctacctacttcgaggtcgagttcgacgacagatgtgagactgaaaagcgctacgactatctcgagtttactgacgccaggggtcggaagacacgttacgacactaaagtgggcactgacaaatggcccaagaaggtgacattcaaagccggtcctcgtctgcaattccttttccatagtgattccagccacaacgaatggggctacaagtttaccgtcaccgcctgtggtcttccagatgtcgcagtgtcgtgggggctggatcttcagcttctggtctctcggctgatggggcggctggctagtcaatgcatggccttaaaatccgttcggcagttaggtagcaacatggtcgtgccacaggcgaagatggctctagttctgtccagtccactgtggaagcccgtcttccgccatcaggtttgccccgagctcgagctggaggcctcctggcccacgcaccctcaccgcaacagcaaggaagtaaaaaacattcctgatgatccttgcaggcacttcctccttgattttgcccagagtgaacctgctcagaatttttgtggaccctactccgaactctttaaggggttcattcaggcttgccgtaagcaggccccgaagacagacattgtggcaggatccaccatcgaccaggccgtgaacgccacatttgccgcgctcgtttatcgaacacccgacctctatgaaaagcttcagaagtatgtgaacagcggagggaagatagcattgtcagaagaatttgctcaggtatactctcttgccgacgggatacgtatatggatgttggaaatgaaacagaagtcactgatgagcttgggcaatgaagcagaggaaaagcactcttcagaggctaccgaagtgaatccagagtccctagccaaagaatgtatcgaaaaaagtctcctgttactcaagtttctgccaaccggtatctctagcaaagagtcgtgcgaaaaattggaaaccgcagatgaaacatcccaccttcagcccctgaacaaacgccagaggacttctagtgtggtcgaggagcattttcaagcgagcgttagccccacggaagcggccccgcccgccaccggagatcagtcccccgggttgggcacacaaccaaagctgccctcctccagtgggctccccgctgcggacgtctcgccagccacagctgaagagcccctctctccatccacacctactagacgcccaccctttaccaggggtaggctccgactgttgagctttagatcaatggaagaggctagactggttccaacggtaaaagaaaagtatccagtacttaaagatgtgatggattttatcaaagaccaaagcttgagccaccgctcggttgtaaaagttctttcgctgaggaaagcacaggcccagagtatcttggaggtgttgaaaataactcagcactgtgcagaatcactgggccagccccattgctttcaccctcccttcattctctttctgttggagctgctgacctgtcagaaggatttcaccaattacttcggccacctggaggggtgcggtgctgaccttcacaaagagatccgagacacatactaccaattggtgctcttcttggtgaaggctgtgaaaggctttagctccctcaacgaccgcagtttgttacccgcactctcctgtgttcagaccgctctcttgcatcttttagatatgggttgggagccgaatgaccttgccttttttgtggacatccagttgccggatctgctcatgaaaatgtcacaggagaatatatccgtacatgactccgttatctcccagtggtcagaagaggatgaacttgccgatgcaaagcaaaactcagaatggatggacgaatgtcaggacgggatgtttgaagcctggtatgagaaaattgcacaggaggatcccgagaaacagcgaaagatgcatatgttcatcgcccgctattgtgacctcctgaatgtggacatttcctgcgatggatgcgacgagattgcaccctggcaccggtatcgatgtttgcagtgcagcgatatggatttgtgcaagacctgttttttagggggagtcaagcccgagggacacggggatgatcatgagatggtgaatatggagttcacttgtgatcactgtcagggcctgattataggaaggcgtatgaactgtaacgtttgtgacgatttcgatttgtgctacgggtgttatgccgcgaagaaatattcctacggccatcttccaacgcattctatcacagcccaccctatggtgaccatcagaatcagtgatcggcagcgactcatccagccgtacatccacaattatagctggctgctgtttgcagcactggctctctacagcgcccatctcgctagcgccgaagatgttgacggcgagaaattggaccctcaaactcgctcctcagccaccacactgcgtagccagtgtatgcagctggtgggggactgcttgatgaaggcacatcagggcaaaggcctgaaagctctggcactgctcggagtcctacctgacggcgacagtagcctggaggatcaggcgctgcctgtgaccgtacccacaggtgctagtgaagaacagctagagaaaaaagcagtgcaaggggcagaattgtccgaggcgggcaacggtaagagggcagtacacgaggagattagacctgtcgacttcaagcagaggaataaggccgacaagggagtctccctgagcaaagacccttcctgccaaacacaaatttctgacagccctgcagacgcctccccaccaaccggcctaccagacgcggaggattctgaagtatccagccagaagcccattgaggaaaaggccgttactccctccccggagcaagtcttcgcggagtgctcccaaaagaggatcctggggctcctggccgccatgctaccacctctgaaaagtgggcccacggtaccgctgatagacctcgaacatgttctgcctctgatgtttcaggtggtgatatccaatgctggacaccttaacgagacgtatcacctgactctcgggctgcttggtcagttgatcatccgccttctgccagccgaggtggatgcagcagtaatcaaagtgttaagtgcaaaacataacctgtttgccgcaggcgactcatccatcgttcccgatggttggaaaactacccacctgctgttttccctaggggcagtgtgcctggacagtagggttggcttagactgggcctgcagcatggcagaaatcctgcggagcttaaactcggcccccttgtggcgcgacgtgattgctacctttacagatcactgtataaagcagcttccattccagttgaaacacacaaatatctttacgctccttgtcctcgtggggtttccacaggtcctctgcgtgggcacacgatgcgtctacatggacaacgctaacgagccccacaacgttataattctcaagcacttcaccgagaaaaaccgggccgttatcgttgatgttaagacgaggaagagaaaaacagtgaaggattatcagctggtacagaaggggggaggacaggaatgcggcgactcgagggcccagcttagccaatactcccagcacttcgcctttatcgcctcacacctgttgcaatcatcaatggatagtcattgcccagaggcggtggaggcgacatgggttttgtctcttgccctgaaggggctttataaaactttaaaagcccacggcttcgaagagattcgcgctacattcctccaaacggacttactgaaactccttgtgaaaaagtgctcaaaggggactggcttctcaaagacgtggctccttcgcgacctggaaattttgtcaattatgctgtactcgagtaaaaaggaaatcaacgcgctggccgagcatggcgaccttgagcttgatgaacgcggagatagggaggaagaggttgaaaggcctgttagtagccccggcgatcccgaacagaagaagctggatccactggagggattagacgaacccactcggatttgtttcctcatggctcatgacgccctaaacgctcccctccacatactccgcgccatctatgagctccaaatgaaaaaaactgattacttctttctggaagtgcagaaaagatttgacggggatgaacttaccacagacgaacgcatccgttccctggctcaacgctggcaacccagcaagtctctccgtttggaggagcagagcgcgaaagccgttgatacagatatgataatcctcccctgcctttcacgccccgcccggtgtgatcaagccacagcagagagtaaccctgtgacccaaaagcttatcagttccacagaatcggagctccaacagagctacgcaaaacaaagaagatcgaaatcagctgcccttctgcataaggagctgaactgcaaatcaaagcgcgccgtgagagactatctgttccgcgtaaatgaggctacagctgtgttatatgcacggcacgtcctcgcatctctcctggccgagtggccctcccacgtgcccgtctcagaggatattctggaactatctggacctgcgcacatgacttacatcttagatatgtttatgcagttggaggagaaacacgaatgggagaaaattctgcaaaaggtcctgcagggctgccgagaggacatgcttgggaccatggccctggccgcttgccagtttatggaggagccaggaatggaagtgcaggtgagagagagtaaacatccttataataataataccaatttcgaggacaaagttcacattcccggggcaatctatcttagcatcaaatttgactcccagtgtaatacagaagaaggatgcgatgagctggccatgagttcatctagcgacttccagcaggatcggcattctttctctggctcccagcagaaatggaaggatttcgagttgcctggcgatactttgtactatcgcttcacttctgatatgagcaacacggagtgggggtaccggttcacagtgactgccgggcacctgggtaggtttcagacgggcttcgaaatccttaagcaaatgctctcggaagaaagggtcgtgccacacctgcctttggccaaaatctgggagtggttggtgggtgtggcatgccggcaaactggacaccagcgattgaaagctatacaccttctgttgcgcatagttcggtgttgcggccatagtgatctgtgtgatcttgcgctgttgaagcccttatggcaactgttcacccacatggagtatggcttatttgaggatgtaactcagccaggcatactgctgcctctgcatagggccttgactgaattgttctttgtgacagagaatagggcacaagaacttggtgtgctccaggattatttgctggctctgacaactgacgaccacttgttgcgttgcgccgcccaggcgcttcagaatatcgcggctatatctctcgctatcaactatccaaataaagctacacggctgtggaatgtcgaatgctag

SEQ ID NO: 184493 - DNA, 8886 bp, Artificial Sequence
  derived and/or modified sequence
atgggaaatgcccccagccacagcagtgaagatgaagctgctgctgctggaggagagggctggggcccccaccaggactgggccgctgtgtctggcaccaccccaggccctggggtggccgccccagccctgcccccagctgctgccctgctggagcccgcccggctgcgggaggccgctgctgccctgctgcccaccccaccctgtgagagcctggtgagccgccacagaggagccctcttccgctggctggaggagcggctgggccgcggggaggagagcgtgaccctggagcagttccgggagctgctggaggcccggggagctggctgcagcagcgagcagtttgaggaggcctttgcccagtttgatgctgaaggagatggcaccgtggatgctgagaacatgctggaggccctgaagaacagcagcggggccaacctgcagggcgagctgagccacatcatccggcagctgcaggcctgcagcctggtgcccggcttcacagacatcttcagcgagagcaaggagggcctggacatccacagctccatgatcctgcgcttcctgcacaggaaccggctgagcagcgctgtgatgccctaccccatgctggagcactgcaacaacatgtgcaccatgaggagctctgtgctgaaggagagcctggaccagctggtgcagaaggagaaggagagccctggggacctgaccaggagccctgagatggacaagctgaagtctgtggccaagtgctacgcctacatcgagaccagcagcaacagcgctgacatcgacaagatgaccaacggggagaccagcagctactggcagagtgatggcagcgcctgcagccactggatccggctgaagatgaagccagatgtggtgctgcggcacctgagcattgctgtggccgccacagaccagagctacatgccccagcaggtgacagtggccgtgggcagaaatgccagtgacctgcaggaggtgagagatgtgcacatccccagcaatgtgacaggctacgtgaccctgctggagaatgccaacgtgtcccagctgtatgtgcagatcaacatcaagcgctgcctgagtgatggctgtgacacccgcatccacggcctgcgggctgtgggcttccagagggtgaagaagtctggagtgtctgtgtctgatgccagcgccatctggtactggagcctgctgaccagcctggtgacagcctccatggagaccaacccagcctttgtgcagacagtgctgcacaacacccagaaggccctgcggcacatgccacccctgagcctgagccctggcagcacagacttcagcaccttcctgagccccaacgtgctggaggaggtggacagcttcctgatccgcatcaccagctgctgcagcaccccagaggtggagctgaccctgctggcctttgccctggcccggggctctgtggccaaggtgatgagcagcctgtgcaccatcacagaccacctggacacccagtatgatgccagcagcctcatcctgtccatggcctctgtgcggcagaacctgctgctgaagtatggcaagcccctgcagctgaccctgcaggcctgtgatgtgaagggcaaggaggacaagagcggccctgagaacctgctggtggagccctggaccagagatggcttcctgacagaaacaggcaagacccgggccagcaccatcttcagcactggaacagagagcgccttccaggtgacccagatccgcatcatggtgcggcggggcggcatcggggcccagtgtggcctggtgtttgcctacaacagcagcagtgacaagttctgtgccgaggagcacttcaagagatttgagaagtatgacaagtggaagctgcaggagctgcggcagtttgtgaagagcagaattggctgcagcagtgatgacctgggggaggatgaccccatcggctggtttgagctggaggaggagtgggatgaagcagatgtgaagctgcagcagtgccgggtggccaagtacctgatggtgaagttcctgtgcacccggcaggagagcgctgagcggctgggcgtgcagggcctgaccatcagcggctacctgcggcctgcccgggcagaggccgagcagagcgtgacctgtgcccactgcaggaaggacacagaggagagcgtgtgtggggccaccctgctgctgcggaccctgcagttcatccagcagctggcccatgacctggtgcagcagaaggagagcggcctgaagtacaagagcttcctggactttgctggcctggacctgcagatcttctggaacttctacagcaagctgaagcagaacccccgggaggagtgtgtgtctgcccagaccctgctgctgcagctgctgcagagctgcttctctgtgctgcagggagatgtgctggccgccagcgaggaggagaaggcccccatccagagccccaagggcgtggaggccgccaaggagctgtacacccacctgtgtgatgtggtggacaaggtggatggagacagcgtgcccatggagatcctgaagcaggaggtgaggaacaccctgctgaatggagctgccatcttcttccccaaccggcagaccaggaggaaccacctgttcaccatgatgaatgtgacagagcaggagcacaagcagagcctgcagctgaccttccgcagcctgtgcacctacttcagtgacaaggaccccggcggcctgctgctgctgcctgagaagaatgacctggccaagatgaacatcagcgaggtgctggccgtgatggacaccctggtgtctgtggccgccagagaatgtgagctgctgatgctgagcggggcccctggagaggtgggctctgtgctcttcagcctcttctggagcgtgcagggcagcctgctgtcctggtgctacctgcagctgaagagcacagacagcggggccaaggacctggccgtggacctgattgagaagtatgtgggccagttcctggcctccatgagggccatcctggagagcctcttcagccagtacagcggcaagaccatcgtggagcggctgtgcaacagcgtcttctccatggccgcccggcagctggtgatcttcctgctggacttctgcaccctggacatcccccactgtgtgctgctgcgggagttctctgtgctgacagagctgctgaagaagctgtgcagcggccctgagggcggcctgaggaagctggatgtggagacctggcagcaggagcagcctgtggtgctgcacacctggaccaaggagagcgcccacaactatgagaacaactgccacgaggtgtctgtgtttgtgtcccctggggccacctactttgaggtggagtttgatgacagatgtgaaacagagaagagatatgactacctggagttcacagatgcccggggcaggaagaccaggtatgacaccaaggtgggcacagacaagtggcccaagaaggtgaccttcaaggccggcccccggctgcagttcctgttccacagcgacagcagccacaatgagtggggctacaagttcaccgtgacagcctgtggcctgcctgatgtggccgtgtcctggggcctggacctgcagctgctggtgtcccggctgatgggccgcctggccagccagtgcatggccctgaagtctgtgcggcagctgggcagcaacatggtggtgccccaggccaagatggccctggtgctgagcagccccctgtggaagcctgtgttccgccaccaggtgtgcccagagctggagctggaggcctcctggcccacccacccccacaggaacagcaaggaggtgaagaacatcccagatgacccctgccgccacttcctgctggactttgcccagagcgagcccgcccagaacttctgtggcccctacagcgagctgttcaagggcttcatccaggcctgcaggaagcaggcccccaagacagacatcgtggccggcagcaccatcgaccaggccgtgaatgccacctttgctgccctggtgtaccgcaccccagacctgtatgagaagctgcagaagtatgtgaacagcggcggcaagatcgccctgtctgaggagtttgcccaggtgtacagcctggctgatggcatccgcatctggatgctggagatgaagcagaagagcctgatgagcctgggcaatgaggccgaggagaagcacagcagcgaggccacagaggtgaaccctgagagcctggccaaggaatgtattgagaagagcctgctgctgctgaagttcctgcccaccggcatcagcagcaaggagagctgtgagaagctggagacagcagatgagaccagccacctgcagcccctgaacaagaggcagaggaccagctctgtggtggaggagcacttccaggcctctgtgagccccacagaagctgcccccccagccaccggggaccagagccctggcctgggcacccagcccaagctgcccagcagcagcggcctgcctgctgctgatgtgtccccagccacagctgaggagcccctgagccccagcacccccacccggcggccccccttcacccggggccgcctgcggctgctgtccttccgctccatggaggaggcccggctggtgcccaccgtgaaggagaagtaccctgtgctgaaggatgtgatggacttcatcaaggaccagagcctgagccacaggtctgtggtgaaggtgctgagcctgaggaaggcccaggcccagagcatcctggaggtgctgaagatcacccagcactgtgccgagagcctgggccagccccactgcttccacccccccttcatcctcttcctgctggagctgctgacctgccagaaggacttcaccaactacttcggccacctggagggctgtggggctgacctgcacaaggagatccgggacacctactaccagctggtgctcttcctggtgaaggctgtgaagggcttcagcagcctgaatgacaggagcctgctgcctgccctgagctgtgtgcagacagccctgctgcacctgctggacatgggctgggagcccaatgacctggccttctttgtggacatccagctgcctgacctgctgatgaagatgagccaggagaacatctctgtgcatgattctgtcatcagccagtggagcgaagaagatgagctggctgatgccaagcagaacagcgagtggatggatgagtgccaggacggcatgtttgaggcctggtatgagaagatcgcccaggaggaccctgagaagcagaggaagatgcacatgttcatcgcccgctactgtgacctgctgaatgtggacatcagctgtgatggctgtgatgaaattgccccctggcaccgctaccgctgcctgcagtgcagcgacatggacctgtgcaagacctgcttcctgggcggcgtgaagccagagggccatggagatgaccacgagatggtgaacatggagttcacctgtgaccactgccagggcctcatcatcggccgcaggatgaactgcaatgtgtgtgatgactttgacctgtgctacggctgctacgccgccaagaagtacagctatggccacctgcccacccacagcatcacagcccaccccatggtgaccatccgcatcagtgaccggcagaggctcatccagccctacatccacaactacagctggctgctgtttgctgccctggccctgtacagcgcccacctggccagcgcagaagatgtggatggagagaagctggacccccagaccaggagcagcgccaccaccctgcggagccagtgcatgcagctggtgggggactgcctgatgaaggcccaccagggcaagggcctgaaggccctggccctgctgggcgtgctgcctgatggagacagcagcctggaggaccaggccctgcctgtgacagtgcccactggagccagcgaggagcagctggagaagaaggctgtgcagggcgctgagctgtctgaggccggaaatggcaagagagctgtgcatgaggagatccggcctgtggacttcaagcagaggaacaaggctgacaagggcgtgtccctgagcaaggaccccagctgccagacccagatcagtgacagccctgcagatgccagcccccccaccggcctgcctgatgctgaggacagcgaggtgagcagccagaagcccatcgaggagaaggctgtgacccccagccctgagcaggtgtttgctgaatgttcccagaagaggatcctgggcctgctggccgccatgctgccccccctgaagagcggccccaccgtgcccctgattgacctggagcacgtgctgcccctgatgttccaggtggtgatcagcaatgccggccacctgaatgagacctaccacctgaccctgggcctgctgggccagctgatcatccggctgctgcctgctgaggtggatgctgctgtgatcaaggtgctgagcgccaagcacaacctgtttgctgctggggacagcagcatcgtgcctgatggctggaagaccacccacctgctcttcagcctgggcgctgtgtgcctggacagccgggtgggcctggactgggcctgcagcatggccgagatcctgcggagcctgaacagcgcccccctgtggagagatgtgattgccaccttcacagaccactgcatcaagcagctgcccttccagctgaagcacaccaacatcttcaccctgctggtgctggtgggcttcccccaggtgctgtgtgtgggcacccgctgtgtgtacatggacaatgccaatgagccccacaacgtcatcatcctgaagcacttcacagagaagaacagagctgtgattgtggatgtgaagaccaggaagaggaagacagtgaaggactaccagctggtgcagaagggcggcggccaggagtgtggggacagccgggcccagctgagccagtacagccagcactttgccttcatcgccagccacctgctgcagagctccatggacagccactgcccagaggccgtggaggccacctgggtgctgagcctggccctgaagggcctgtacaagaccctgaaggcccacggctttgaggagatccgggccaccttcctgcagacagacctgctgaagctgctggtgaagaagtgcagcaagggcaccggcttcagcaagacctggctgctgcgggacctggagatcctgagcatcatgctgtacagcagcaagaaggagatcaatgccctggccgagcacggggacctggagctggatgagcggggggaccgggaggaggaggtggagaggcctgtgagcagccctggggaccctgagcagaagaagctggaccccctggagggcctggatgagcccacccgcatctgcttcctgatggcccatgatgccctgaatgcccccctgcacatcctgcgggccatctatgagctgcagatgaagaagacagactacttcttcctggaggtgcagaagagatttgatggagatgagctgaccacagatgagcgcatccgcagcctggcccagcgctggcagcccagcaagagcctgcggctggaggagcagagcgccaaggctgtggacacagacatgatcatcctgccctgcctgagcaggcctgcccgctgtgaccaggccacagctgagagcaaccctgtgacccagaagctgatcagcagcacagaaagtgagctgcagcagagctatgccaagcagaggaggagcaagtctgctgccctgctgcacaaggagctgaactgcaagagcaagagagctgtgcgggactacctgttccgggtgaatgaggccacagctgtgctgtatgcccggcacgtgctggccagcctgctggccgagtggcccagccacgtgcctgtgtctgaggacatcctggagctgagcggccctgcccacatgacctacatcctggacatgttcatgcagctggaggagaagcatgagtgggagaagatcctgcagaaggtgctgcagggctgccgggaggacatgctgggcaccatggccctggccgcctgccagttcatggaggagcccggcatggaggtgcaggtgcgggagagcaagcacccctacaacaacaacaccaactttgaggacaaggtgcacatccctggggccatctacctgagcatcaagtttgacagccagtgcaacacagaggagggctgtgatgagctggccatgagcagcagcagtgacttccagcaggacagacacagcttcagcggcagccagcagaagtggaaggactttgagctgcccggggacaccctgtactaccgcttcaccagtgacatgagcaacacagagtggggctaccgcttcaccgtgacagctggccacctgggccgcttccagacaggctttgagatcctgaagcagatgctgtctgaggagcgggtggtgccccacctgcccctggccaagatctgggagtggctggtgggcgtggcctgccggcagacaggccaccagaggctgaaggccatccacctgctgctgagaattgtgcgctgctgcggccacagcgacctgtgtgacctggccctgctgaagcccctgtggcagctgttcacccacatggagtatggcctgtttgaagatgtgacccagcccggcatcctgctgcccctgcaccgggccctgacagagctgttctttgtgacagaaaatagagcccaggagctgggcgtgctgcaggactacctgctggccctgaccacagatgaccacctgctgcgctgtgccgcccaggccctgcagaacattgctgccatcagcctggccatcaactaccccaacaaggccacccggctgtggaatgtggagtgctag

SEQ ID NO: 184494 - DNA, 8886 bp, Artificial Sequence
  derived and/or modified sequence
atgggcaacgcccccagccacagcagcgaggacgaggccgccgccgcaggaggagaaggctggggcccccaccaggattgggcagctgtttctggcacaactcctggacccggtgtagcagcacccgcactgcctccggctgccgccctgttggagccagccaggctgcgcgaagctgccgcagccctgctcccaactcccccttgcgagagtcttgttagcagacatagaggggccctcttccgctggctcgaggagcggcttgggaggggcgaggagtctgtgactcttgagcaattcagggaactgttagaagcacggggagctggctgctcttcagagcagttcgaggaggcttttgctcagttcgacgccgagggtgatggaacagtggatgctgagaatatgctcgaggctctcaagaattcctcaggagcgaatctgcagggcgaactgagccatatcattcgtcagctgcaggcatgttccctggttccagggtttaccgacatattctccgagtcaaaggaaggtctggatattcactcttctatgatactgaggttcctgcacaggaaccggcttagtagcgcggtgatgccgtaccccatgttggaacactgtaacaatatgtgcactatgagaagttcagtccttaaggagtccctcgatcagttagtgcaaaaagagaaggaatcacctggcgatctgacgaggagccctgaaatggacaagcttaaaagtgtcgccaaatgttacgcatatatcgaaacgtctagtaactccgccgacatcgacaaaatgactaacggggaaacgagttcgtattggcagtccgatggcagcgcctgcagtcattggattcgtctgaagatgaagcccgatgtggtgcttcgccacctctccatagctgtagctgcaacagaccagagttacatgccccagcaggtgacagtggctgtggggagaaatgcctcagacctacaggaagtgcgcgacgttcacattccttctaacgtgacaggctacgtgaccctgctggaaaacgcaaatgtcagtcagttgtatgttcagattaatatcaagcggtgcctgagtgacgggtgtgacaccagaattcacggactacgggccgtggggttccagcgcgtcaagaagagcggggtgagcgtctctgacgcttcagccatatggtattggagtttgcttacaagccttgtgacagcatccatggaaactaaccctgcctttgtgcagacggtgctgcacaatactcagaaggcgttgcgtcatatgccccctcttagcctgtcgcctggttctacagacttttctaccttcttaagcccaaacgttttagaagaggtggactcattccttattaggataacatcctgctgcagcacccctgaggtggaacttacactgctggcctttgcattggcgcgcggctcggtcgcaaaagtgatgtcttctctttgcacgattactgaccatcttgatacccagtacgatgccagttcacttattctgagcatggcttctgtaaggcagaatctgctgttgaagtatggcaaacccttacagctgactctccaagcctgcgacgtgaaaggtaaggaagacaagagtggccctgagaatctgctagtcgagccttggacacgggacggctttttgactgagacgggtaagacccgagcttcaacaattttttctacagggactgagagcgcctttcaggttactcagatacggatcatggtaagacgagggggcatcggagcccagtgcggactcgtgttcgcgtacaactcatcatcggataaattctgcgctgaagaacacttcaaaaggttcgagaaatatgataaatggaaactccaggagcttagacaattcgttaagagtcgcataggttgttcttctgacgacctgggagaggatgaccccataggatggttcgaactcgaggaagagtgggacgaagcagatgtgaagctgcaacagtgtagagtagccaagtatttgatggtgaaattcttatgcacacggcaagaatccgctgaacggctgggagtgcaaggcctgaccatatcgggatatctgcggccagccagggctgaggccgaacagtcagttacttgcgcacattgccgcaaagacaccgaagaatctgtgtgtggtgcgacccttctcctgaggacgctgcagttcatacagcaacttgctcacgatttagtccagcagaaggagagtggtctcaaatacaagtcttttctggactttgccgggttggacctgcaaatcttttggaatttctattcaaagttaaaacaaaaccccagggaggaatgtgtttccgcccaaacactgctgctgcagcttttacagagttgtttttccgtgctccagggcgatgttcttgctgcaagtgaggaagagaaagccccaatccaatcaccgaaaggcgtggaagcagctaaggaactctacactcacttgtgcgatgtggtggacaaggtggacggcgacagtgtacccatggagattctgaagcaagaggtcagaaataccttgctcaatggggcagctatcttcttccctaacaggcagactcggcggaaccacctcttcactatgatgaacgtgaccgagcaggaacacaagcaatcgcttcagcttacctttcgctccctctgcacgtacttctcagacaaggatcctggcggcttactattgcttcccgagaaaaatgacctggccaaaatgaatatcagcgaggtgttagcagtgatggatacactggtctcagttgcagctagggaatgcgagttgctgatgctgtccggcgctcctggtgaggtgggtagtgtgttgttctctctcttttggtccgtgcaggggtcccttctctcttggtgttatctccagctcaaaagtacagactctggagcaaaagatctagcggtcgacctgatcgaaaagtatgtcggccagttcctggcttctatgagagccattcttgagtctcttttcagccagtatagtggaaagaccattgttgagagattatgcaatagcgtgttctccatggcagcccggcagctggtgatctttctgctggatttttgcactttggacatccctcactgcgtactcctcagagagttctcagtgctgaccgagcttttgaaaaagctctgtagtgggccagaggggggccttcgcaaactcgacgtagagacatggcagcaagaacaaccagtcgtcctgcacacttggaccaaagaatctgcccacaactatgaaaataactgtcacgaggtgtcagtgttcgtgagtccaggggccacgtacttcgaagtcgagttcgatgaccgatgtgagacggagaaaagatacgattatttggaatttactgacgctcgcgggagaaaaacacgctatgatactaaggttgggacagacaagtggccgaagaaggtgacgtttaaggctggtcctcgattacagttcctatttcacagcgattcttcccacaatgagtggggttacaaatttacggttaccgcctgcggactgccagacgttgccgtctcctgggggttggatcttcagttgctggtcagccggttgatgggtcgtctggccagccaatgcatggcgctgaaaagtgtgcgccagcttggctccaacatggtggtgccacaagccaagatggcccttgttctgagcagtcccctctggaagccggtcttccgacatcaagtctgcccagaattggaactggaggccagctggccaactcatccacaccgcaacagcaaggaggtgaaaaatatccccgacgatccatgtaggcattttcttctcgactttgcccagtcagagcccgcacagaacttttgcggtccctactcagaattgttcaaaggattcatccaggcctgccggaaacaagccccaaagacagacatagtcgcagggagcacaattgaccaagcagttaacgctacttttgccgccctggtttataggacacctgatctctatgagaagttacagaagtacgtgaattcggggggcaagattgccttgtctgaggagttcgcacaggtctacagtttagctgacggaatccgcatttggatgttagaaatgaagcagaagtccttgatgtcattgggaaacgaggctgaagagaagcattcttctgaagcgacggaagtgaaccctgagagtcttgcaaaggagtgcatcgaaaagagtctgcttcttctcaaatttctgccaaccgggatttccagcaaggaaagttgcgaaaagcttgaaacagccgatgagacaagtcaccttcaaccactcaacaagagacagcgcacttcaagcgtggttgaagagcactttcaggcaagtgtgtctccaacagaagcagccccgccagctactggggaccaaagccctggattaggcacccagcctaaactgccatccagctcgggcctgcccgcagccgatgttagtccggcaaccgctgaggagccactctctccgagcacacctactaggaggcctcccttcacaaggggtcggttgagacttctgagtttcagatcaatggaagaggctaggctggttccaacggtcaaagagaagtatcctgtgctgaaggacgtgatggacttcatcaaggaccagtccctttcgcataggagtgttgtgaaggtcctgtctcttcggaaggctcaagcacaatctattctggaggtgctgaagattacgcagcactgtgctgagtctctgggtcagccgcactgttttcaccctccctttatcctattcctcttagagctgctcacgtgtcagaaggacttcaccaactatttcggacatctggaagggtgtggcgctgacttgcataaagagattcgtgacacttattaccagctggtgcttttcttagtgaaggcggttaagggtttctctagcctcaatgatagaagccttcttccggcgctctcctgtgtgcagactgcactgctccacttgttagatatgggctgggagcccaacgaccttgcgttctttgttgatatacagctgcctgatctgcttatgaagatgagtcaagaaaacatctcagtgcacgattccgtgatttctcagtggagcgaggaggatgaacttgccgacgccaagcagaactctgaatggatggatgagtgccaagacgggatgtttgaagcgtggtatgaaaaaatcgcccaagaagaccctgagaaacagagaaagatgcatatgtttatcgcaaggtactgtgaccttctcaacgtggacatctcttgcgacggttgtgacgagattgccccttggcaccgatacagatgtctgcagtgttctgatatggacctctgtaaaacctgttttcttggaggagtcaaaccggagggccatggtgacgaccacgagatggtgaatatggagttcacctgcgaccattgccaggggctcatcatcgggcgacgaatgaattgcaatgtgtgcgacgacttcgatttgtgctacgggtgctatgccgcgaagaaatatagctatgggcatcttcctacacattcgataactgcacatccaatggtgaccatccgcatttctgaccgccagcgactgattcagccatacatacataattattcgtggcttctatttgctgcactggcgctttactctgcacatctcgcatctgccgaggacgttgatggcgagaagctcgacccgcagactaggtccagcgccacaacactgcgaagccagtgcatgcagctggtgggtgactgcttgatgaaagctcaccagggcaagggcctcaaggccctagccctcctaggcgtcctgccagacggcgactcttctctcgaagatcaagcacttcccgttacagtgcccactggcgcctccgaagagcaactagaaaaaaaggccgtacagggagctgagctatctgaggctggaaacggtaagagggccgtgcatgaagaaattaggcccgtggactttaaacagcggaacaaagccgataaaggtgtgagtttgtctaaagacccaagctgccagactcagatctcagactcccccgctgatgcctctcctcccactgggctgcctgatgctgaagattcagaagtgagcagccagaagccgatcgaggaaaaggctgtgactccctcccccgaacaggtctttgctgagtgtagtcaaaagcggatcctgggattacttgctgcaatgctaccgccactcaagtccggcccgacagtgcccctgatcgatttagagcacgtgcttccactcatgttccaggttgtgatttctaatgccggccatttgaatgaaacttaccacctaacactcgggctgctaggacagcttatcatccggcttttgccggccgaggtggacgctgcggtgataaaagttctctctgctaagcataatctcttcgctgcaggggattcctccatcgtgccagacggctggaagaccacccacttgcttttctctcttggagccgtgtgtcttgatagccgggtggggttggattgggcttgctctatggccgagatcttgcgttcccttaattcagcgcctctgtggcgggatgttatcgctacattcaccgaccactgtatcaaacagctgcccttccagctgaaacataccaacatattcaccttgctggttttggtggggtttccccaagtgctctgtgtgggcacaagatgtgtgtacatggataacgcgaacgaacctcacaacgttattattctgaagcatttcaccgagaagaatcgcgccgtcatagtggacgtgaagacgcgcaagaggaaaaccgtgaaagattaccagcttgtgcaaaaaggcggcggccaggaatgcggagattccagagcacagttaagccagtattcacagcacttcgcattcattgcctcacaccttctgcaatcttctatggacagccactgccccgaagccgtggaggccacctgggttctatcgcttgcactaaagggcctctataagactttaaaggcacatggattcgaggagattcgcgccacattcctgcagacggatcttcttaagctgctagttaaaaaatgctctaagggtactggtttctctaagacttggctgttgcgcgatttggagattctgtctatcatgctgtatagttctaagaaagagattaatgctctcgccgaacatggagatctggagctggacgagcggggtgaccgggaggaggaggtcgaaagacctgtgtcctccccgggggaccctgaacagaaaaaactagacccgctggaaggcctagatgaaccaacacggatatgtttcctcatggcacacgacgctttgaacgccccactgcacatactgagagcaatatacgaactgcaaatgaaaaagacagattatttcttcttagaggtgcaaaaaagattcgacggggatgaacttactactgacgagcgcattcgaagcctcgctcagaggtggcagccgagcaagagcctgcgactggaggaacagtccgccaaagcagttgacacagatatgatcatcctcccctgtctatctaggcccgcgaggtgcgaccaggcaaccgccgagagcaaccccgtgactcaaaagttgataagttccaccgaaagtgaactgcaacagtcttatgcaaaacagaggcggtccaagtccgccgcactgctccacaaagaactcaattgcaaaagcaagcgggccgtgcgagattacctgttcagggtcaacgaagctaccgctgtgctgtatgcacgccatgttctcgccagtctcctggccgagtggccaagtcatgttcctgtgtctgaggatattctggagctgtcagggccggcccacatgacctacatactggacatgttcatgcagttggaagaaaagcacgaatgggagaagattctgcagaaagtactccaaggatgcagggaggacatgctcggaacaatggcattggcagcatgtcagttcatggaagagcccggcatggaagtgcaggtccgtgagtccaagcacccatacaataacaataccaacttcgaagacaaggtgcacatccctggcgcgatatacctgtcaattaagttcgactcccagtgcaatacagaagaggggtgtgacgaactcgccatgtcctcctcctctgacttccaacaggacaggcactcatttagcggctcccaacagaaatggaaggattttgagctgcctggcgatacgctgtactacagattcaccagcgacatgagcaacaccgaatggggctataggtttacggttactgcagggcatttgggacgttttcaaacaggctttgagatacttaaacagatgctgtccgaggaacgcgtggtgccccatctgcccttggctaaaatttgggagtggctggttggggtcgcatgtaggcagaccggtcaccagcgcctcaaagccatccacctcctgttaaggatagtacggtgctgcggacacagcgacctttgcgatctagctcttttaaaacctctttggcagctcttcacccacatggagtatgggcttttcgaggatgtgacccagcccgggatccttctccccctgcaccgggcactgaccgagctgttttttgtcactgaaaaccgggcccaggaattgggggtgctgcaggactacctgctggctctgaccacggatgatcaccttctcaggtgtgccgcacaggccctgcaaaacattgcagcaatctcccttgccattaactatcctaacaaggccaccaggctttggaacgtggaatgttag

SEQ ID NO: 184495 - DNA, 8885 bp, Artificial Sequence
  derived and/or modified sequence
atgggcaacgctccatctcatagctccgaggacgaggccgctgcagctggaggcgagggttggggccctcatcaggactgggcagcagtctctggcacaactccgggacctggcgtggctgctcctgccctccctcctgccgcagccctccttgagccggctaggctgagggaggctgctgcagcgctccttccaacacctccctgtgagagtctggtctcaagacaccggggtgctcttttccgatggctggaggaacgcttgggcaggggcgaggagtcagtcactctagagcagtttagggagctgctagaagcacgcggagctgggtgttcttccgagcagttcgaagaggccttcgcacagtttgatgcagagggggatggcacagtcgatgcagaaaacatgttggaagcgctgaaaaatagttccggggctaatctgcagggggaactcagtcacatcatccgacagcttcaggcttgtagcctggtgcccggtttcactgacatcttctcggaaagtaaagaaggcctggacatccatagttcaatgattctgaggtttctgcaccgcaacaggttgagcagcgctgtaatgccatatcctatgttagaacattgcaataacatgtgcactatgcggtcctccgtacttaaggaatcattagaccaactcgtgcaaaaggagaaggaaagtccaggagacctgacaaggagccctgaaatggataaacttaaatcagtcgccaaatgttacgcctatattgagacctcaagcaattccgctgacatcgacaagatgacaaacggggaaacgtcctcttactggcagagcgatggatcagcttgcagtcattggattcgtctgaagatgaaacccgacgtggttcttcgacacctgtccattgccgtggctgctactgaccagtcatacatgccccagcaagtgacagtagctgttggacgaaacgcctcagatctgcaggaagtgagggatgttcacatccccagtaatgtcacagggtacgtcaccctattggaaaacgcaaacgttagccaactgtatgtgcagataaatattaagcgctgcctgtcagatggttgcgacacgcggatccacggcctacgggcagtcggattccaacgcgtaaaaaagtcaggcgtctccgtgtccgacgctagcgcaatctggtactggtctctgctgactagcctcgtgacggcgtctatggagactaatcctgcatttgtgcagacagtcctgcacaacacccaaaaggcgctgagacacatgccccctctgtccttatctccagggagcaccgacttttccacgttccttagcccaaatgtgctagaagaagtggatagcttcctcatccggatcacctcctgctgttcaacaccagaggttgagctgactctcctggcatttgctctggcgagaggaagcgtggccaaggtgatgtcctcactgtgtaccatcactgatcacttggatacacagtatgatgcttcctcacttatcctgagtatggcgagcgttcgtcaaaaccttttgctgaagtatgggaaaccacttcagctaacactacaggcttgcgacgtaaagggtaaagaggacaagagtggtcccgagaatctccttgtggagccttggacgagagacggatttcttactgagacgggaaaaaccagagcatctacgatcttcagcaccgggacggaaagtgcatttcaggtgacacagatccgtattatggtgcggcgagggggaataggagctcagtgtggactggttttcgcttataattctagttctgacaaattttgcgccgaggagcattttaaaagattcgagaagtacgacaagtggaagttgcaggagcttcgccagttcgtgaagagccggattggctgtagttcggatgatctcggggaagatgaccccattggctggttcgaactggaggaagaatgggatgaggcagatgtgaaactccagcagtgccgggtagccaagtaccttatggtgaaatttttgtgcacacgtcaggagagcgctgaaaggctcggggtgcagggactgacaatctcaggctacctgcgccctgccagggctgaagcagagcagtcagtgacttgcgcacattgtcgcaaggatactgaagaatctgtgtgcggcgctactctccttctgcgcaccctccagtttatacaacagctggctcatgatctcgtgcaacagaaggagtcaggactgaagtacaagtcatttcttgactttgctggtctggatttgcagatcttttggaatttctactcaaaactgaaacagaaccctcgcgaggagtgcgtatccgcgcagaccctgttgttgcagctcttgcaatcctgctttagtgtcttgcaaggggatgtgctcgcagcatctgaagaggaaaaggctcccatccaaagccccaagggggttgaagctgcgaaggagctgtacacccatctgtgtgacgtggtagataaggtggacggggatagtgtccccatggagattcttaagcaagaagtgaggaacacattgctgaacggggcagcgatctttttcccaaacagacagacacggcgaaaccacttgtttacaatgatgaatgtgacggaacaggagcataagcagagcctgcagcttacttttcgttcactgtgtacgtacttctccgataaagaccctgggggattgctgttgctcccggaaaagaatgatctagcgaagatgaacatttctgaagtcctggccgtgatggataccctcgtctcggtggccgctagggaatgtgagctgttaatgctgagtggtgcgccaggagaagtcgggtctgtcttattctccctgttctggagtgttcagggctcattgctgtcatggtgttacctacagttaaaatcaaccgacagcggagcgaaggatctggccgtcgatctcatcgaaaagtacgttggtcaattcctggcaagcatgcgggctatattggaaagcctctttagtcaatattcagggaagaccatcgtggagcgcctttgcaactccgtgtttagtatggccgcaaggcagctcgtcatttttctgctcgatttctgtacccttgacatacctcattgtgtgctactgcgcgagttctcagtgcttaccgagctgctgaagaaactgtgctccgggcctgagggcggacttcgaaagttagacgtggaaacatggcagcaagaacagcccgtggttttgcatacatggacgaaggagtctgcgcacaactacgagaataattgtcacgaagtcagcgtcttcgtgagtcccggtgctacatacttcgaggtagaatttgacgaccgttgtgaaaccgagaaacggtatgactatttagaattcaccgatgctcgtggcagaaagaccaggtatgacacaaaagtcggaactgacaaatggcccaagaaggtaaccttcaaggcaggaccccgattgcagtttctattccacagtgacagctctcacaacgagtggggctacaagttcacagtaactgcctgcggtctaccagacgttgccgtgtcctggggacttgatcttcaactactggttagcaggctgatgggacggctggcctcacaatgcatggcgctgaagtcagtgcgccagctgggctctaacatggtcgtgccgcaggctaaaatggccctggtgttgagctcacccctttggaaacctgtgtttaggcaccaggtgtgccccgaactggaattagaggcttcatggcctactcacccacaccggaatagtaaagaggtgaaaaacatcccagacgacccctgtcgccacttcctgttggatttcgcccagtcagaacccgctcagaacttctgcggcccatactctgagcttttcaaaggattcattcaggcctgcagaaagcaggcacccaagacggacattgtggctggttcgaccatagaccaggccgtgaatgcgacattcgccgcactggtgtaccgcactccagacttgtacgagaagctacagaaatacgttaatagtggtggtaagatagcactgtcggaagagttcgctcaggtttacagcttagccgatggtatcagaatctggatgttggaaatgaagcaaaagtccctgatgagcctgggcaatgaagccgaggagaagcacagttcagaagcaactgaggtgaatcctgaaagtttggccaaggaatgcatcgaaaagtccctgcttctcctgaagttcctgcccactggtatctcatcaaaggagtcgtgtgaaaagctagagaccgcggacgagacgtcacaccttcaacctctcaataagcgccaacggactagctccgtggtcgaggaacatttccaggcttcagtgagccctaccgaggccgcaccacccgctaccggcgaccagagcccaggattgggcacgcagccgaaactcccctccagttcaggattgcctgccgcagacgtaagtcctgcaaccgccgaagagcccttgagtccctctacccctacccgccgtccaccatttacccggggacgcctgcgattgctttctttcagatcgatggaggaggccagactggtgccgacggtgaaggaaaaatatcctgtcttaaaggacgtcatggatttcattaaagatcagtcattgtcgcacaggagcgtcgtgaaggtcctgagccttcgtaaagctcaagcacagagtatcttagaagtgctcaagattacccagcattgtgcagagagcttggggcagccccactgctttcatccacccttcattttgtttctgctagagctgctgacctgtcaaaaagatttcaccaattattttggacatctggagggatgtggcgctgatctgcataaagagattcgcgacacatactaccagctggttctgtttttggtaaaggcggtcaaggggttttccagtttgaacgacaggtccctactgcccgctttatcatgtgtgcagactgcacttctgcatttgctagacatggggtgggagccaaacgacctggcattcttcgtggatatccagctccctgatctcctcatgaaaatgtcacaggagaatatctcagtgcacgatagcgtgatcagccagtggtctgaagaagatgagttagcagacgccaaacaaaatagcgaatggatggacgagtgccaagacgggatgttcgaagcttggtacgaaaaaatcgcccaggaggaccccgagaagcagaggaagatgcacatgtttatcgcccgttattgtgacctcttgaatgtcgatatcagctgcgacggttgtgatgaaatcgccccatggcaccgctaccgctgcctccaatgcagtgatatggacctgtgtaagacttgctttctgggcggagtgaagcctgagggccatggagacgatcacgagatggtcaacatggagttcacctgcgaccattgtcagggcttgatcatcgggcgacgcatgaactgtaacgtctgcgatgacttcgatctgtgttatggttgctatgctgcaaagaagtactcttatggccacctgccaacacattcaatcactgcccaccctatggtgacaatccgcattagcgacaggcagagactgattcagccttacatacacaattattcgtggttgctgttcgcagccctcgccctctatagcgctcatctggcctcggctgaggatgtcgacggagaaaaattagatccccagacgaggagttccgcaacaacccttcgctcccagtgcatgcagctggtcggggactgcctcatgaaggctcatcagggaaaaggtctcaaggccctggcactactcggggtacttccagatggcgacagttcactagaggaccaggccttaccagtaacagtcccaacgggtgcgagcgaagaacagctggaaaaaaaggccgtgcagggagcagagctcagcgaggccggtaatggcaagcgagccgtgcatgaggaaattcgacctgtggattttaaacagagaaacaaggcagataagggggtaagtctctcaaaggatccgtcttgtcaaacacaaatcagtgactcccccgcagatgctagtcctccaaccggcctgcctgatgcagaggacagtgaagtatcctctcagaaacctattgaggaaaaggccgttacaccttcgcctgaacaggtattcgccgaatgctcacaaaaacgtatattaggcctgctggccgcaatgctccctccactcaagtccggacccactgtcccattaattgatctagagcacgtgctaccactcatgttccaggttgtcatctctaatgctggccacctgaacgagacttatcacctgaccctcgggctgctgggccagctcataatccgactgctgccagctgaggtcgacgccgctgtgattaaggtcctgtccgccaagcacaacttgttcgcagctggagactcatcaatcgtgcccgacgggtggaaaaccacacacttgctgtttagcctgggcgctgtgtgtctggattcacgcgttggcctggactgggcgtgttcaatggccgaaattctccggtcattgaattctgcccctctgtggcgcgatgtgattgccaccttcaccgatcactgcatcaagcagctgcctttccagttgaaacacacgaatatatttaccctcctggtgctagttggattccctcaagtgctgtgcgtcggcacccgctgcgtgtacatggacaacgcaaacgagccccacaacgtcatcattcttaaacacttcactgaaaaaaacagagccgtgattgtggatgtgaaaactcgaaagcggaagaccgtcaaagactatcagctggtccagaaggggggtggccaggagtgcggggatagccgggctcagttgtctcagtactcacaacactttgcctttatcgcaagccatctgttgcagtcctctatggactcccattgtcccgaggctgtcgaggctacatgggtcctgagtttagcccttaagggcctttataagaccttaaaggctcatggtttcgaggagatccgggctacatttctgcagaccgacctgctaaaactcttggtgaagaaatgttccaagggaacgggcttttctaagacttggcttctgcgcgacctggagatcctttccattatgctgtatagcagcaagaaggagataaatgcccttgccgagcacggggatttggagctggatgagagaggggatcgtgaggaggaggtggagcgccctgtgtcctcaccgggagatccagagcagaagaagctcgaccctctcgagggacttgacgagccaacgcggatttgtttcttaatggctcatgacgccttgaacgcaccccttcacatcttacgggcaatctacgaactgcagatgaagaaaaccgactacttttttctggaagttcagaaaaggttcgatggggacgaactgaccacagacgaacggattcgatcgttggcacagagatggcaaccttcaaagagccttcggctcgaggaacaatctgctaaggctgtggacactgacatgattatactgccctgtctgagtaggccagccagatgtgatcaggccactgccgagtcaaatcctgtcactcagaaactgatcagttccaccgagtccgagcttcagcagagttatgctaaacaaagacgctccaagtcagccgctctactccacaaggagttaaattgtaagtcaaagagggctgtgcgggactatctgtttcgggtcaacgaggctactgcagtcctttacgccagacacgtgctcgcctccctcctagccgaatggccttctcatgtgcctgtgtctgaggatatcctcgaactctcaggcccagcccacatgacgtacattctggacatgttcatgcagcttgaggaaaagcacgagtgggagaaaattctgcagaaggtgctgcaagggtgtagagaggacatgctgggaacgatggccctagctgcctgccagtttatggaagaaccaggaatggaggtccaagtacgcgagtctaagcatccttataacaataacactaacttcgaggacaaagttcacatcccaggcgctatttacttgagcatcaagttcgattcacagtgcaacacagaggaagggtgcgatgagttggccatgtcatcgagtagcgacttccaacaggatagacactcattcagcggaagccaacaaaagtggaaggactttgaattgccaggggacaccctttactaccggtttacctcagatatgtcaaacaccgaatggggatacaggttcactgtcaccgccggacatctggggagattccaaaccggcttcgaaatcttgaagcagatgctgtccgaggaacgcgtggtcccccatttgccactcgccaagatctgggagtggttggttggggttgcttgcagacagacaggacaccagagactaaaggccatccatctgctcctgaggatagtgcgctgctgtggacactcggacctgtgtgatctggccttgctcaaacccctgtggcagctgtttacccatatggagtacggactcttcgaagacgtaacccagcccggtatattactgcctttacatcgggcactcactgagttatttttcgtgacagagaatagagctcaagagctaggagtgctccaggactatctcttggcgctgaccacagatgaccaccttctgcggtgtgctgctcaggccctccaaaacatagctgcaatctctcttgcgattaattaccccaataaagcaaccaggctgtggaacgtggaatgcta

SEQ ID NO: 184496 - DNA, 11456 bp, Artificial Sequence
  derived and/or modified sequence
aagccgcaggggccgccgtcgtctcctccgcgtccccgcccgccagctgctgtcggaggttgacaggtcgaggcggggaggcggcggcggcggctgcagagccaggcgcccaagacggagaccccatggggaacgctccgagtcacagcagtgaagacgaagcggcagctgccggtggcgagggctggggcccacaccaggactgggccgcggtctcgggcacgacccccggcccgggcgtcgcggctccagcgctaccacccgccgcggcgctgctggagccggccaggctgcgagaggctgctgcagcgttgctgcccacacccccctgcgagtcgctggtgtcgaggcatcgcggcgcgttgtttcgctggctggaagagcggctgggccgcggcgaagagtctgtcactctggagcagttccgggagctgctggaggctcgcggcgccggctgctctagcgagcagttcgaggaggcctttgcccagtttgatgctgagggtgatgggacagttgatgccgagaacatgttggaggccctcaagaattccagtggagctaatcttcagggggagctgagccacatcatcagacaactacaggcctgctctctggttccaggtttcacagacatattttcagagtcgaaggagggccttgatattcactcgtcaatgatactgcgcttcctgcaccgcaatcggctctccagcgcggtgatgccctacccgatgctggagcactgcaataacatgtgcaccatgcggtcttccgtcctgaaggagtctctggatcagctggtacaaaaggaaaaggaaagccctggagatctaactagaagtccagagatggataaactcaagtcagtagcaaagtgctatgcttatatagaaacatcctccaactcggcagacattgacaagatgacaaatggagaaacctcatcctactggcagtcagatggcagtgcctgttcacactggattcgtttaaaaatgaagccagatgttgtgcttaggcacctgtccattgcagtggctgccactgaccagagctacatgccacagcaggtgacagtagctgtagggaggaatgccagcgatcttcaggaagtccgagatgtgcacatccccagcaatgtcactggctatgtgacgctgctggaaaatgccaacgtcagtcagctctatgtccagattaacataaagcgttgtcttagcgatggctgcgacactagaattcatggtctcagggctgttggctttcagagagttaagaagtctggggtctcagtctcagatgcttctgcaatatggtattggtctctgctgacatctctggtgacggcttctatggagacaaatcccgcctttgtccagacagtgctgcacaatactcagaaggcgctgcggcacatgcctccactctctctctcaccaggatctacagatttctcaactttcctctcccctaatgtgctggaagaagtggacagtttcctcataaggataactagctgctgttctaccccagaggtagaactgactcttctggcttttgctctcgcaagaggaagtgttgccaaagtcatgagctctctatgcaccatcactgaccatctggacacgcagtatgatgcctcatccctcatcttgtccatggcgtcagtcagacagaacctgctcctcaaatatggtaaacctctccagttgactcttcaggcatgtgatgtcaaaggaaaagaagataagtctggacccgaaaacctccttgttgaaccgtggacaagggatggttttcttacggaaactggaaaaaccagagccagcactattttttctaccggaactgaatctgccttccaagttacacagataagaattatggttcgacgtggtggcattggtgcccagtgtgggttggtgtttgcctataactcatcttcagataaattttgtgcggaagaacacttcaaaaggtttgaaaaatatgacaaatggaagcttcaggagctcaggcaatttgtaaaaagcaggattggttgctcatctgatgaccttggagaggatgatcctattggctggtttgaactggaagaagaatgggatgaagcagatgtgaagctgcaacagtgcagagttgccaaatatttgatggtgaagttcctctgcacccgtcaggagtcagcagagcgcttgggagtgcaaggcttgaccatcagtgggtacctccggcctgcaagagcagaagcagaacagagcgtcacctgtgcacactgcagaaaggacacagaggagagtgtctgtggggccacgttgctcctcaggacccttcagtttatccagcagctcgcccatgacctggtgcagcagaaggaaagtggcttaaaatataaatcttttctggacttcgcgggtcttgatttgcagatcttctggaatttttacagtaaattaaagcaaaacccgagggaagaatgcgtctctgcccaaaccctgcttctgcagctactccagagctgcttctctgtgctgcagggagatgtactggctgcttctgaggaggaaaaggctccaatccaaagccctaaaggagtagaggctgccaaggagctgtacacacacttgtgtgatgtggtggacaaggtggatggagactctgtgcccatggagatactaaaacaagaagtcaggaatacccttctcaatggggctgccatcttctttcctaatcgacagacccgacggaaccatctcttcaccatgatgaatgtcaccgagcaggagcacaagcagtccctgcagctcactttccgttcactgtgcacgtattttagtgacaaggatccaggcggccttcttcttttacctgagaagaacgacctggccaagatgaacatcagtgaagtcctggcggtcatggacactctcgtctctgttgctgctcgagagtgcgagctgttaatgctcagtggggccccaggggaggtgggctctgtgctcttctccctgttctggtccgtccaaggcagcctgctatcctggtgctacctgcagctgaagagcacggactctggagccaaagatcttgccgtggaccttattgaaaaatatgtgggccagtttctggcaagcatgagagcgattttggaatcccttttctcacagtacagtggaaaaaccatagtagaaagattatgtaactcagtgttttcaatggcagctcgtcaactggttatcttcctgctggacttctgcactttagacatcccacactgcgtgctcttgagagagttcagcgtcctcacagaactcctgaagaagctctgtagtggccccgaaggaggactgaggaagctggatgttgagacctggcaacaggaacagcctgtggtgttacatacgtggacgaaggaatctgcccacaactatgaaaataattgccatgaggtatccgtctttgttagcccaggggcaacctattttgaagtggaattcgatgacaggtgtgaaactgaaaaaaggtatgattatctggaatttaccgacgctagaggtcggaaaacacgctatgacacaaaagttggcactgataaatggcccaagaaagtgaccttcaaggccggtcctcggttgcagttcctctttcactctgacagcagtcacaacgaatggggctacaaattcactgtcactgcctgtgggctgcccgatgttgccgtgtcttgggggctggatttacagctcctcgtctcccggctgatgggacgcctggcttcccagtgcatggcgctcaagtctgtgcgccagttaggaagtaacatggtagtacctcaggcaaaaatggcattagtcctaagctccccactgtggaaacctgtcttcaggcatcaggtttgtccagagttggaattagaagcaagctggcccactcacccacaccggaatagtaaggaggttaagaacattcctgacgacccctgccgccattttcttcttgattttgcccagtcagagcctgctcagaacttctgtgggccatattcagaacttttcaaaggattcatacaggcatgtagaaaacaggccccaaagacagatatagttgctggttccactattgatcaagctgtgaacgccacctttgctgctctggtgtatcgcactccagatttatatgagaagctgcaaaaatatgtcaacagtgggggcaaaatagccctgagtgaagagtttgcccaggtttattccttggcagatgggattcgaatatggatgttagagatgaagcagaagtccctgatgagcctggggaatgaagcagaagaaaaacatagttcagaagctactgaggtgaaccctgagagcctggcaaaagagtgcattgagaagagtcttctattactaaaatttctgcccacgggcataagttcaaaagaaagctgcgaaaagttggagactgctgatgaaaccagtcatctccagccactcaacaagcgtcagaggacaagctctgtggtggaagagcatttccaagcctcagtatctcccactgaagccgcaccccctgccacaggagaccagagtcctggcctgggcacccagccaaagctgccatccagcagtggccttcctgctgcagacgtgtcccctgccacagctgaagagcccttgtcaccttccacacccacccgccggcctcccttcacccgagggcgactccggctgctctcctttcgatccatggaggaggccagactggtgcccacagtgaaagagaaataccctgtgctgaaggacgtcatggacttcattaaggatcagtcgctctcgcacaggagtgttgtgaaggttctttccctgaggaaagcccaggcccagagcatcctggaagtcctgaagataactcagcactgtgcagaatcccttgggcagccccactgcttccatccacctttcatacttttcctgttggaacttctgacctgtcagaaagattttaccaattattttggacacctggaaggctgtggtgctgatctacacaaagaaattcgagacacttactatcaacttgttctgtttttggtcaaagcagttaaaggatttagtagcctaaatgacaggtccttgctccctgccttatcctgtgttcagacagccctgcttcatcttttggatatgggctgggaacccaatgatctcgccttctttgttgatattcagttaccagatctcctcatgaaaatgtcacaggagaatataagtgtccatgacagtgtgatcagccaatggagtgaagaagatgagcttgctgatgccaagcagaattcagaatggatggatgagtgtcaggatggcatgtttgaggcctggtatgaaaaaatagcccaggaagatccagagaagcagaggaaaatgcacatgttcattgctcgctactgtgacctgttaaatgtggacatctcttgtgatgggtgtgatgagattgccccctggcatcgataccgctgtctgcagtgcagcgacatggatctctgcaaaacttgcttcctaggtggggtgaagcctgagggccacggagacgaccatgaaatggtcaacatggagtttacctgtgaccactgccagggtttgatcataggccggaggatgaactgcaatgtttgcgatgactttgatctttgctacggatgctatgcagcgaagaaatactcctacggccatttgcctacccacagcatcacggcccacccaatggtaaccattcggatcagtgaccggcagaggctcatccagccatatatccataactactcctggctgctctttgctgccctggctctctatagcgcccacctggccagtgcagaggatgtggatggggagaagctggacccccagacgcgcagcagtgccaccaccctgcggagccagtgcatgcagctcgtcggggactgtctgatgaaggctcatcagggaaaaggccttaaagctctagctttgctgggtgtattgccagatggggactcgagcctagaagatcaggccctaccagtcactgtgcccaccggagcgtcagaggagcagctagagaagaaagctgtccagggtgctgagctgtcagaagcaggcaatggaaagagagctgttcatgaggaaatcagacctgtagatttcaagcagagaaataaggcagataaaggtgtatcattatcgaaggatccttcatgccagacccaaatttcagattcacctgcagatgctagcccacctacaggacttccagatgctgaagattcagaagtgtcatctcagaagcccatagaggaaaaagcagttactccaagccctgagcaagtgtttgctgagtgttcccagaagaggattttgggattactagcagccatgttacctcccttaaagtcgggccccacggttcccctgatagacctggagcacgtccttccactcatgtttcaggttgtcatctcaaacgcaggccacctgaatgaaacctaccatctcaccctgggtcttctcggccagttaattatccgtcttttgccagcagaggtagacgccgcagtgatcaaagtcctctcagccaaacacaacctgtttgctgcaggggacagttccattgtgccagatggctggaaaaccacccacctgctctttagcctgggagctgtgtgtctggacagccgggtgggcttggactgggcgtgctccatggcagagatcctgcggtcactcaacagtgccccactgtggcgtgatgtcattgccaccttcacagaccactgcatcaagcagctgccattccagctgaagcacaccaacatcttcaccctgctcgtgctggttggcttcccccaggtcctctgtgtgggaacccgctgcgtttatatggataatgccaatgaaccccataatgtgatcatcttgaagcactttactgagaagaacagggctgtgattgttgatgtcaaaactcggaagaggaaaacagtgaaggactaccagctggtccagaagggaggaggacaagagtgtggtgactctcgggcccagctgagccagtactcccagcactttgcctttatcgccagtcaccttctgcaaagcagcatggacagccattgtcccgaggcagtagaagcaacttgggtcctgtccctggccctgaaaggattgtataaaacactaaaggctcacggttttgaggagatccgtgctactttccttcagaccgatttgctgaagttgctggtgaaaaagtgcagcaaagggactggctttagtaaaacgtggctcctccgggacctggaaattttgtccatcatgctgtactcctcaaaaaaggagatcaacgctttggctgagcacggagacctagagctggatgagcgaggggaccgagaggaagaggtggaacggccagtcagcagccctggcgacccagagcagaaaaagctggacccccttgagggcctggatgagcccaccagaatatgtttcttgatggctcatgatgccctcaatgcccctctgcacattctccgggccatatacgaactgcagatgaaaaagaccgattatttcttcctggaggttcagaagaggtttgatggtgatgagctcaccacagatgaaaggatacggtccctggctcagcggtggcagcccagtaagagtctgaggctggaagaacagagcgccaaagctgtggatacagacatgattatcctgccatgcttgtcccggcctgcacgctgtgaccaagccactgctgaatcgaaccctgtgacccagaagctgatctccagcacagagagcgaactgcagcagagctatgccaagcagcgccgtagcaagagcgccgccctcctgcacaaggagctgaactgcaagagtaagagggctgtccgggactacctcttccgagtgaacgaggccacagctgtcctgtacgcccgccacgtgcttgcatccctgctcgccgagtggcctagccacgtgccagtgagcgaggacatcctggagctcagtggccctgcccatatgacctacattttggatatgttcatgcagctggaagaaaagcatgagtgggagaagatcctgcagaaagtgctccagggctgccgagaggacatgctggggaccatggccctggctgcatgccagttcatggaggagccaggaatggaggtgcaagtgagggagtcgaaacacccgtataacaacaacaccaacttcgaggataaagttcacattcctggtgccatctacctctcaatcaaattcgactctcagtgcaacacagaggagggctgtgacgagttagccatgtccagcagcagtgacttccagcaagaccgacacagcttcagcgggtctcagcagaagtggaaagattttgaacttccaggagacactctgtattaccgcttcacctccgacatgagcaacaccgagtggggctacagattcaccgtgacggccggacacctggggcggttccagacaggattcgagattttgaagcagatgttgtcagaagaaagggtcgtgcctcatctcccattggcaaaaatttgggaatggctggtgggcgtggcctgtcgccagactggccatcaacgattaaaagccatccacttacttctgaggattgtgcgatgctgcggccacagtgacctgtgtgaccttgcgctgttgaagcccctgtggcagctctttacccacatggagtacggcctgtttgaggacgtgacgcagcccggcatcctccttcccctgcatcgtgccctcactgagctcttcttcgtcaccgagaaccgtgcccaggagcttggcgtgctgcaggattacctgctggccctaaccacggacgaccaccttctccgctgtgcggcacaggctctgcagaacattgctgccatcagcctggccatcaactacccaaacaaggccacccgcctctggaatgtggagtgttagcccttggtggggcgtgcatgggactagttcatctgccacagggattttagagcagacatctaacctcattcaggaaaactcctgtagcgccagtgcccagctctccttgagctgaccactccagttaggatgccaagcagccacgtctccaagagctcccgtgcgtaggctggacacaagcacaggctgtagcatggtgaaaataagccaagcagtgcagaatgcctcagaaagggtgggcagggggcccttaagaaggttcagagaccagccttctccagaggctgtcactgcaggagccgtgggcctgggaagacttggaagcggcctctctcaactggtttctgtctccgtggagctggaactgcctgcacttgccttcagagggaggcacagtccacccagatccacctttccagcaagacccccagtggctgcccagcctgggagcacctctttgcttttcacaccaaaccaaaactggcgagagcccctcctagccaccagtgatccccaagcatccagtacagaaccaggcatcgagctagctccctgcacggccgcaccctcccagagaactccttgaggagaacaagtgcccttggggacagccggcaggcgcccctgtacgtctgctcatgcaccaggcagcacagccgcagttcctcagttgttgttttgacatatttcagtttccacctcacgtttttagagcagaaccacactgtctccctggaggggctcgagggcatgaccggggactgaccattctgtgaaaggagcagaatgtgaggagcacgcgtgagcttatgtaccgtgaagatgatcagaggatatcttattttaagagtaaaaacccacataattttatttctgcttgatagtcatggtagtctgtcatacccacctctgggactctgcgtggctgtttggctgtcacttgtagcaataacgacattagttctagtcagtgctgttttacatttttcttttgatgggtttagtcttgccctggagtgccgatgatgattctccctccagagccacgcttgggaacatgaagcaagtctggcgtgtgggctgcgtgccggccttagtgggacccgtggggttggagcatgcctttaggggcagtgtctgggccgaagcacgtcccaccacacagtgccagagccagagaaggggccccaccaccaaggccaagcttgaccaggtcagcattgccatggcccagtgtgccccgtggcctctgaagatccctctgtgcagggtctgcagggatctggattgcaagggcccaagtctgcaggtctggaagcatcttcctataagagcactttcgccttctgggtcaggactccaaggtgcagcgggcttcacagccctacaattgggttctcagctaagccccagagttctggtagaaccatcccggggcgggtggagggtgggatttaagggagacgggaacacatggggcaggtcctggaacttggtggcctgaggactgaggccattgccctggtggaaaggcctggcctggttcctgtggcttgggacctgaataggcaggtgctgctggctccgtagaaacccttttcccatcttttgctctttgccaaacctaccttgctttgggagctgcctgcaccaccccagagaaggccccaccttcttcatccctcagacccgaggaggcctcccagtaaggagtttcccaagaggggactcacaggaaacaagtcttagtgcttgggagggaggccccgctgcgtgctcagactcacagccaacctggaaggtagacgagatagcgccacccacgcccctccacaccccagactccgagtaaagcgggcggtagggccggagtcacctcccctatggcagtggccgccgctgtactccatcctcccgtcaggaagatcagctgtaaataaacgctgggctccccagagcacctgtccgcccactgcccttgctgttctgggatcttcgctgcagttcacgggaaacaagcctgagtccgctcgcacccgcggctgctctcccggctcggcccggccgcctctgtctccggccaccgggtggcgctgccgagccagagccgccgcgtcccggcgctttccaggagccccaggcccggaggaggcgaagcccgcagagcaaaggtggaaacacgtgcctacgctgtaaagaaatcctgttccagagcatacctgttgtacaaacagacactgttcctaacgagaggagtgacgtattttcatcaccgtttttaatttgttttcttacgggtttacgattttgaatttttcttatttggttgaaagaattttgattctatcagcctgagtgagttcagcctgtaaaaaggatgttaagctgtgggtaaaatatgcaaacgaaaagaaatatattgtacaaattctatataataaggta

SEQ ID NO: 184497 - protein, 938 aa, Artificial Sequence
  derived and/or modified sequence
MLWPRLAAAEWAALAWELLGASVLLIAVRWLVRRLGPRPGGLGRSGTPVPPPSAAAAPASGEMTMDALLARLKLLNPDDLREEIVKAGLKCGPITSTTRFIFEKKLAQALLEQGGRLSSFYHHEAGVTALSQDPQRILKPAEGNPTDQAGFSEDRDFGYSVGLNPPEEEAVTSKTCSVPPSDTDTYRAGATASKEPPLYYGVCPVYEDVPARNERIYVYENKKEALQAVKMIKGSRFKAFSTREDAEKFARGICDYFPSPSKTSLPLSPVKTAPLFSNDRLKDGLCLSESETVNKERANSYKNPRTQDLTAKLRKAVEKGEEDTFSDLIWSNPRYLIGSGDNPTIVQEGCRYNVMHVAAKENQASICQLTLDVLENPDFMRLMYPDDDEAMLQKRIRYVVDLYLNTPDKMGYDTPLHFACKFGNADVVNVLSSHHLIVKNSRNKYDKTPEDVICERSKNKSVELKERIREYLKGHYYVPLLRAEETSSPVIGELWSPDQTAEASHVSRYGGSPRDPVLTLRAFAGPLSPAKAEDFRKLWKTPPREKAGFLHHVKKSDPERGFERVGRELAHELGYPWVEYWEFLGCFVDLSSQEGLQRLEEYLTQQEIGKKAQQETGEREASCRDKATTSGSNSISVRAFLDEDDMSLEEIKNRQNAARNNSPPTVGAFGHTRCSAFPLEQEADLIEAAEPGGPHSSRNGLCHPLNHSRTLAGKRPKAPRGEEAHLPPVSDLTVEFDKLNLQNIGRSVSKTPDESTKTKDQILTSRINAVERDLLEPSPADQLGNGHRRTESEMSARIAKMSLSPSSPRHEDQLEVTREPARRLFLFGEEPSKLDQDVLAALECADVDPHQFPAVHRWKSAVLCYSPSDRQSWPSPAVKGRFKSQLPDLSGPHSYSPGRNSVAGSNPAKPGLGSPGRYSPVHGSQLRRMARLAELAAL

SEQ ID NO: 184498 - DNA, 2817 bp, Artificial Sequence
  derived and/or modified sequence
atgctgtggcccagactggccgccgccgagtgggccgccctggcctgggagctgctgggcgccagcgtgctgctgatcgccgtgagatggctggtgagaagactgggccccagacccggcggcctgggcagaagcggcacccccgtgcccccccccagcgccgccgccgcccccgccagcggcgagatgaccatggacgccctgctggccagactgaagctgctgaaccccgacgacctgagagaggagatcgtgaaggccggcctgaagtgcggccccatcaccagcaccaccagattcatcttcgagaagaagctggcccaggccctgctggagcagggcggcagactgagcagcttctaccaccacgaggccggcgtgaccgccctgagccaggacccccagagaatcctgaagcccgccgagggcaaccccaccgaccaggccggcttcagcgaggacagagacttcggctacagcgtgggcctgaacccccccgaggaggaggccgtgaccagcaagacctgcagcgtgccccccagcgacaccgacacctacagagccggcgccaccgccagcaaggagccccccctgtactacggcgtgtgccccgtgtacgaggacgtgcccgccagaaacgagagaatctacgtgtacgagaacaagaaggaggccctgcaggccgtgaagatgatcaagggcagcagattcaaggccttcagcaccagagaggacgccgagaagttcgccagaggcatctgcgactacttccccagccccagcaagaccagcctgcccctgagccccgtgaagaccgcccccctgttcagcaacgacagactgaaggacggcctgtgcctgagcgagagcgagaccgtgaacaaggagagagccaacagctacaagaaccccagaacccaggacctgaccgccaagctgagaaaggccgtggagaagggcgaggaggacaccttcagcgacctgatctggagcaaccccagatacctgatcggcagcggcgacaaccccaccatcgtgcaggagggctgcagatacaacgtgatgcacgtggccgccaaggagaaccaggccagcatctgccagctgaccctggacgtgctggagaaccccgacttcatgagactgatgtaccccgacgacgacgaggccatgctgcagaagagaatcagatacgtggtggacctgtacctgaacacccccgacaagatgggctacgacacccccctgcacttcgcctgcaagttcggcaacgccgacgtggtgaacgtgctgagcagccaccacctgatcgtgaagaacagcagaaacaagtacgacaagacccccgaggacgtgatctgcgagagaagcaagaacaagagcgtggagctgaaggagagaatcagagagtacctgaagggccactactacgtgcccctgctgagagccgaggagaccagcagccccgtgatcggcgagctgtggagccccgaccagaccgccgaggccagccacgtgagcagatacggcggcagccccagagaccccgtgctgaccctgagagccttcgccggccccctgagccccgccaaggccgaggacttcagaaagctgtggaagaccccccccagagagaaggccggcttcctgcaccacgtgaagaagagcgaccccgagagaggcttcgagagagtgggcagagagctggcccacgagctgggctacccctgggtggagtactgggagttcctgggctgcttcgtggacctgagcagccaggagggcctgcagagactggaggagtacctgacccagcaggagatcggcaagaaggcccagcaggagaccggcgagagagaggccagctgcagagacaaggccaccaccagcggcagcaacagcatcagcgtgagagccttcctggacgaggacgacatgagcctggaggagatcaagaacagacagaacgccgccagaaacaacagcccccccaccgtgggcgccttcggccacaccagatgcagcgccttccccctggagcaggaggccgacctgatcgaggccgccgagcccggcggcccccacagcagcagaaacggcctgtgccaccccctgaaccacagcagaaccctggccggcaagagacccaaggcccccagaggcgaggaggcccacctgccccccgtgagcgacctgaccgtggagttcgacaagctgaacctgcagaacatcggcagaagcgtgagcaagacccccgacgagagcaccaagaccaaggaccagatcctgaccagcagaatcaacgccgtggagagagacctgctggagcccagccccgccgaccagctgggcaacggccacagaagaaccgagagcgagatgagcgccagaatcgccaagatgagcctgagccccagcagccccagacacgaggaccagctggaggtgaccagagagcccgccagaagactgttcctgttcggcgaggagcccagcaagctggaccaggacgtgctggccgccctggagtgcgccgacgtggacccccaccagttccccgccgtgcacagatggaagagcgccgtgctgtgctacagccccagcgacagacagagctggcccagccccgccgtgaagggcagattcaagagccagctgcccgacctgagcggcccccacagctacagccccggcagaaacagcgtggccggcagcaaccccgccaagcccggcctgggcagccccggcagatacagccccgtgcacggcagccagctgagaagaatggccagactggccgagctggccgccctgtag

SEQ ID NO: 184499 - DNA, 2817 bp, Artificial Sequence
  derived and/or modified sequence
atgttgtggccgcggctcgccgcagcagaatgggccgctcttgcctgggagctactaggggcaagcgtgctcctgattgcagttcgctggcttgtccgcaggctgggaccacgacctggagggctaggaaggagtggaaccccagtcccacccccatcagcggcagctgcgccagcttctggcgagatgactatggatgcgctacttgcccgtcttaaactacttaatccggacgacctgcgagaggaaattgtgaaggcaggcctgaaatgcggacctataacaagtaccactaggtttatcttcgagaagaaactggcccaggccttgctggagcagggcggccgactcagctcgttttaccatcatgaagctggggtgaccgctctctctcaggacccccagcggattcttaagcccgctgagggcaatccaactgatcaggctgggtttagcgaggatcgggacttcgggtattccgtgggattgaatccgcctgaggaggaagccgtgacctcaaagacatgctcagtcccaccctcagacacagacacctatagagccggagctactgcgagtaaggagcctccactgtattacggcgtatgccccgtatatgaggacgtccctgcgcggaacgagcgtatttatgtatacgagaacaaaaaggaggctttacaggccgtgaaaatgataaagggcagccgtttcaaggccttctccacaagagaagatgccgagaagtttgctagagggatttgcgattactttccctcaccaagtaagacaagtttgcctttatccccagtgaagactgcccctctgttttccaatgaccgattgaaggacgggctgtgtctcagcgaaagtgagacagtgaataaggagcgtgcaaacagttacaagaacccacgtacgcaggatctcacagccaagcttagaaaggcagttgaaaaaggggaagaagatactttctccgatttaatttggtccaatcccagatatttaattggttccggtgacaaccctaccatcgtgcaggaaggttgtaggtacaacgtgatgcatgtggccgccaaggaaaatcaggcctctatatgtcagctgacgctcgatgtcttggagaatcccgactttatgcgtctcatgtatcctgacgatgatgaagcgatgctgcagaagcgtatccgctacgtggtggacctgtacctcaataccccggacaagatgggctatgatacaccacttcactttgcttgcaagtttggaaacgcagacgtcgttaatgtgctttcaagtcatcacttgatagtcaagaacagccggaacaagtatgacaaaacccctgaagacgttatatgcgaaagaagcaaaaacaaatccgtcgaactgaaagaaaggatacgcgaatatctgaaaggccattactatgtgcccttgttaagagcggaggaaacctcttctccagttatcggggaactgtggtcaccagaccagacagctgaagccagccacgtgtcacggtacgggggaagccctcgcgatcccgtgctcacccttagggctttcgcaggaccactaagtccggcgaaggctgaagactttagaaaattatggaaaactccgcctagagaaaaggccggctttctgcaccacgtaaagaagagcgatccagagcggggatttgaaagggtggggagagagctggcccatgaattgggatacccttgggtggagtactgggagttcttagggtgtttcgttgacttgtcctcacaggaaggactacagcggttagaggaatacctgacacagcaggagatcggtaaaaaggctcagcaggaaacaggagagagggaggcttcgtgtagggataaagcaaccacctctgggagcaacagtatttcagtccgtgcttttctggacgaggacgacatgtcgcttgaggaaataaagaaccgacagaacgccgctagaaacaacagcccccccacagtgggtgccttcggacatacaagatgcagtgcctttcctctagaacaagaagctgaccttatcgaagccgccgagcctggcggcccccactctagcaggaatggcctttgtcaccccctcaatcactcaagaacccttgccggcaaacgacctaaagccccccggggggaagaggctcatctccccccggtcagcgacctgacggttgaatttgacaaactgaatctgcagaacatagggcgcagtgtgtctaagactcctgatgagagtactaagacaaaagaccagatcttgactagtagaattaacgcagtggagcgcgaccttcttgagccctcccctgcagaccaacttggcaacgggcatcgtcgtaccgaaagtgaaatgtccgctcgcattgcaaaaatgtctctgagcccatctagtccgcggcacgaagaccagctggaggtgacccgggagcccgcgcgccggctgtttttgtttggagaagaaccctccaaacttgaccaggacgtgttagctgccctggaatgcgccgacgtagatccacatcagttcccagccgtgcacagatggaagagcgctgtgctatgttatagtccatccgaccgacagtcatggccatcacccgctgttaagggacgattcaaatctcagctacccgacttaagtggacctcactcctactctccaggaaggaattctgtcgctggaagcaatccagccaagcccggcttgggatcaccgggaaggtatagcccagtgcatggcagtcagctgcggaggatggcccgtctggccgaactggccgccttgtag

SEQ ID NO: 184500 - DNA, 4481 bp, Artificial Sequence
  derived and/or modified sequence
aggcagggcgcgggcagcccggcgcggggtcctgggacgggcgcggcgcggggcgcgggcttctcggcggctgcggcccgggcggcggcgatgctgtggccgcggctggcggcggccgagtgggcggcgctggcctgggagctgctgggcgcctcggtgctgctgatcgctgtgcggtggctggtgcggcggctgggcccgcggccgggaggtctgggccgcagcgggaccccagttcctccgccaagcgcggccgccgcccccgcctcaggtgaaatgacaatggatgctctgttggctcgattgaaacttctgaatccagatgaccttagagaagaaatcgtcaaagccggattgaaatgtggacccattacatcaactacaaggttcatttttgagaaaaaattggctcaggctttactggagcaaggaggaaggctgtcttctttctaccaccatgaggcaggtgtcacagctctcagccaggacccacaaaggattttgaagccagctgaagggaacccaactgatcaggctggtttttctgaagacagagattttggttacagtgtgggcctgaatcctccagaggaggaagctgtgacatccaagacctgctcggtgccccctagtgacaccgacacctacagagctggagcgactgcgtctaaggagccgcccctgtactatggggtgtgtccagtgtatgaggacgtcccagcgagaaatgaaaggatctatgtttatgaaaataaaaaggaagcattgcaagctgtcaagatgatcaaagggtcccgatttaaagctttttctaccagagaagacgctgagaaatttgctagaggaatttgtgattatttcccttctccaagcaaaacgtccttaccactgtctcctgtgaaaacagctccactctttagcaatgacaggttgaaagatggtttgtgcttgtcggaatcagaaacagtcaacaaagagcgagcgaacagttacaaaaatccccgcacgcaggacctcaccgccaagcttcggaaagctgtggagaagggagaggaggacaccttttctgaccttatctggagcaacccccggtatctgataggctcaggagacaaccccactatcgtgcaggaagggtgcaggtacaacgtgatgcatgttgctgccaaagagaaccaggcttccatctgccagctgactctggacgtcctggagaaccctgacttcatgaggctgatgtaccctgatgacgacgaggccatgctgcagaagcgtatccgttacgtggtggacctgtacctcaacacccccgacaagatgggctatgacacaccgttgcattttgcttgtaagtttggaaatgcagatgtagtcaacgtgctttcgtcacaccatttgattgtaaaaaactcaaggaataaatatgataaaacacctgaagatgtaatttgtgaaagaagcaaaaataaatctgtggaactgaaggagcggatcagagagtatttaaagggccactactacgtgcccctcctgagagcggaagagacttcttctccagtcatcggggagctgtggtccccagaccagacggctgaggcctctcacgtcagccgctatggaggcagccccagagacccggtactgaccctgagagccttcgcagggcccctgagtccagccaaggcagaagattttcgcaagctctggaaaactccacctcgagagaaagcaggcttccttcaccacgtcaagaagtcggacccggaaagaggctttgagagagtgggaagggagctagctcatgagctggggtatccctgggttgaatactgggaatttctgggctgttttgttgatctgtcttcccaggaaggcctgcaaagactagaagaatatctcacacagcaggaaataggcaaaaaggctcaacaagaaacaggagaacgggaagcctcctgccgagataaagccaccacgtctggcagcaattccatttccgtgagggcgtttctagatgaagatgacatgagcttggaagaaataaaaaatcggcaaaatgcagctcgaaataacagcccgcccacagtcggtgcttttggacatacgaggtgcagcgccttccccttggagcaggaggcagacctcatagaagccgccgagccgggaggtccacacagcagcagaaatgggctctgccatcctctgaatcacagcaggaccctggcgggcaagagaccaaaggccccccgtggggaggaagcccatctgccacctgtctcggatttgactgttgagtttgataaactgaatttgcaaaatataggacgtagcgtttccaagacaccagatgaaagtacaaaaactaaagatcagatcctgacttcaagaatcaatgcagtagaaagagacttgttagagccttctcccgcagaccaactcgggaatggccacaggaggacagaaagtgaaatgtcagccaggatcgctaaaatgtccttgagtcccagcagccccaggcacgaggatcagctcgaggtcaccagggaaccggccaggcggctcttcctttttggagaggagccatcaaaactcgatcaggatgttttggccgctcttgaatgtgcagacgtcgacccccatcagttcccggccgtgcacagatggaagagtgctgtcctgtgctactcaccctcggacagacagagttggcccagtcccgcggtgaaaggaaggttcaagtctcagctgccagatctcagtggccctcacagctacagtccggggagaaacagcgtggctggaagcaaccccgcaaagccaggcctgggcagtcctgggcgctacagccccgtgcacgggagccagctccgcaggatggcgcgcctggctgagcttgccgccctgtaggcttggcgctgggctctcggtttgttcttcatttttaaagaaggaagggtcatatgtttattgctaaactgtcaaaaaggaatatattctgattaaattattactcctcactttgagggtgtgagaattttagaagatttaaatgttctatataacacttagatttctgatattttggaagaagttagaagttaatgaaagcaaactcagttaccaattttctggaaaatatccatgtggtaatggtagactttttaggtggcaatttctaggtctgaaatatagcagaggaaagggcgctgaggcagttgcaggcaggcagccctgtacttaccctgtactcacctcatccgacagacgctgtggatgaggaggggcttggcggaggcgtgagcaccgatgtccctttgataacctgcactcaccaagatgaactatttgccgccctgtcttttcctgggttggggggtggcatctgatggtggcagagtgcctgttggttcgcccgtgggtctcatggttcagacagagggaggtggacggcagggatcagggagccaggagcgcgcctcagacttgcagcaaccattgtgatttgggttgttcggaatatttaaattactgatcagaagatgaaagtagcttttctcttgggaagtcttgcagcccgtgggagtgataccaggagcaacacagagctcagcagcggcgccaaggtgttccctgtttcctcagcacgtgagccttcaccgcctgcttcattcaggagccagtgcagcagtaatacagtctatacattgttctgttttcaaatttatcctgaggctttgttgagcataaatgattatacgataaaggtatccgttattttggaactcatttcagttgggatctcctgtatgcagagtgttgcatttagaggtttgagtcccatcttggtttcttgccgtgctgactgtagccttcaccttgacttgaatgaaggtctgtggttggaatgtgtgaggagccgctgaggtgttcaggaggtgctgcctggaggtcggtttcttcctgggtgttacgggcaactgctcacacagttgtttctctgtgaacatttccagtgtttaatccaaaatgaaaacccaccaatgcttttgctaacttcagtgccttttataaatcatttttaaatttcctgaacttgctttttgaggatatacagggatattaagtagacgcaggattgtttttgtttgtaaaaattctgaattgaaactttgttttaaaaaaaggcttctttctttcatatgacaagagataggtcaggaatattggaatcaagatttaaatgttaaaattcgattttgttacacagggtgtgttcatttgttttgtagcagacaagatctagatcccagacagaaacaacacatgctattctaaaaagccgcattttaaaaggcaccttggttctcaaaagaaatcagaatatggatattcgtagtgatgatctgttttctctaaaatcttaccatattgtctgtatatggttgtaaattcaaatggaaagtaaaacgttttggccctga

SEQ ID NO: 184501 - DNA, 10890 bp, Artificial Sequence
  derived and/or modified sequence
gcccgggcggcggcgatgctgtggccgcggctggcggcggccgagtgggcggcgctggcctgggagctgctgggcgcctcggtgctgctgatcgctgtgcggtggctggtgcggcggctgggcccgcggccgggaggtctgggccgcagcgggaccccagttcctccgccaagcgcggccgccgcccccgcctcaggtaaggcccaggcggtcgctgggtccccgcaccctggccccttccccgccccgacgccctcctcgggcctggggtcccggccgcgcccctggagccggcagcagttgggcgaggcggccggggaaaccagggccggtcgggaaaggccattccggccgcggaaagggcagttgcggggacttggcttcccgggccgggggcggaggggccacgccgggttcgggggtgagagctttcccgggccctggagcagcctccggggaaggcggcgggggcccggcgaggcgttagcggagactcttgctgcggtctctcgagacctggggagggatggcccaaaggagggcggcgcggggaggaaacccctgggtcccggatgtgtttggaacgtgaagccattgcggttactggtcatggaacataaggcagagacggaaaaggcaaatgtaactcaggggtttggggccagaggaagagggagaaggtggccatttattgctttgcggtagactgtcgggtctgggtgatgtggagatcagaggtgggttttggtcgttttaagtttgaggtaactgatacagtgaactgtgtatttcagctccatccccttttcctggcatacaactcttgaaatcccgggaacctccaaagtgatgtcttttgtaggctgagtggactggtggccggcagcccctagggagcttctggatggggctggtcgcaggaaagaccaaggcagggttagaggttctggggactttcagccccacccccaacctctggggaggagagaggggtgaaggttgcgttgatcaccagtggctgatgaatcacgcctgtgaaatgaagttcctgtaaaaacccaaaagggctgggttcagggagcttccagatagtacgtgggggttcctggaggcggtgcccagagaggccctgaatttccaagcgcttccccccggttttacgtcacgcatctcttcacctgtattctttgtaatcctttatactctgctggtaagtgtaagtaaaacatgtctgtgagttcgggagccactctagcaaattaccgcaacctgaggaggtcaccgggttacgccccgtcggtcccaagcgcaggtcaaacaacctgggcactggaagtggggggcagtcttgcggggctgagccgttaacctgtgggggtctgctggtatctccaggaagacgctgtcagaatagatgactgaattaggatgacagacgacacccagcctgtgtccactgcagaactgacgacctgcgtgatttgtggggagaaaatccccacatacctggtgtccgaagcatgttgcaagactagtgggagaaactgagtttgtttttactctaaattgtcagactgttagtcactgcggagaggtgctttctgatgattgagtggggattcctgtccaattgtgtgagtttgtgtctcggccctaccacttttttttttttttttttttgaaatgtagtctcgccctgtggcccaggctggagtgcagtggcgcgatctcggctcactgcaagctccgcctcccgggttcaagcgattctcctgcatcagcctcccgagtagctgggattacaggcgcctgccaccacgcccggctaatttttgtatttttaatagagacggggtttcaccatgttggccaggatggtctcgaattcctgacctcaggtgatccacctgcctcagcttcccaaaatgctgggattacaggtgtgagccatcgcaccgggccctaccacttattgctgtgggcttaacctgttttcagcctgctcttttaggaatggggatgatagtgatacctggttaggcttttttgggagttgggtaagtgcagcacttggtatgtgttaagcacctctgagtgctgttactgtcaccagcggcatcatccaggcagagctgcggacaaggtggcggcgggtgagggtggtgttttgagaatggctgaaataaaaaaatactgatttattttatataaaaatatgtttttatatatgatgtataatatacgtatatcatggcatatgatacgtgtatatcatatagcacatatagtatacatatatatagtcagcagagatttagagaaactgggcctcgtgcattgcaggtggggacggtaagtggtgcagctactctgggaatcagcctggcaggtttttaggaagttaaacctgccctgcattcctgagcttttattagacaaatgaaaactattttcacacaaaaacccatatttaatgttcatagcaactttatttgtaattaccagaaactgaaataactcaaatggttaaacttgcacactgataccccggggtgccactccgcagcgatcctctctgccacgtgggtgccccggggtgccactctgcatgatccactctgccacgtgggtgccccggggtgccactccgcagcgatcctctctgccacgtgggtgccccggggtgccactctgcgtgatccactctgccacgtgggtgccccggggtgccactccgcagcgatcctctctgccacgtgggtgccccggggtgccactccgcagcgatccactctgccacgtgggtgccccggggtgccactccgcagcgatcctctctgccacgtgggtgccccggggtgccacactgcgtgatccactctgccacgtgggtgccccggggtgccactccgcagcgatccactctgccacgtgggtggatctcaagggcattatgctgaataggaaaagccagtctcaaaagttgtgtacttggccggttgcggtggctcatgcctgtaatcccagcactttgggaggccgaggcaggtggatcacaaggtcaggagttcaagatcagcctggccaacatggtgaggcagtctccactaaaaatacaaaaaaatagcggggcgtggtggcaggtacctgtaatcccagctactcgggaggctgaggcagcagaattgcttgaacccaggaggtggaggttgcggtgagcagagatcgtgccactgcactccagcctgggcgacagagcaagactccatctcaaaaaaaaaaaaattgttaatggaacattataacccagtgttcagacctagctgtttctcacatctttacccatcgatctgtcaaagaccttgtgatcatactgatacttccaatttcaatgcgacgtccgcgggtttattcttttttttttaggtggagtctcactctgttgtccaggctggagactcactgcaacctctgcctgcccagttcaagcgattctcccacctagcctgctgagtagctgggatgacaggtgcatgccaccatgcctggctaatttttgtgtttttagtagacacctggtttcatcatgttggccaggctggtctcaaacacctgacctcaaatgatccatgcaccttggcctcccaaagtgctgggattaccagcatgagccaccgtgtccggctccctggctttattctaatgcaagagtcagtaaactgtggtccaaactggcccccacctattttccttagtaaagttttattggaatacaaccatacccttttgtttatgtatatctgtggctgttctttttttttttttttttggagacggggtcttgctctgttgcccaggttggagtgcagtggcacaaacagggctcactgcatcctcaaactcttaggcttaatttatcctccttcctcagccccccaagtagttggaaccacaggtgcacgtcaccacactcagctaattttttttttttgagacggagtctcgctctgtcgcccaggctggagtgcagtgccgccatctctgctcactgcaagttctgccccctgggttcacaccattctcctgcctcagcctcctgagtagctgggactacaggcgcccgccaccatggccggctaattttttagtatttttagtagagacagggtttcaccgtgtttgccaggatagtctcaatctcctgacctcatgatccacctgcctcggcctcccaaagtgctgggattacaggcatgagtcaccgcgcccagccatcagataatttttaaagtttttgtagaaagggtgtcgctgtgttacccaggctggtcttgaactcctgggctcaagtgatcttcccgcctcggcctccccaagcgctggggtgacaggtgtgagccgccacacgcggcctgtggctgttctgagcactcacgtggcctttggctcatagagtctgagatgcttactctctcgccctttacaggaatcgtttgctgaaaccctgttctcactcccactttcctttctgtcattgagagtcctggctctcatcagccaccgtgtattccaattatttgctttgccctagagtccacagaaaatagctttaggtgtgttaacctataccattgtgaaaacatctactgcctagagcctgttcacacggtaatggtgcacagtcctttttgtctttctccttagagcacctagtcactcactgttttccaaagttacgtaggttagcttcccctgtgttactcacttgtaatacagttaggtgcatttcttctggctagtattccatgtgggtgtctcccccatctttttgtttatttacttatttcttttttttttgttttttttgttgttgttgttttattgaggtggagtctcgctctgttgcccaggctggagtgtagtggtgcgatctcggctcactgtgacctctgcctcctgggttccagcgagtctcctgcctcaggttcccgagtagctgggattacaggtgcccgccactgcgcctgtctaatttttgtattttttttttagtagagatggggtttcaccatcttggccaggctggtctcgaactgctgacctcgtgatccacccacctcggtctcccaaagtgctgcgattacaggcgtgagccaccgcacccggctttacttatttgagtatgtaaatcacgaacatgtttttaaaagtcagaaccctgtagaaacttaaattcagatgtattactcccccccgccatctttttttttgttgttgttgttgagacagggtctgattctgtcacccaggctggagtgcagggttgccatctcagctcgtggtggcatccacctcccaggctcaagtgatcctcctgcctcagccccctgagtagctggggctgtaggtgtgcactactatgctcgggtaattttttttttttgaaacaaggtcttgctcttgtcccctaggctggagtgcagtggcgtgatttcggctcactgcaacctccacctactgggttcaagcaattctcttgcctcagcctcccgagtagctggggttacaggcatgtaccaccacgcccggctaatttttgtatttttagtagagacagggtttcaccatgttggccaggctggtctcgaactcccgacctcaggtgatctgcctgcctcccaaagaatacaacgggctgggcatggtggcttatgcctgtaatcccagcactttgggaggttgggagttcaagaccagcctgaccaacatggagaaaccccgtctctactaaaagtacaaaattagctgggcgtggtggtgcacgcctgtaatcccagctactcgggaggcttgaggcaggagaaccgcttgaacccaggaggcagaggttgcagtgagctgagatcgcaccactgcactccagcctgcctggtgacagagcgagactccgtctcaaaaagaaaaaaggctcacgcctgtaatccaaacactttgggaggccaaggcaggtggatcacctgaggtcgggagtgcaagaccaacctggccaacatggtgaaaccccgtctctcctaaaaatacaaaaattagctaggtgtgattccaggcgcctgtagtcccagctacttgggaggctgaggctggagaatcacttgaactcaggaggtagaggttgcagtgagctgcgatagcaccactgcactccagcctgtgcgacagagggagacaccatctcgaaaaaaaaaagaaaaattctttttttttttttgagctggagtttcgctcttgttgtctaagctggagtgcaggggtgtgatctcggctaattgcagcctccgcctcctgggttcaagcgattctccagcctcagcctcccaagtagctgggattacaggcatccgccaccacacccggctaattttttgtattttcagtagagacgtggtttcaccatgttggccgggctggtctcgaactcctgacctcagatgatccgcccgcctcagcctcccaaaatgctgggattacaggcgtgagccaccgcgtccagccaagaaaaaaagtttttaatgaaagaaacagaaactgatgccattatataatgaaccctagtacccatcacccagcttcagcaggtgttagtattttgtgactctttgatttttttgtcttgggcctaggtgaaatgacaatggatgctctgttggctcgattgaaacttctgaatccagatgaccttagagaagaaatcgtcaaagccggattgaaatgtggacccattacatcaactacaaggttcatttttgagaaaaaattggctcaggctttactggagcaaggaggaaggctgtcttctttctaccaccatgaggcaggtgtcacagctctcagccaggacccacaaaggattttgaagccagctgaagggaacccaactgatcaggctggtttttctgaagacagagattttggttacagtgtgggcctgaatcctccagaggaggaagctgtgacatccaagacctgctcggtgccccctagtgacaccgacacctacagagctggagcgactgcgtctaaggagccgcccctgtactatggggtgtgtccagtgtatgaggacgtcccagcgagaaatgaaaggatctatgtttatgaaaataaaaaggaagcattgcaagctgtcaagatgatcaaagggtcccgatttaaagctttttctaccagagaagacgctgagaaatttgctagaggaatttgtgattatttcccttctccaagcaaaacgtccttaccactgtctcctgtgaaaacagctccactctttagcaatgacaggttgaaagatggtttgtgcttgtcggaatcagaaacagtcaacaaagagcgagcgaacagttacaaaaatccccgcacgcaggacctcaccgccaagcttcggaaagctgtggagaagggagaggaggacaccttttctgaccttatctggagcaacccccggtatctgataggctcaggagacaaccccactatcgtgcaggaagggtgcaggtacaacgtgatgcatgttgctgccaaagagaaccaggcttccatctgccagctgactctggacgtcctggagaaccctgacttcatgaggctgatgtaccctgatgacgacgaggccatgctgcagaagcgtatccgttacgtggtggacctgtacctcaacacccccgacaagatgggctatgacacaccgttgcattttgcttgtaagtttggaaatgcagatgtagtcaacgtgctttcgtcacaccatttgattgtaaaaaactcaaggaataaatatgataaaacacctgaagatgtaatttgtgaaagaagcaaaaataaatctgtggaactgaaggagcggatcagagagtatttaaagggccactactacgtgcccctcctgagagcggaagagacttcttctccagtcatcggggagctgtggtccccagaccagacggctgaggcctctcacgtcagccgctatggaggcagccccagagacccggtactgaccctgagagccttcgcagggcccctgagtccagccaaggcagaagattttcgcaagctctggaaaactccacctcgagagaaagcaggcttccttcaccacgtcaagaagtcggacccggaaagaggctttgagagagtgggaagggagctagctcatgagctggggtatccctgggttgaatactgggaatttctgggctgttttgttgatctgtcttcccaggaaggcctgcaaagactagaagaatatctcacacagcaggaaataggcaaaaaggctcaacaagaaacaggagaacgggaagcctcctgccgagataaagccaccacgtctggcagcaattccatttccgtgagggcgtttctagatgaagatgacatgagcttggaagaaataaaaaatcggcaaaatgcagctcgaaataacagcccgcccacagtcggtgcttttggacatacgaggtgcagcgccttccccttggagcaggaggcagacctcatagaagccgccgagccgggaggtccacacagcagcagaaatgggctctgccatcctctgaatcacagcaggaccctggcgggcaagagaccaaaggccccccgtggggaggaagcccatctgccacctgtctcggatttgactgttgagtttgataaactgaatttgcaaaatataggacgtagcgtttccaagacaccagatgaaagtacaaaaactaaagatcagatcctgacttcaagaatcaatgcagtagaaagagacttgttagagccttctcccgcagaccaactcgggaatggccacaggaggacagaaagtgaaatgtcagccaggatcgctaaaatgtccttgagtcccagcagccccaggcacgaggatcagctcgaggtcaccagggaaccggccaggcggctcttcctttttggagaggagccatcaaaactcgatcaggatgttttggccgctcttgaatgtgcagacgtcgacccccatcagttcccggccgtgcacagatggaagagtgctgtcctgtgctactcaccctcggacagacagagttggcccagtcccgcggtgaaaggaaggttcaagtctcagctgccagatctcagtggccctcacagctacagtccggggagaaacagcgtggctggaagcaaccccgcaaagccaggcctgggcagtcctgggcgctacagccccgtgcacgggagccagctccgcaggatggcgcgcctggctgagcttgccgccctgtaggcttggcgctgggctctcggtttgttcttcatttttaaagaaggaagggtcatatgtttattgctaaactgtcaaaaaggaatatattctgattaaattattactcctcactttgagggtgtgagaattttagaagatttaaatgttctatataacacttagatttctgatattttggaagaagttagaagttaatgaaagcaaactcagttaccaattttctggaaaatatccatgtggtaatggtagactttttaggtggcaatttctaggtctgaaatatagcagaggaaagggcgctgaggcagttgcaggcaggcagccctgtacttaccctgtactcacctcatccgacagacgctgtggatgaggaggggcttggcggaggcgtgagcaccgatgtccctttgataacctgcactcaccaagatgaactatttgccgccctgtcttttcctgggttggggggtggcatctgatggtggcagagtgcctgttggttcgcccgtgggtctcatggttcagacagagggaggtggacggcagggatcagggagccaggagcgcgcctcagacttgcagcaaccattgtgatttgggttgttcggaatatttaaattactgatcagaagatgaaagtagcttttctcttgggaagtcttgcagcccgtgggagtgataccaggagcaacacagagctcagcagcggcgccaaggtgttccctgtttcctcagcacgtgagccttcaccgcctgcttcattcaggagccagtgcagcagtaatacagtctatacattgttctgttttcaaatttatcctgaggctttgttgagcataaatgattatacgataaaggtatccgttattttggaactcatttcagttgggatctcctgtatgcagagtgttgcatttagaggtttgagtcccatcttggtttcttgccgtgctgactgtagccttcaccttgacttgaatgaaggtctgtggttggaatgtgtgaggagccgctgaggtgttcaggaggtgctgcctggaggtcggtttcttcctgggtgttacgggcaactgctcacacagttgtttctctgtgaacatttccagtgtttaatccaaaatgaaaacccaccaatgcttttgctaacttcagtgccttttataaatcatttttaaatttcctgaacttgctttttgaggatatacagggatattaagtagacgcaggattgtttttgtttgtaaaaattctgaattgaaactttgttttaaaaaaaggcttctttctttcatatgacaagagataggtcaggaatattggaatcaagatttaaatgttaaaattcgattttgttacacagggtgtgttcatttgttttgtagcagacaagatctagatcccagacagaaacaacacatgctattctaaaaagccgcattttaaaaggcaccttggttctcaaaagaaatcagaatatggatattcgtagtgatgatctgttttctctaaaatcttaccatattgtctgtatatggttgtaaattcaaatggaaagtaaaacgttttggccctga

SEQ ID NO: 184502 - DNA, 2817 bp, Artificial Sequence
  derived and/or modified sequence
atgctgtggccccggctggccgctgctgagtgggccgccctggcctgggagctgctgggcgcctctgtgctgctgattgctgtgcgctggctggtgcggcggctgggccccaggcctgggggcctgggccgcagcggcacccctgtgcccccaccttctgctgctgctgccccagccagcggggagatgaccatggatgccctgctggcccggctgaagctgctgaacccagatgacctgcgggaggagatcgtgaaggccggcctgaagtgtggccccatcaccagcaccacccgcttcatctttgagaagaagctggcccaggccctgctggagcagggcggccgcctgagcagcttctaccaccatgaagctggggtgacagccctgagccaggacccccagaggatcctgaagccagctgagggcaaccccacagaccaggccggcttctctgaagatcgggactttggctacagcgtgggcctgaaccccccagaggaggaggccgtgaccagcaagacctgcagcgtgcccccaagtgacacagacacctaccgggccggggccacagccagcaaggagccccccctgtactacggcgtgtgccctgtgtatgaagatgtgcctgccagaaatgaaagaatttatgtgtatgagaacaagaaggaggccctgcaggccgtgaagatgatcaagggcagccgcttcaaggccttcagcacccgggaggatgctgagaagtttgcccggggcatctgtgactacttccccagccccagcaagaccagcctgcccctgagccctgtgaagacagcccccctcttcagcaatgaccggctgaaggatggcctgtgcctgtctgagagcgagaccgtgaacaaggagcgggccaacagctacaagaaccccaggacccaggacctgacagccaagctgaggaaggctgtggagaagggggaggaggacaccttcagtgacctgatctggagcaacccccgctacctgattggcagcggggacaaccccaccatcgtgcaggagggctgccgctacaacgtgatgcacgtggccgccaaggagaaccaggccagcatctgccagctgaccctggatgtgctggagaacccagacttcatgaggctgatgtacccagatgatgatgaggccatgctgcagaagaggatccgctacgtggtggacctgtacctgaacaccccagacaagatgggctatgacacccccctgcactttgcctgcaagtttggaaatgctgatgtggtgaatgtgctgagcagccaccacctgattgtgaagaacagcaggaacaagtatgacaagaccccagaagatgtgatctgtgagaggagcaagaacaagtctgtggagctgaaggagcgcatccgggagtacctgaagggccactactacgtgcccctgctgcgggcagaggagaccagcagccctgtgattggagagctgtggagcccagaccagacagctgaggccagccacgtgagccgctatggaggcagcccccgggaccctgtgctgaccctgcgggcctttgctggccccctgagccctgccaaggccgaggacttcaggaagctgtggaagaccccaccccgggagaaggccggcttcctgcaccacgtgaagaagagtgaccctgagcggggctttgagcgggtgggccgggagctggcccacgagctgggctacccctgggtggagtactgggagttcctgggctgctttgtggacctgagcagccaggagggcctgcagaggctggaggagtacctgacccagcaggagatcggcaagaaggcccagcaggagaccggggagcgggaggccagctgccgggacaaggccaccaccagcggcagcaacagcatctctgtgcgggccttcctggatgaagatgacatgagcctggaggagatcaagaaccggcagaatgctgccaggaacaacagccccccaacagtgggcgccttcggccacacccgctgcagcgccttccccctggagcaggaggccgacctgattgaggccgctgagcccggcggcccccacagcagcagaaatggcctgtgccaccccctgaaccacagcaggaccctggccggcaagaggcccaaggcccccagaggagaggaggcccacctgccccctgtgtctgacctgactgtggagtttgacaagctgaacctgcagaacatcggccgctctgtgtccaagaccccagatgagagcaccaagaccaaggaccagatcctgaccagccgcatcaatgctgtggagcgggacctgctggagcccagccctgctgaccagctgggcaatggccacagaagaacagagagcgagatgtctgcccgcatcgccaagatgagcctgagccccagcagccccaggcatgaggaccagctggaggtgacccgggagcccgcccggcggctcttcctgtttggagaggagcccagcaagctggaccaggatgtgctggccgccctggagtgtgctgatgtggacccccaccagtttcctgctgtgcaccgctggaagtctgctgtgctgtgctacagccccagcgaccggcagagctggcccagccctgctgtgaagggccgcttcaagagccagctgcctgacctgagcggcccccacagctacagccctggaagaaattctgtggccggcagcaacccagccaagccaggcctgggcagccctggccgctacagccctgtgcacggcagccagctgcggaggatggcccggctggccgagctggccgccctgtag

SEQ ID NO: 184503 - DNA, 2817 bp, Artificial Sequence
  derived and/or modified sequence
atgctgtggccccggctggccgccgccgagtgggccgccctggcctgggagctgctcggcgcatcagtactgctgattgccgttcgctggctcgttagaagactaggtccaagacctggaggcctggggcgctccggaacccctgtcccccctccttcagccgcggctgcacctgcatccggggagatgaccatggatgccctgctagcgcgtctcaaactgctcaaccccgacgacctcagggaagaaatagtgaaggccggcttgaaatgtggacctatcacttcaacaaccagatttatctttgagaagaagttggcccaagctttgctggagcaaggagggcgcttgtcttccttttaccatcacgaggcaggagtgactgctctctcccaagaccctcagagaatcctgaagcctgccgaaggaaacccaaccgatcaggcgggattctctgaggacagggacttcgggtacagcgttggtcttaaccctccagaggaagaggcggttacaagcaaaacctgctctgtgcccccctctgataccgatacttacagggcgggcgccaccgcctctaaagagccaccactatactatggcgtgtgtcctgtgtacgaggacgtgccggctaggaacgagcgcatctacgtttatgagaacaagaaggaggctctgcaagccgtgaaaatgattaaggggagccgattcaaagcattttccacacgagaagatgcagaaaagttcgcacgcggaatctgtgactacttcccgtccccttctaaaaccagcttacccctctcgcccgtgaaaaccgcgcccctgttcagcaacgacagacttaaagacgggctctgcttatctgagtctgagaccgtgaacaaagaacgcgcaaacagttacaaaaatcccaggacacaggatctgacagcaaagctgcgaaaggcggtagaaaagggcgaagaggacactttctctgaccttatttggtcaaaccctcgctatctgattggatcaggggataaccccaccatcgtgcaggaaggatgccgctataatgtgatgcacgtggccgcaaaggagaaccaggcgtctatctgccagctgactctcgatgtgctcgagaatccagatttcatgagacttatgtaccctgacgatgacgaagctatgttacagaaacggatccggtatgttgttgatctgtacctgaataccccagataagatgggatatgacactcctctccatttcgcatgcaaattcgggaacgctgacgtcgtcaacgttctgagctctcaccacttgatcgtgaaaaattccagaaacaaatacgataaaaccccggaggacgtcatctgcgagcggagcaagaataagagtgttgaattaaaagagagaattagagaatatctgaagggtcattactacgtgcccttactgcgggccgaagagacctcttctccagtgatcggcgaactgtggagtccggaccagaccgcggaggcatctcacgttagccggtatggaggtagtccacgcgaccccgtgctaactctgcgggcgtttgcagggcccctttcacctgccaaagcagaagatttcaggaagctttggaagacaccccctcgagaaaaagctggtttccttcatcatgtcaaaaaatccgatcctgagcgtggcttcgaacgggtggggcgggagctcgctcacgagttagggtacccttgggttgaatattgggagttcctggggtgttttgtggacctcagcagccaggaaggtctgcaacggctggaagagtatcttacgcagcaggaaatagggaagaaggcgcagcaggagactggagagcgggaagcctcctgccgggataaggccacaacctctgggagtaacagcatttccgttagagcttttctggatgaggatgacatgtcactggaagaaatcaagaaccgccagaacgccgcccgaaataattccccgccaacagttggggcctttgggcatacacgctgtagcgcattcccccttgagcaagaggccgacttgatcgaggcagcggaaccgggaggaccgcacagtagccggaatgggctctgccaccctttgaaccacagccgcaccttggcaggcaagcgcccgaaggctccccgcggagaggaggctcatctgccccctgtctctgatctcactgtggagtttgataaacttaatttgcagaacattgggagaagtgttagcaaaaccccagatgagagcaccaagactaaggaccaaattctcacttctaggatcaatgctgtagaacgcgacctgcttgaaccgagtcctgccgaccagctgggcaacggccacagacgaacagagtctgaaatgagcgcccgcattgctaaaatgtcgctctcgccttcatccccccgacacgaagaccaactcgaagtcacgcgagaacccgccaggcgcctgttcctgtttggcgaagagccctctaagctcgaccaggacgtcctggcagcactcgaatgtgcagatgtggatcctcaccagttcccagctgtgcataggtggaaatctgcggtgttgtgttactccccaagtgacaggcagtcatggccaagccccgccgtaaaaggacggtttaagtcccagcttccagacctgagtggtccccactcctattcacctggtaggaattcagtcgccgggtcgaatcctgccaagccgggattggggtcacccgggcggtattctcccgtacatggaagtcagctgcggcgaatggccaggttagctgaactcgctgccttgtag

SEQ ID NO: 184504 - DNA, 2817 bp, Artificial Sequence
  derived and/or modified sequence
atgctatggcctcggctagctgccgcagaatgggccgcactggcctgggagcttctgggagccagcgtgctgctgatcgctgtgaggtggctggtgcgtcgcctagggcctagacctgggggtctcggtagaagcggaactccagtaccccctccatcagctgccgcagctcctgctagcggtgaaatgacgatggatgcgctacttgcaaggctcaaacttttgaatccagacgatctgagggaggagattgtcaaggcaggcctgaaatgcggaccgataacttcaacaactaggttcatctttgaaaagaagctggcccaagctctgctcgaacagggcggtcgcctctcatctttttatcatcatgaagcaggagtgacagctttgagccaggacccacagcgaatcttaaaaccagctgaaggtaaccctactgaccaggcaggtttctccgaagatagggacttcggatattctgtcggcctcaacccccctgaggaggaggcggtgactagcaagacatgctctgtgccaccttccgacactgacacctaccgtgccggagccactgcctccaaggagcctcccctatattacggcgtgtgccctgtatatgaagatgtgcccgcaaggaacgaaagaatttacgtgtacgagaataaaaaggaggccctgcaggccgtgaaaatgattaaggggtccagatttaaggctttttctactcgggaagatgcagagaagttcgctcgaggcatctgtgattacttccccagtcccagtaagacttccctgccactgagccccgttaagacagcccctctcttcagcaacgatcgcctgaaagacggattgtgccttagcgagagtgagacggtgaataaagaaagggcgaactcctataagaaccctcggactcaggatctgactgcgaagctccgaaaggcagtcgaaaagggggaggaggacactttcagcgacttgatctggtctaacccacggtatttgattggtagcggcgacaatcccacaattgtgcaggaggggtgtaggtacaatgtgatgcacgtggcagcaaaggaaaatcaggcatcaatctgccaactgacactcgacgtgctagagaaccctgattttatgcgcctgatgtaccccgacgacgatgaagccatgctgcaaaagagaatacgctacgtcgttgacctctatctcaacacaccggataaaatggggtacgatacgccactccatttcgcctgcaaattcggcaatgcagacgtcgtgaatgtgctttcgagccaccatctgattgtgaagaattcaaggaataaatatgacaagacaccagaagatgtgatttgtgaacggagcaagaacaaatctgttgaactcaaggaacgcatcagggagtacctgaaggggcactattacgtaccgctgttgagggccgaggaaactagttctcccgtgatcggagagctctggagccctgatcagaccgcggaagcttcacacgtcagccggtacggcggttctcccagagatcccgttctgacgctgagggctttcgcaggacctctgagccctgccaaagctgaagacttccgaaagctttggaaaaccccccctcgcgagaaggcagggtttttacaccacgttaaaaaaagcgatccagaaaggggtttcgaaagagtggggagggagctcgctcacgaactggggtacccgtgggtggagtattgggagttcctggggtgctttgtggacctctccagtcaagagggtctgcagcggcttgaggaatatctcacacagcaggagattgggaaaaaggcccaacaggaaaccggtgaacgggaggccagctgtcgggacaaagctaccacttctggcagtaatagcatctctgtgcgcgcattccttgatgaagatgatatgagcctggaagagatcaagaatcggcagaatgcagcccgaaataactccccacccacagttggcgctttcggccatacccggtgcagcgccttccctctggagcaggaagcagaccttatcgaagccgctgaacctggtggccctcacagcagcaggaacggcctgtgccaccctctaaaccacagcaggactctagcgggtaagaggccaaaagcaccgagaggggaagaggcgcacctcccgcctgttagtgacctcacagtggagttcgataagctgaacttgcaaaacatagggagatctgtatctaaaacgccagacgaatccactaagacaaaagaccagatcctgacctcccgcattaatgcagtggagcgagaccttctagagcccagtccagctgaccagctcgggaatggacaccggcgtacggagagtgagatgagcgcacgaattgcaaaaatgagcctgagtccctcttcccccagacatgaggaccagctcgaagtgactcgtgaacccgctcgaaggctcttcctctttggcgaagaaccttctaagctggatcaggacgtcctggctgctctcgagtgtgccgacgtcgatccccaccagtttccagcagtgcatcgctggaagagcgctgtgctatgctattcaccgtccgaccggcaatcgtggccatcacctgcggtgaaaggcaggtttaagtcccagctccccgatctctctggcccacatagctacagccctggcaggaatagcgtggccggttcaaaccccgctaaacctgggcttgggagtcctgggagatattccccagtgcacggatcacagctcaggcgtatggccaggctggctgaattggcagccctctag

SEQ ID NO: 184505 - protein, 728 aa, Artificial Sequence
  derived and/or modified sequence
MATPGSEPQPFVPALSVATLHPLHHPHHHHHHHQHHGGTGAPGGAGGGGGGSGGFNLPLNRGLERALEEAANSGGLNLSARKLKEFPRTAAPGHDLSDTVQADLSKNRLVEVPMELCHFVSLEILNLYHNCIRVIPEAIVNLQMLTYLNLSRNQLSALPACLCGLPLKVLIASNNKLGSLPEEIGQLKQLMELDVSCNEITALPQQIGQLKSLRELNVRRNYLKVLPQELVDLSLVKFDFSCNKVLVIPICFREMKQLQVLLLENNPLQSPPAQICTKGKVHIFKYLSIQACQIKTADSLYLHTMERPHLHQHVEDGKKDSDSGVGSDNGDKRLSATEPSDEDTVSLNVPMSNIMEEEQIIKEDSCHRLSPVKGEFHQEFQPEPSLLGDSTNSGEERDQFTDRADGLHSEFMNYKARAEDCEELLRIEEDVHWQTEGIISSSKDQDMDIAMIEQLREAVDLLQDPNGLSTDITERSVLNLYPMGSAEALELQDSALNGQIQLETSPVCEVQSDLTLQSNGSQYSPNEIRENSPAVSPTTNSTAPFGLKPRSVFLRPQRNLESIDPQFTIRRKMEQMREEKELVEQLRESIEMRLKVSLHEDLGAALMDGVVLCHLVNHIRPRSVASIHVPSPAVPKLSMAKCRRNVENFLEACRKLGVPEADLCSPCDILQLDFRHIRKTVDTLLALGEKAPPPTSALRSRDLIGFCLVHILFIVLVYITYHWNALSA

SEQ ID NO: 184506 - DNA, 2187 bp, Artificial Sequence
  derived and/or modified sequence
atggccactcccgggagtgagccccaaccattcgtgcccgcattaagcgtggctacccttcacccattacaccacccccaccaccatcatcaccatcaccagcaccatggaggtacaggggcgcccggcggtgcaggaggcggtggcggcggcagtggcggcttcaacctccctttgaatcggggcctggagcgcgccctggaggaggccgccaacagtggcgggctgaatctttccgcacgtaaactgaaagagttccccaggacagccgccccagggcacgatctttccgataccgtgcaggccgatctctcaaaaaatcggcttgtggaagtgcccatggaactgtgccatttcgtctccctagagattttgaatctctatcataattgcatcagggtaattcctgaagctatcgtgaatctccagatgttgacgtacctcaacctttcccgtaatcaactgtccgctctgcccgcctgtctctgtggccttccccttaaggtgctgatagcttccaataacaaactcgggtctctgcctgaggaaatcggacagctcaaacagcttatggaactcgacgttagctgtaatgagattacagcgctaccacagcagatcgggcagctcaagagtctccgcgagctgaacgtgagacggaattaccttaaggtgttgccacaggagctcgtagacctatcgcttgtgaagtttgatttctcctgcaacaaggtgctggtgatcccaatttgcttcagggagatgaagcagctccaggtccttctcctggagaataacccactgcaatccccccccgcccagatctgcacaaaggggaaggtgcacatcttcaagtatctaagcatacaggcctgtcaaattaaaaccgcagatagcttatacctccatacgatggagcggcctcatcttcaccagcatgttgaggacggaaaaaaggattccgatagcggggtcggatctgataacggggataagaggctctctgccacagaaccctccgacgaggataccgtgtccctgaatgtgcctatgtccaatataatggaagaagagcaaattattaaagaggactcatgccataggctatcacccgtcaagggcgagttccaccaagaatttcaacctgagccatccctcctcggagactccacgaacagtggagaggagagagatcaattcacagatcgggcagacggactgcattctgagtttatgaactataaggctagagccgaggattgtgaggagttgttaaggatcgaggaagatgtgcattggcagaccgagggaattataagttccagcaaggaccaggacatggatattgcaatgatcgaacagcttcgggaagctgtggacctgcttcaggacccaaatggattgtctaccgatattactgaaaggtcagttctgaacctttaccctatgggctccgcagaggccctggagctgcaggattccgcactaaatgggcagatccagttggaaaccagccctgtgtgtgaagtccaaagcgatctgacgcttcagtccaatggaagtcagtactctcccaatgagatcagggagaactctccagccgtctcccctacaactaattctacagcgcctttcggacttaaaccgcgatctgttttcctgaggccacagcgcaatttggagagtatagatccacaatttacgatcagaagaaaaatggaacagatgcgcgaggagaaagaactggtggagcagctgagggaatctatcgagatgcgcttgaaagtttcactgcacgaagatcttggtgctgccctgatggacggagttgtcctctgccacctggtaaatcatattcggccccgaagcgtagcctctattcatgtaccctcccccgcagtgcccaaactatccatggccaagtgccgtcggaatgtggaaaacttcttagaggcttgccgcaagttaggcgttccggaggcagatctgtgctctccctgcgatattctgcaattagacttccggcatatcaggaagacagtagacaccctgctcgccctgggtgaaaaggcccctccacctacttcggcgctcagaagccgggacttgatcggcttctgtcttgtgcatatcctctttatcgtccttgtgtacatcacttaccattggaacgccctgtcggcttag

SEQ ID NO: 184507 - DNA, 2187 bp, Artificial Sequence
  derived and/or modified sequence
atggccaccccaggcagcgagccccagccctttgtgcctgccctgtctgtggccaccctgcaccccctgcaccacccccaccaccaccaccaccaccaccagcaccacggcggcactggagcccctgggggcgccggcggcggcggcggcggcagcggcggcttcaacctgcccctgaacagaggcctggagcgggccctggaggaggccgccaacagcggcggcctgaacctgagcgccaggaagctgaaggagttccccaggacagctgcccctggccatgacctgagtgacacagtgcaggccgacctgagcaagaaccggctggtggaggtgcccatggagctgtgccactttgtgtccctggagatcctgaacctgtaccacaactgcatccgggtcatccctgaggccatcgtgaacctgcagatgctgacctacctgaacctgagcaggaaccagctgagcgccctgcctgcctgcctgtgtggcctgcccctgaaggtgctgattgccagcaacaacaagctgggcagcctgcctgaggagatcggccagctgaagcagctgatggagctggatgtgtcctgcaatgagatcacagccctgccccagcagatcggccagctgaagagcctgcgggagctgaatgtgagaagaaactacctgaaggtgctgccccaggagctggtggacctgagcctggtgaagtttgacttcagctgcaacaaggtgctggtgatccccatctgcttccgggagatgaagcagctgcaggtgctgctgctggagaacaaccccctgcagagccccccagcccagatctgcaccaagggcaaggtgcacatcttcaagtacctgagcatccaggcctgccagatcaagacagctgacagcctgtacctgcacaccatggagcggccccacctgcaccagcacgtggaggatggcaagaaggacagcgacagcggcgtgggcagtgacaatggagacaagaggctgagcgccacagagcccagtgatgaggacacagtgtccctgaatgtgcccatgagcaacatcatggaggaggagcagatcatcaaggaggacagctgccaccggctgagccctgtgaagggggagttccaccaggagttccagcctgagcccagcctgctgggggacagcaccaacagcggggaggagcgggaccagttcacagacagagcagatggcctgcacagcgagttcatgaactacaaggcccgggcagaggactgtgaggagctgctgagaattgaagaagatgtgcactggcagacagagggcatcatcagcagcagcaaggaccaggacatggacatcgccatgattgagcagctgcgggaggccgtggacctgctgcaggaccccaacggcctgagcacagacatcacagagaggtctgtgctgaacctgtaccccatgggcagcgctgaggccctggagctgcaggacagcgccctgaatggccagatccagctggagaccagccctgtgtgtgaggtgcagagcgacctgaccctgcagagcaatggcagccagtacagccccaatgagatccgggagaacagccctgctgtgagccccaccaccaacagcacagcccccttcggcctgaagcccaggtctgtgttcctgcggccccagaggaacctggagagcattgacccccagttcaccatccggaggaagatggagcagatgagggaggagaaggagctggtggagcagctgcgggagagcattgagatgaggctgaaggtgtccctgcacgaggacctgggcgccgccctgatggatggagtggtgctgtgccacctggtgaaccacatccggcccaggtctgtggccagcatccacgtgcccagccctgctgtgcccaagctgtccatggccaagtgcagaagaaatgtggagaacttcctggaggcctgcaggaagctgggcgtgcctgaggccgacctgtgcagcccctgtgacatcctgcagctggacttccgccacatcaggaagacagtggacaccctgctggccctgggggagaaggcccccccacccaccagcgccctgcggagccgggacctgattggcttctgcctggtgcacatcctcttcatcgtgctggtgtacatcacctaccactggaatgccctgagcgcctag

SEQ ID NO: 184508 - DNA, 4131 bp, Artificial Sequence
  derived and/or modified sequence
cttcaagaccgagctgccacggccgcctccccgcccgccccccattctacgcgcctgcccacaccctcctcccctccttccagcgcctttcggtggagcactgcggcactcagcccgagctgccgttttcccctcgcggggaacgctgtgacccccccgcaggagcggcggggcggggtgggggggcccgggagaagatggcgacgccgggaagcgaaccccaacctttcgtcccggccctttcggtagctactctgcacccacttcatcatccccaccaccaccaccaccaccatcagcaccacggaggaaccggcgcccccggcggggcgggtggtggcggcggtggcagcgggggcttcaacctgcccttgaaccggggtctggagcgcgcgcttgaggaggcggccaactccggggggctgaacctgagcgccaggaaattgaaggaatttccccgtaccgcagcccccgggcacgacctctcggacacggtgcaggcagacttatctaaaaacagactggttgaagttccaatggaattgtgccattttgtatcactggaaattcttaatctgtatcacaactgtatcagagtcattcctgaggccatcgttaatctgcagatgctgacttacctgaacttgagtcgaaatcagctgtccgccctgcctgcctgcctgtgtggtctgcctctcaaagtcttaatcgcaagtaacaacaaacttggatcattaccagaagagataggtcagctcaaacagttaatggagctggatgtcagctgcaacgagatcacagcgttgccccagcagataggtcagttgaaatctctacgagaactgaatgtcagaagaaattaccttaaagttttaccacaagaactagtagatctttccttggtaaagtttgacttttcctgcaacaaagtgctcgtgattccaatttgttttagagagatgaagcagctgcaagtgttactacttgagaataaccctctgcagtctcctccagcacagatttgcacaaagggcaaagttcacatatttaagtatctgagcatacaagcatgccagattaagacagctgactccctttatctccacaccatggagaggccacatttacaccagcacgtggaagatggcaagaaggattctgattcgggagttggaagtgataatggagataagcgattatctgccaccgagccttctgacgaagacactgttagcctcaatgtgccaatgtcaaacatcatggaagaagaacagatcatcaaggaggactcgtgccatcgccttagccccgttaaaggggaatttcatcaggaatttcaaccggagccttcccttttgggtgacagcaccaactcaggagaagaaagagaccagtttactgatagagcagatggtctccattcggaatttatgaactataaggcaagggcagaagactgtgaagagctgttacggatagaagaggatgtgcactggcaaactgagggcataataagttcatccaaagatcaggacatggatatagcaatgatcgagcagctgagagaagcagtagatttgctgcaagatcccaatggattaagcacagatattacagagagaagtgttttaaacctatatcctatgggatcagcagaagccttagaattacaagattctgcactgaatggtcaaatacagctggagacatctccggtgtgtgaggtgcaaagtgatctaacattacagagtaacgggagccagtattctccaaatgagattagagagaactcccctgcagtctctcctaccacaaacagcacagctccatttggcctgaagcctcgatcagtgtttctaagacctcagagaaatttggaatctatagacccgcagtttacaatccggaggaaaatggagcagatgagagaagagaaagagctggtggaacaacttcgtgagagcattgagatgagattgaaggtcagtctacacgaagacctgggggcagccctcatggatggtgtcgtcctctgccatctggtcaaccacatccgcccacggtcggttgcaagcatccatgtcccatcaccagcggttcccaaacttagcatggccaaatgcagaagaaatgtggaaaactttttggaagcatgccgaaaattaggagtaccagaggctgacctctgctctccgtgtgacatcctgcagttggattttcgtcacattcgaaagactgttgacactctgctggcactcggggagaaagccccaccaccaacttctgccctccgctccagggaccttataggcttctgtcttgtccatattctctttatagtgctggtctatatcacttaccactggaatgctctgtccgcataatgtctgcacgtgcatccaaacgctgtgctctgtcgccctcaacctttgcagggtccttcctacctttgagcctttgccttgcaaacttccatccctgtcatgtcttcagttatctctcgagttttgaagctgaacagtagcaaatcagattttccagaagcacaaactttgtagaatacagtttagtataattcctctcacttactgaaatacaacgacgacgactgcaaagtgtatgcacaccgcatgcttcctcatccacatagtgccagcagcagtgccacgcagttcctcctctccctcccggtgagctgctgccctgggcagaggggaggagaattccaggacaagagtgtcaaggacagggatttagcatatggaagtctttcctttgggtcagtattgaactagaattctaattcgggactgggcaattgagctgtataggggccaccttgcagggaggacagaaaactaacattttggcccaacttgatctatacaaaactttaataataccactactgaccaagttggacgtgtacacgtactcacactgccttgatggccattcgattggattcctcccaaatttcctaaaaagggagccgcgaagggcgctgggcagtgtggccgccaacttccaccccggcaagcccctctgtcctatgcagaagggcgctcaagggaaggaagtgtcgttgctgttagagcctcacgtggaggagtcacttaaacaccagttttttactgcttaattccttgttaggtcttctcttgaggctcttagaaaagcgttttccagagagatttctatttttgaacaatggaacggatcactgcttttttgccacatcacatagtaactgccggtccagaatgtgacggattcgactctattcattttcaaataaagccatgagccgtggaacattcttggtcctggtgcttgggttatgatggcaggagtcaagaagaagattactttcattctagaagaatgtagtttctctaattatttgaaatgttcatttagcctttgattttcactgatattaactagcaaactgctttaagtcagctcaaaggattatatagtaactatatctgcatttggagcaatgtgatcagtttgcatttaaaaggaaaaaaaagaattttatcttagccagaatgtccctggattcaggggtgtctttgtataatatgagagggccttgttccaaggtcaaggcagcctccttattttacatgctgtttgccaaatcttgtttcttagcttggggagatgatggacttagcttcctcaagataaatttctagtttattaagatgcaaacagctctcatagatggctactacgaagaaaatcttatttttctgaacattttcatgaatccaggggacttgaaaatatggaagacccacatagttagaagaatatatttataaagattccttgctgctaagtcagatcagatttgctaacaggaagcattctttacatgacagtatcttgagttatgtgagttttttttcctcctgactttgtgttgattggtgaaatgcagggtatgtggaagttatctaattaacctcagttgtatatgaataacccacagatgtactgaattacttttggtgctatcttgtactcttcaatctgtaacacaataaaatccctttgtacgatgtctaatgagcaccctgagccataaattgcttaataaacacattttgggtgatt

SEQ ID NO: 184509 - DNA, 2187 bp, Artificial Sequence
  derived and/or modified sequence
atggccacccccggcagcgagccccagcccttcgtgcccgccctgtccgtggcaactctgcacccactccaccacccccaccaccatcaccaccatcaccagcatcacggcgggacaggcgcccccgggggcgcaggggggggcggcgggggctctgggggtttcaatctcccattaaacagggggctggaacgggcattggaagaggccgcaaactcaggcggcctgaatctttctgcccggaaacttaaggagttccctagaaccgccgctcccggccatgatctatccgatacagttcaggccgacctatcaaagaataggctggtggaggtgccaatggagctgtgtcattttgtttctctggaaatccttaacctctatcataattgtatccgagttatacctgaggcaattgtgaacctccagatgcttacctatctgaatctgagccgcaaccagctctcggcactgccagcatgcttatgtggactgccactgaaggtgctgatcgccagcaacaacaagctagggagtctcccagaagagatcggacagctgaaacaattgatggagctggacgtttcatgcaatgaaattaccgctcttcctcagcagattggtcagttgaagagccttcgggagctcaatgttcgtcgcaactacttgaaagtcttgcctcaggaactggtcgaccttagcctcgtaaagttcgatttttcctgtaataaagtgctagtcatacctatatgcttccgggagatgaagcaactgcaagttcttttgctcgaaaacaatccgctgcaatctcccccagcacagatttgcaccaaaggaaaagtccatatcttcaaatacctatctatccaggcttgtcaaattaaaacagcagactcactgtacttgcatacaatggagcgaccgcacctgcatcagcatgtggaggatgggaagaaggacagcgacagcggagttggctctgacaacggagataaacggttatcggcgacggaaccatccgatgaggacacagtgagcctgaatgtgccaatgtctaacatcatggaagaggagcagattataaaagaggactcctgccaccgactcagcccagtaaagggcgaatttcatcaagaattccaaccagagccctcgctgctgggagatagcacaaattccggggaggaacgcgaccagttcaccgaccgggcagacggcttgcacagcgagtttatgaactataaagcccgggcagaagattgtgaggagctgctgagaatcgaagaggatgtacattggcagaccgaagggattatctcctcaagcaaagaccaggatatggatatcgccatgattgaacagctgagagaggctgtggatctcttgcaggacccaaatggacttagcacagacatcaccgagagatctgtgctgaatctgtacccaatgggcagcgccgaggctctggaattgcaggacagcgccctgaatggacagatccagctagagacaagccctgtttgtgaggttcagtctgatctgaccctacagtctaatggcagccagtactcgcccaacgagatccgggaaaattcacctgccgtgtctccgacgaccaattccactgctccatttgggctcaagcctagatctgtgttcctgaggccacagagaaatctagagagcatcgatccccaattcaccatccgccgcaaaatggagcagatgcgcgaggagaaggagctggttgagcagctgcgggagtcaattgaaatgaggttgaaggtgagtcttcacgaagatttgggcgccgcgctgatggatggggttgttctttgccacctggttaatcacatccgaccacgctcggtggccagcatacacgtgccttcacctgcagtgcccaagctgtcaatggcgaaatgtcgccggaacgttgagaacttcctggaagcctgtaggaaactgggggtgccagaggcagacctgtgctcaccatgcgacatccttcagcttgatttccggcacattcggaaaaccgtggacaccctgttggcattgggagagaaagcccctccacccacctcagcgcttaggtcaagagacctaatcggattctgccttgtgcacatcctgtttatcgtcctggtgtatatcacttatcactggaacgcgctatctgcctag

SEQ ID NO: 184510 - DNA, 2187 bp, Artificial Sequence
  derived and/or modified sequence
atggccactcctggctcagaaccacagcctttcgtcccagctctgtccgttgcaaccttgcacccgctgcaccacccacaccaccaccaccaccaccatcagcatcatggagggaccggggcacccggaggggctggtggaggcggtggcggatcagggggattcaatctgccattgaaccgcggactggaacgtgccctggaagaggcggcaaactctggaggcctcaatctgagcgcaaggaagcttaaggaattcccgcgaactgctgcacctggtcacgacttgtcagacaccgtgcaggcagacttgagcaaaaaccgcttggtcgaagtgcccatggagctgtgccatttcgtctcgctagagatcctgaacttgtaccacaattgtatccgggtcattcccgaagccatagttaatctacagatgttaacctacctgaacctgagtcgcaatcagcttagcgcgctgccagcctgcctgtgtgggctccctctgaaggtgctgatcgccagcaacaataagcttgggtcccttcctgaggagattgggcagctgaagcagcttatggaacttgacgtgtcctgcaatgagattactgcactgccccagcagattggacaactcaaatcgcttagggaacttaacgtgcgccgtaactatctgaaggtgctcccccaggagctcgtggatttgtctcttgtgaagttcgacttctcctgtaataaggtcctggtgattccaatttgctttagggagatgaaacagctccaagtcctgctactcgagaataaccctcttcagtcccctcccgctcagatctgtactaaggggaaggtgcacatattcaaatatctgtctatccaagcctgtcagatcaaaacagccgattctctttatctgcatacaatggagcggcctcatctgcatcagcatgtggaagacggaaaaaaggactcagattctggcgtgggcagcgataatggagataagcgcctttctgcaacagagccaagcgacgaggacactgtatctctaaacgttccaatgtccaacatcatggaggaggaacagattatcaaggaggattcttgccaccgcctctctcctgtgaagggcgaatttcatcaagagtttcaacccgagccgagtctgctgggcgattcgacgaactccggagaagaacgtgaccagtttacggatcgcgctgacggccttcactccgagttcatgaattataaggctcgggctgaggattgcgaggaactgctgcgaatcgaggaggacgtgcactggcagaccgagggcatcatcagctccagtaaggaccaggatatggacatcgccatgatagagcaactgagagaggctgtggacctcttacaggatcctaacgggctttcaacagacataacagaaaggtccgtgctaaacctttaccctatgggcagcgccgaagcacttgagctgcaggattccgccttgaacggccaaattcagctagagacctctccagtctgcgaggtgcaaagcgatcttactctgcagtccaatggcagtcagtactctcctaacgaaattcgggagaatagccccgctgtatcaccgaccaccaactccaccgccccattcgggctgaaacccaggagcgttttcctgaggcctcagagaaacctagaatcaatagacccgcagttcactatcaggcggaagatggagcagatgagagaagagaaagagctggtcgagcagctgagagagtcaatcgagatgcgtttgaaggtgtcattgcacgaggacttaggtgctgccttaatggatggggttgtactgtgtcatctcgttaaccacatcagaccacgcagtgtcgccagcatccatgtgccctcgcccgctgttcctaagctcagcatggctaaatgcaggaggaatgtagagaattttctggaagcttgtcgaaagttgggcgtgccggaggccgatctctgcagcccatgtgacatccttcagctggatttcagacatattcggaagactgtagatacactgctagctctgggcgagaaggcgcctccacccactagcgcactgcggtcccgagatctgatcgggttctgcctggttcacatcctgttcatagtgcttgtctatatcacgtatcactggaacgctctcagtgcttag

SEQ ID NO: 184511 - DNA, 2187 bp, Artificial Sequence
  derived and/or modified sequence
atggccacccccggcagcgagccccagcccttcgtgcccgccctgagcgtggccaccctgcaccccctgcaccacccccaccaccaccaccaccaccaccagcaccacggcggcaccggcgcccccggcggcgccggcggcggcggcggcggcagcggcggcttcaacctgcccctgaacagaggcctggagagagccctggaggaggccgccaacagcggcggcctgaacctgagcgccagaaagctgaaggagttccccagaaccgccgcccccggccacgacctgagcgacaccgtgcaggccgacctgagcaagaacagactggtggaggtgcccatggagctgtgccacttcgtgagcctggagatcctgaacctgtaccacaactgcatcagagtgatccccgaggccatcgtgaacctgcagatgctgacctacctgaacctgagcagaaaccagctgagcgccctgcccgcctgcctgtgcggcctgcccctgaaggtgctgatcgccagcaacaacaagctgggcagcctgcccgaggagatcggccagctgaagcagctgatggagctggacgtgagctgcaacgagatcaccgccctgccccagcagatcggccagctgaagagcctgagagagctgaacgtgagaagaaactacctgaaggtgctgccccaggagctggtggacctgagcctggtgaagttcgacttcagctgcaacaaggtgctggtgatccccatctgcttcagagagatgaagcagctgcaggtgctgctgctggagaacaaccccctgcagagcccccccgcccagatctgcaccaagggcaaggtgcacatcttcaagtacctgagcatccaggcctgccagatcaagaccgccgacagcctgtacctgcacaccatggagagaccccacctgcaccagcacgtggaggacggcaagaaggacagcgacagcggcgtgggcagcgacaacggcgacaagagactgagcgccaccgagcccagcgacgaggacaccgtgagcctgaacgtgcccatgagcaacatcatggaggaggagcagatcatcaaggaggacagctgccacagactgagccccgtgaagggcgagttccaccaggagttccagcccgagcccagcctgctgggcgacagcaccaacagcggcgaggagagagaccagttcaccgacagagccgacggcctgcacagcgagttcatgaactacaaggccagagccgaggactgcgaggagctgctgagaatcgaggaggacgtgcactggcagaccgagggcatcatcagcagcagcaaggaccaggacatggacatcgccatgatcgagcagctgagagaggccgtggacctgctgcaggaccccaacggcctgagcaccgacatcaccgagagaagcgtgctgaacctgtaccccatgggcagcgccgaggccctggagctgcaggacagcgccctgaacggccagatccagctggagaccagccccgtgtgcgaggtgcagagcgacctgaccctgcagagcaacggcagccagtacagccccaacgagatcagagagaacagccccgccgtgagccccaccaccaacagcaccgcccccttcggcctgaagcccagaagcgtgttcctgagaccccagagaaacctggagagcatcgacccccagttcaccatcagaagaaagatggagcagatgagagaggagaaggagctggtggagcagctgagagagagcatcgagatgagactgaaggtgagcctgcacgaggacctgggcgccgccctgatggacggcgtggtgctgtgccacctggtgaaccacatcagacccagaagcgtggccagcatccacgtgcccagccccgccgtgcccaagctgagcatggccaagtgcagaagaaacgtggagaacttcctggaggcctgcagaaagctgggcgtgcccgaggccgacctgtgcagcccctgcgacatcctgcagctggacttcagacacatcagaaagaccgtggacaccctgctggccctgggcgagaaggcccccccccccaccagcgccctgagaagcagagacctgatcggcttctgcctggtgcacatcctgttcatcgtgctggtgtacatcacctaccactggaacgccctgagcgcctag

SEQ ID NO: 184512 - protein, 948 aa, Artificial Sequence
  derived and/or modified sequence
MEEKEILRRQIRLLQGLIDDYKTLHGNAPAPGTPAASGWQPPTYHSGRAFSARYPRPSRRGYSSHHGPSWRKKYSLVNRPPGPSDPPADHAVRPLHGARGGQPPVPQQHVLERQVQLSQGQNVVIKVKPPSKSGSASASGAQRGSLEEFEETPWSDQRPREGEGEPPRGQLQPSRPTRARGTCSVEDPLLVCQKEPGKPRMVKSVGSVGDSPREPRRTVSESVIAVKASFPSSALPPRTGVALGRKLGSHSVASCAPQLLGDRRVDAGHTDQPVPSGSVGGPARPASGPRQAREASLVVTCRTNKFRKNNYKWVAASSKSPRVARRALSPRVAAENVCKASAGMANKVEKPQLIADPEPKPRKPATSSKPGSAPSKYKWKASSPSASSSSSFRWQSEASSKDHASQLSPVLSRSPSGDRPAVGHSGLKPLSGETPLSAYKVKSRTKIIRRRSSTSLPGDKKSGTSPAATAKSHLSLRRRQALRGKSSPVLKKTPNKGLVQVTTHRLCRLPPSRAHLPTKEASSLHAVRTAPTSKVIKTRYRIVKKTPASPLSAPPFPLSLPSWRARRLSLSRSLVLNRLRPVASGGGKAQPGSPWWRSKGYRCIGGVLYKVSANKLSKTSGQPSDAGSRPLLRTGRLDPAGSCSRSLASRAVQRSLAIIRQARQRREKRKEYCMYYNRFGRCNRGERCPYIHDPEKVAVCTRFVRGTCKKTDGTCPFSHHVSKEKMPVCSYFLKGICSNSNCPYSHVYVSRKAEVCSDFLKGYCPLGAKCKKKHTLLCPDFARRGACPRGAQCQLLHRTQKRHSRRAATSPAPGPSDATARSRVSASHGPRKPSASQRPTRQTPSSAALTAAAVAAPPHCPGGSASPSSSKASSSSSSSSSPPASLDHEAPSLQEAALAAACSNRLCKLPSFISLQSSPSPGAQPRVRAPRAPLTKDSGKPLHIKPRL

SEQ ID NO: 184513 - DNA, 2847 bp, Artificial Sequence
  derived and/or modified sequence
atggaggagaaggagatcctgagaagacagatcagactgctgcagggcctgatcgacgactacaagaccctgcacggcaacgcccccgcccccggcacccccgccgccagcggctggcagccccccacctaccacagcggcagagccttcagcgccagataccccagacccagcagaagaggctacagcagccaccacggccccagctggagaaagaagtacagcctggtgaacagaccccccggccccagcgacccccccgccgaccacgccgtgagacccctgcacggcgccagaggcggccagccccccgtgccccagcagcacgtgctggagagacaggtgcagctgagccagggccagaacgtggtgatcaaggtgaagccccccagcaagagcggcagcgccagcgccagcggcgcccagagaggcagcctggaggagttcgaggagaccccctggagcgaccagagacccagagagggcgagggcgagccccccagaggccagctgcagcccagcagacccaccagagccagaggcacctgcagcgtggaggaccccctgctggtgtgccagaaggagcccggcaagcccagaatggtgaagagcgtgggcagcgtgggcgacagccccagagagcccagaagaaccgtgagcgagagcgtgatcgccgtgaaggccagcttccccagcagcgccctgccccccagaaccggcgtggccctgggcagaaagctgggcagccacagcgtggccagctgcgccccccagctgctgggcgacagaagagtggacgccggccacaccgaccagcccgtgcccagcggcagcgtgggcggccccgccagacccgccagcggccccagacaggccagagaggccagcctggtggtgacctgcagaaccaacaagttcagaaagaacaactacaagtgggtggccgccagcagcaagagccccagagtggccagaagagccctgagccccagagtggccgccgagaacgtgtgcaaggccagcgccggcatggccaacaaggtggagaagccccagctgatcgccgaccccgagcccaagcccagaaagcccgccaccagcagcaagcccggcagcgcccccagcaagtacaagtggaaggccagcagccccagcgccagcagcagcagcagcttcagatggcagagcgaggccagcagcaaggaccacgccagccagctgagccccgtgctgagcagaagccccagcggcgacagacccgccgtgggccacagcggcctgaagcccctgagcggcgagacccccctgagcgcctacaaggtgaagagcagaaccaagatcatcagaagaagaagcagcaccagcctgcccggcgacaagaagagcggcaccagccccgccgccaccgccaagagccacctgagcctgagaagaagacaggccctgagaggcaagagcagccccgtgctgaagaagacccccaacaagggcctggtgcaggtgaccacccacagactgtgcagactgccccccagcagagcccacctgcccaccaaggaggccagcagcctgcacgccgtgagaaccgcccccaccagcaaggtgatcaagaccagatacagaatcgtgaagaagacccccgccagccccctgagcgccccccccttccccctgagcctgcccagctggagagccagaagactgagcctgagcagaagcctggtgctgaacagactgagacccgtggccagcggcggcggcaaggcccagcccggcagcccctggtggagaagcaagggctacagatgcatcggcggcgtgctgtacaaggtgagcgccaacaagctgagcaagaccagcggccagcccagcgacgccggcagcagacccctgctgagaaccggcagactggaccccgccggcagctgcagcagaagcctggccagcagagccgtgcagagaagcctggccatcatcagacaggccagacagagaagagagaagagaaaggagtactgcatgtactacaacagattcggcagatgcaacagaggcgagagatgcccctacatccacgaccccgagaaggtggccgtgtgcaccagattcgtgagaggcacctgcaagaagaccgacggcacctgccccttcagccaccacgtgagcaaggagaagatgcccgtgtgcagctacttcctgaagggcatctgcagcaacagcaactgcccctacagccacgtgtacgtgagcagaaaggccgaggtgtgcagcgacttcctgaagggctactgccccctgggcgccaagtgcaagaagaagcacaccctgctgtgccccgacttcgccagaagaggcgcctgccccagaggcgcccagtgccagctgctgcacagaacccagaagagacacagcagaagagccgccaccagccccgcccccggccccagcgacgccaccgccagaagcagagtgagcgccagccacggccccagaaagcccagcgccagccagagacccaccagacagacccccagcagcgccgccctgaccgccgccgccgtggccgcccccccccactgccccggcggcagcgccagccccagcagcagcaaggccagcagcagcagcagcagcagcagcagcccccccgccagcctggaccacgaggcccccagcctgcaggaggccgccctggccgccgcctgcagcaacagactgtgcaagctgcccagcttcatcagcctgcagagcagccccagccccggcgcccagcccagagtgagagcccccagagcccccctgaccaaggacagcggcaagcccctgcacatcaagcccagactgtag

SEQ ID NO: 184514 - DNA, 2847 bp, Artificial Sequence
  derived and/or modified sequence
atggaagagaaagagatcttgcgcagacagataaggctgttacaaggtctgatcgacgactataaaacattgcatggcaatgctcccgcccccggaactccagcagccagcggctggcagccacccacataccactctggtcgggcgttctccgctcggtacccaaggccgagccggagggggtactctagtcaccatggcccgagctggcggaagaaatacagtctggtcaatcgtccgcctggaccttctgacccacccgcggatcacgcggtcagacctctgcacggcgcaagggggggtcagccacctgtgcctcaacaacatgtgttagaacggcaggtccagctgtcacaaggccagaacgttgtgattaaggtaaaacccccaagtaaatccggctccgcttctgcttctggcgcacagagaggtagtctagaggaatttgaggaaacgccttggtcagatcagagaccacgcgaaggagagggagagccgcctcggggtcagctccaaccaagtaggcccactcgggccagaggcacatgtagcgtggaagacccactcctggtgtgtcagaaggagcccggaaagccacgtatggtgaaatccgtcgggagcgtgggcgactcaccaagggagcctcgacgcacagtgtcagaatcagtgattgcagttaaagctagcttcccgtcctcggccttgccacccagaactggcgtggcccttggcagaaagctgggctctcattctgtcgcctcatgtgccccccaactcctgggtgatagacgtgttgacgccgggcataccgatcagccagttccttcaggttctgttggcgggcctgcccgccctgcatctggcccgcggcaggcaagggaggccagcctcgtggttacctgtcgaaccaacaaatttcggaagaacaactataagtgggtggccgcctctagcaagagcccaagagtagccagaagggctctgagcccacgggtggctgcggagaatgtgtgtaaagcttctgccggcatggcgaataaggtggagaaaccccagctgatcgctgatcctgagccaaaaccgcgcaaacccgcaacatcatctaaaccaggctccgcccctagcaagtacaaatggaaagcctcgagtcctagcgcttcatcatctagctcctttagatggcagtcagaagcttcctctaaagaccacgcgtctcaactgtcacctgtgctgagcaggtccccttctggggacaggcccgcagtgggccattccggtctgaagcctttgtctggcgaaacccctctgtctgcttacaaggtgaagtcgagaactaagatcatcaggagaaggtcatctaccagcttgccaggcgacaaaaaatcaggtacttctccagccgcaacagcgaagagccacctttcactcagaaggagacaggccctgcgcggcaagagctccccagttctgaaaaagacccccaacaaagggctcgtccaagtgacaacgcatcgcctctgtagactgccaccctcccgcgctcatctgcccactaaggaagcctccagcctgcatgcggttcggaccgcccctacctctaaggtgattaaaactcgctatcggatcgttaagaagacgccagcctcccccctgtcggcaccgcctttcccgctgtctcttccatcctggagggcgcgtcggttgagtctgtctcggtccctggtgctgaatagattaaggcccgttgccagtggcggcggcaaggcccagccaggcagcccgtggtggcgaagcaagggctacagatgcatcgggggtgtgctttataaagtctccgccaataagctgtccaaaactagtggacagcctagcgatgccggaagcaggccactgttgaggaccggcagattagaccccgccggatcctgcagcagatccttagccagccgagccgtccaacggagcctggccataattaggcaagctcgccagcgccgggagaagcgcaaggaatactgtatgtactataacagatttgggaggtgtaacaggggtgagcggtgtccttatattcacgacccggaaaaggttgccgtgtgtactcggtttgtgagggggacctgcaagaagactgacggcacctgccccttctcgcaccacgtcagtaaagaaaagatgcccgtttgtagctacttcctgaaaggcatatgttcaaattccaattgcccttattcacacgtgtatgtgagcagaaaggctgaggtctgctccgacttccttaagggctattgcccactcggcgccaagtgtaaaaaaaaacacactctcttgtgtcctgatttcgcgagacggggggcctgcccccgtggtgcccagtgccaattactgcacagaacacaaaaacgacattctcgccgcgccgccacgtctcctgcgccagggccttccgacgcaaccgcccggagccgcgtcagtgctagccatggccccaggaagccgagtgcctcccagcgccccacccgtcagactccgagcagtgctgctctcaccgccgccgccgtggcagccccgccacactgtcctggcggcagcgcctcaccaagctcttccaaagcctcctcttcatctagcagctcctcctcaccaccagcttccctggaccacgaggctccctccctgcaggaggcggctctggcagcagcttgcagtaatagactgtgcaagctgccaagcttcatttctctgcagtcctcccccagtcctggcgcgcagcccagggtacgcgcaccacgggctccactgacaaaggattccggaaaacccctgcacataaaacccaggttgtag

SEQ ID NO: 184515 - DNA, 2847 bp, Artificial Sequence
  derived and/or modified sequence
atggaggagaaggagatcctgcggcggcagatccggctgctgcagggcctgattgatgactacaagaccctgcatggaaatgccccagcccctggcaccccagctgccagcggctggcagccccccacctaccacagcggccgggccttcagcgcccgctacccccggcccagcagaagaggctacagcagccaccacggccccagctggaggaagaagtacagcctggtgaaccggcccccaggccccagcgaccccccagctgaccatgctgtgcggcccctgcacggggcccggggcggccagccccctgtgccccagcagcacgtgctggagcggcaggtgcagctgagccagggccagaatgtggtgatcaaggtgaagccacccagcaagagcggcagcgccagcgccagcggggcccagaggggcagcctggaggagtttgaggagaccccctggagcgaccagaggccccgggagggggagggggagcccccccggggccagctgcagcccagccggcccacccgggcccggggcacctgcagcgtggaggaccccctgctggtgtgccagaaggagcccgggaagcccaggatggtgaagtctgtgggctctgtgggggacagcccccgggagcccaggagaacagtgtctgagagcgtgattgctgtgaaggccagcttccccagcagcgccctgccccccaggactggagtggccctgggcaggaagctgggcagccacagcgtggccagctgtgccccccagctgctgggggacagaagagtggatgctggccacacagaccagcctgtgcccagcggctctgtgggcggccctgcccggcctgccagcggcccccggcaggcccgggaggccagcctggtggtgacctgcaggaccaacaagttcaggaagaacaactacaagtgggtggccgccagcagcaagagcccccgggtggcccggcgggccctgagcccccgggtggccgcagaaaatgtgtgcaaggccagcgctggcatggccaacaaggtggagaagccccagctgattgctgaccctgagcccaagcccaggaagccagccaccagcagcaagccaggcagcgcccccagcaagtacaagtggaaggccagcagccccagcgccagcagcagcagcagcttccgctggcagagcgaggccagcagcaaggaccacgccagccagctgagccctgtgctgagccgcagccccagcggggacaggcctgctgtgggccacagcggcctgaagcccctgtctggagagacccccctgagcgcctacaaggtgaagagcaggaccaagatcatcagaagaagaagcagcaccagcctgcccggggacaagaagagcggcaccagccctgctgccacagccaagagccacctgagcctgcggcggcggcaggccctgcggggcaagagcagccctgtgctgaagaagacccccaacaagggcctggtgcaggtgaccacccaccggctgtgccgcctgccccccagccgggcccacctgcccaccaaggaggccagcagcctgcatgctgtgaggacagcccccaccagcaaggtgatcaagacccgctaccgcatcgtgaagaagaccccagccagccccctgagcgccccacccttccccctgagcctgcccagctggagggcccggcggctgagcctgagccgcagcctggtgctgaaccggctgcggcctgtggccagcggcggcggcaaggcccagcccggcagcccctggtggaggagcaagggctaccgctgcatcggcggcgtgctgtacaaggtgtctgccaacaagctgagcaagaccagcggccagcccagtgatgctggcagccggcccctgctgaggacaggccgcctggaccctgctggcagctgcagccgcagcctggccagcagagctgtgcagaggagcctggccatcatccggcaggcccggcagaggcgggagaagaggaaggagtactgcatgtactacaacagatttggccgctgcaacagaggagagcgctgcccctacatccatgaccctgagaaggtggccgtgtgcaccaggtttgtgcggggcacctgcaagaagacagatggcacctgccccttcagccaccacgtgtccaaggagaagatgcctgtgtgcagctacttcctgaagggcatctgcagcaacagcaactgcccctacagccacgtgtatgtgtccaggaaggccgaggtgtgcagcgacttcctgaagggctactgccccctgggcgccaagtgcaagaagaagcacaccctgctgtgcccagactttgccaggagaggagcctgccccaggggggcccagtgccagctgctgcacaggacccagaagaggcacagcagaagagctgccaccagccctgcccctggccccagtgatgccacagcccggagccgggtgtctgccagccacggccccaggaagcccagcgccagccagaggcccacccggcagacccccagcagcgctgccctgacagctgctgctgtggccgccccaccccactgccctgggggcagcgccagccccagcagcagcaaggccagcagcagcagcagcagcagcagcagccccccagccagcctggaccacgaggcccccagcctgcaggaggccgccctggccgccgcctgcagcaaccggctgtgcaagctgcccagcttcatcagcctgcagagcagccccagccctggggcccagccccgggtgcgggccccccgggcccccctgaccaaggacagcggcaagcccctgcacatcaagccccggctgtag

SEQ ID NO: 184516 - DNA, 2847 bp, Artificial Sequence
  derived and/or modified sequence
atggaggagaaggagatcctgcggcggcagatccggctgctgcagggactgatcgacgactataaaaccctgcacggtaatgccccagccccaggtactcccgctgccagtggatggcagcctcccacgtatcacagtggcagggcgttttcagcccggtatccgcgcccaagcaggagaggttatagttctcatcacggccccagctggaggaaaaagtactctctagtcaatagaccaccgggaccatctgatccaccagcagaccatgcagtgcgacccctgcatggagctagagggggtcagccaccggtccctcagcagcacgtcctagaacgacaggtacaactgagccaaggtcagaatgtggtgatcaaggtgaagccaccatctaaatcgggctcggcatctgcaagtggggcacaaaggggaagcctcgaagagttcgaggaaacgccttggtccgaccagcgccctcgcgagggcgagggcgagcctcccaggggtcagctgcagccctctcggccaactcgggctagggggacatgttccgtcgaggacccactgctggtgtgccagaaggaacccgggaagcctaggatggtcaaatcagtcggctccgtgggggacagtccccgggagccccgaaggacagtgtccgaatccgtcatagccgtgaaggcctcttttccttcatctgcactgccccctagaacaggagtggcgctcggcaggaagttaggctcccactcagtggcatcatgtgcaccccagctgttgggcgaccggagagtggatgcgggccatacagaccagccagtgccaagtggatctgtgggaggcccagcgcgtcccgcctctggaccaagacaagctagggaggcctccctggtggtcacctgccgtacaaataaatttcgcaagaacaactacaagtgggttgccgcgtccagcaagtctcccagagtcgcccgcagggcattatcaccacgggtggctgcagaaaacgtatgcaaagccagtgccgggatggccaataaagtggagaaacctcagctgattgccgacccggaacccaagcctcgtaaaccggccacctcgtctaagcccggatccgcaccttccaagtacaagtggaaggcctcatctcctagcgcatcttcctcatccagctttcgctggcagagtgaagcctcatctaaggaccacgcctcacagctctcccctgtgctctcgaggtcccccagtggagatagaccggcagtcggccatagcggattgaaacccttaagcggtgaaactcctttgtcagcctataaggtcaagtctagaaccaagattattcgacgccgatccagtactagcctgcccggcgataagaagtccggcaccagcccggccgctacagctaaaagtcacctgtctctaaggaggagacaggcattacggggcaaaagtagccctgtcctgaaaaaaacacctaataaagggctcgtccaggtgaccacacacaggctctgcagactgccaccttccagagcccatctgccaacaaaagaggcctcttccctacacgcggtacggacagcccccacatcaaaagtaatcaagactagatatagaatagtgaaaaagacacctgcgtctccgcttagcgctcccccattcccactctccttgccaagctggagagcccggcggctgtcattaagtcggtcattggtgctgaacagactacggcccgtcgccagcggcggcgggaaggcacagccgggctccccctggtggagatctaagggctacaggtgcattggaggtgtgctgtacaaagtgagtgcgaataaactgagtaaaactagcggtcagcccagcgacgcagggtccaggcctctgttgagaacggggagattggaccctgctgggtcttgtagccggtctcttgcgtcaagagcagtgcagcgctccttagccattattcgccaggctcgtcagaggcgagagaaacgcaaagaatactgtatgtactataaccgattcggacgctgtaaccggggcgaacggtgcccatacatccatgaccccgagaaggttgcagtctgtacccgctttgttaggggaacatgtaagaaaacagatgggacttgccccttttcacatcacgtctctaaggagaagatgcctgtctgttcctatttcctcaaggggatttgcagtaatagtaattgcccatacagtcacgtctacgtgtctcgaaaggcagaggtgtgtagcgacttcctcaagggctactgcccgctcggggctaagtgtaagaaaaagcatacgctgctgtgccctgacttcgccaggcgcggagcttgtccccgcggagcacagtgccagttactgcaccgaactcaaaaacggcattccagaagggctgctacttctccggcacctggtccctcggatgctacggcaaggtctagagtgtccgcatcccacggcccccgaaagccgagtgcttctcagaggcctaccagacagacacccagctctgccgcccttaccgctgctgccgtggctgccccgccacactgtccgggaggtagtgccagcccttccagttctaaggcgagttcttcttcctcatcctcctcgtcgccacctgcgtctcttgaccatgaggctccaagcctccaggaggccgccctggctgccgcttgtagcaacagactttgcaagcttcctagtttcatatccctgcagagcagcccgtcccccggggcacagcctagagtgagggctccgcgcgctccactaactaaagatagtggcaagcccttgcacatcaaacccagactatag

SEQ ID NO: 184517 - DNA, 2847 bp, Artificial Sequence
  derived and/or modified sequence
atggaggagaaagagattttacgccgtcagatccgcctcctccaaggactaatcgacgattacaaaactctgcacgggaacgcccctgctcctggtacaccagctgccagtggttggcaaccccctacatatcattcaggtagagcctttagcgcacggtacccaagaccctcacgacgcggttactcttcgcatcatgggccatcatggcggaagaagtacagtttagtaaaccgtcctcctggcccttccgatcccccagccgaccacgcagtgcggcctctgcacggcgcacggggaggacagccccctgtcccacagcagcacgtgctggaacgccaagtgcagctgagccagggacagaatgtggtgatcaaagtgaagcctcctagcaagagcggtagcgcaagcgcgtcaggtgcccagaggggatcattagaggagtttgaggagacaccttggagcgatcaacggccacgcgaaggggaaggggagccacctcgcggtcagctgcaaccctctagacccacaagggcacggggaacgtgctcagttgaggaccctctgctggtgtgccagaaggagccgggtaaaccccgaatggtgaagtccgtggggtccgtgggggactcccccagagaaccaagaaggaccgtcagtgagtctgtcatagctgtgaaagcaagttttccttccagcgctctgcctcccaggactggagttgcactcgggagaaagttgggatcacattcagtcgcttcttgcgctccacagttgctgggagatcgtagggtggacgccggtcacaccgatcagcctgtcccctctgggtccgttggcggtcccgcaaggccagcaagcgggccacggcaggccagggaggcctcacttgtagtgacatgtagaactaataagttccgaaaaaacaactataagtgggtggctgccagctcaaagtcacctagggtcgccagacgcgcactgtcccccagagtggcggctgagaacgtctgtaaggcttccgccggtatggctaataaggtggaaaagccacaactgattgcagatccggaacccaaaccacggaagccagctacctccagcaaacccggtagcgcgcctagtaagtacaaatggaaagctagcagtccctctgcatctagcagctcctccttccggtggcagtccgaggcgagttctaaagaccatgcttcccaattaagccctgtgctatcaagaagtccatctggcgatagaccggcagttgggcacagcggtttgaagccactatccggcgagactcctctctccgcctacaaggtgaaaagtagaacaaaaatcatccgacgaaggtccagcactagtcttcctggggacaaaaagagtggtacatcacccgcagccaccgctaagagccacctgtccctgaggcgcaggcaggcattacgaggaaagtctagtcccgtactcaagaaaacccccaacaagggcctggtgcaggtcaccacgcaccgactgtgcaggctgccaccaagccgggctcacttgccgacaaaagaggcttcaagtctgcatgcagtccgcacggcgcctacaagcaaggtgatcaagacacgctaccggattgtcaagaagacgcctgcctcgcctctaagcgctcctccctttccactctccctgccctcatggcgcgctaggcggcttagcttgtccagatcactggttctcaaccgactgagacctgtggcctcgggtggtggcaaggctcagcccggttcgccgtggtggcgatccaaaggctacagatgtattggtggtgtcttgtataaagtatccgctaataaactgtcaaagacctctggacagccttcagacgccggaagtcgtccactgctccggaccgggagactggatcctgccggaagttgttcgcgctctctagcatccagggcagtgcagcggtccctggcaatcataagacaggctagacagcgcagggaaaagagaaaggagtactgtatgtattataaccggtttggcaggtgtaacagaggggagcggtgcccttacatacacgatcccgaaaaggttgctgtgtgcacaaggtttgtgaggggtacatgtaagaaaacggacggcacctgtccgttttctcaccacgtcagcaaggaaaagatgccagtgtgctcctattttctgaagggtatctgcagtaactcaaattgtccttatagtcacgtgtatgtgagcagaaaggccgaagtgtgttctgactttctaaaaggctactgtcctctgggcgcaaaatgcaagaagaagcatacactgctctgtcccgattttgctcggagaggtgcctgccccagaggggcacagtgccagttgctgcataggacgcagaagcgccatagcagaagagccgcaacttcacctgccccaggcccttctgatgccactgcacgctccagagtatctgccagccatggaccaaggaagccctcagcttcgcagaggcccaccagacagactccctcatcagccgctctgaccgccgcagcggttgcggctccccctcactgccctggcggaagtgccagcccaagctcctctaaagcaagttccagttcttcctcctctagttcccccccagcttctcttgatcacgaggccccttcattacaggaagccgctctggctgcagcctgctctaataggctctgtaaactgccaagtttcattagcctgcagtctagcccctcaccaggcgctcagcccagagtgcgcgcaccgcgtgccccactcaccaaggattccggaaagccgctgcacatcaaaccgcgattgtag

SEQ ID NO: 184518 - protein, 4167 aa, Artificial Sequence
  derived and/or modified sequence
MEPEDLPWPGELEEEEEEEEEEEEEEEEAAAAAAANVDDVVVVEEVEEEAGRELDSDSHYGPQHLESIDDEEDEEAKAWLQAHPGRILPPLSPPQHRYSEGERTSLEKIVPLTCHVWQQIVYQGNSRTQISDTNVVCLETTAQRGSGDDQKTESWHCLPQEMDSSQTLDTSQTRFNVRTEDTEVTDFPSLEEGILTQSENQVKEPNRDLFCSPLLVIQDSFASPDLPLLTCLTQDQEFAPDSLFHQSELSFAPLRGIPDKSEDTEWSSRPSEVSEALFQATAEVASDLASSRFSVSQHPLIGSTAVGSQCPFLPSEQGNNEETISSVDELKIPKDCDRYDDLCSYMSWKTRKDTQWPENNLADKDQVSVATSFDITDENIATKRSDHFDAARSYGQYWTQEDSSKQAETYLTKGLQGKVESDVITLDGLNENAVVCSERVAELQRKPTRESEYHSSDLRMLRMSPDTVPKAPKHLKAGDTSKGGIAKVTQSNLKSGITTTPVDSDIGSHLSLSLEDLSQLAVSSLETTTGQHTDTLNQKTLADTHLTEETLKVTAIPEPADQKTATPTVLSSSHSHRGKPSIFYQQGLPDSHLTEEALKVSAAPGLADQTTGMSTLTSTSYSHREKPGTFYQQELPESNLTEEPLEVSAAPGPVEQKTGIPTVSSTSHSHVEDLLFFYRQTLPDGHLTDQALKVSAVSGPADQKTGTATVLSTPHSHREKPGIFYQQEFADSHQTEETLTKVSATPGPADQKTEIPAVQSSSYSQREKPSILYPQDLADSHLPEEGLKVSAVAGPADQKTGLPTVPSSAYSHREKLLVFYQQALLDSHLPEEALKVSAVSGPADGKTGTPAVTSTSSASSSLGEKPSAFYQQTLPNSHLTEEALKVSIVPGPGDQKTGIPSAPSSFYSHREKPIIFSQQTLPDFLFPEEALKVSAVSVLAAQKTGTPTVSSNSHSHSEKSSVFYQQELPDSDLPRESLKMSAIPGLTDQKTVPTPTVPSGSFSHREKPSIFYQQEWPDSYATEKALKVSTGPGPADQKTEIPAVQSSSYPQREKPSVLYPQVLSDSHLPEESLKVSAFPGPADQMTDTPAVPSTFYSQREKPGIFYQQTLPESHLPKEALKISVAPGLADQKTGTPTVTSTSYSQHREKPSIFHQQALPGTHIPEEAQKVSAVTGPGNQKTWIPRVLSTFYSQREKPGIFYQQTLPGSHIPEEAQKVSPVLGPADQKTGTPTPTSASYSHTEKPGIFYQQVLPDNHPTEEALKISVASEPVDQTTGTPAVTSTSYSQYREKPSIFYQQSLPSSHLTEEAKNVSAVPGPADQKTVIPILPSTFYSHTEKPGVFYQQVLPHSHPTEEALKISVASEPVDQTTGTPTVTSTSYSQHTEKPSIFYQQSLPGSHLTEEAKNVSAVPGPGDRKTGIPTLPSTFYSHTEKPGSFYQQVLPHSHLPEEALEVSVAPGPVDQTIGTPTVTSPSSSFGEKPIVIYKQAFPEGHLPEESLKVSVAPGPVGQTTGAPTITSPSYSQHRAKSGSFYQLALLGSQIPEEALRVSSAPGPADQTTGIPTITSTSYSFGEKPIVNYKQAFPDGHLPEEALKVSIVSGPTEKKTDIPAGPLGSSALGEKPITFYRQALLDSPLNKEVVKVSAAPGPADQKTETLPVHSTSYSNRGKPVIFYQQTLSDSHLPEEALKVPPVPGPDAQKTETPSVSSSLYSYREKPIVFYQQALPDSELTQEALKVSAVPQPADQKTGLSTVTSSFYSHTEKPNISYQQELPDSHLTEEALKVSNVPGPADQKTGVSTVTSTSYSHREKPIVSYQRELPHFTEAGLKILRVPGPADQKTGINILPSNSYPQREHSVISYEQELPDLTEVTLKAIGVPGPADQKTGIQIASSSSYSNREKASIFHQQELPDVTEEALNVFVVPGQGDRKTEIPTVPLSYYSRREKPSVISQQELPDSHLTEEALKVSPVSIPAEQKTGIPIGLSSSYSHSHKEKLKISTVHIPDDQKTEFPAATLSSYSQIEKPKISTVIGPNDQKTPSQTAFHSSYSQTVKPNILFQQQLPDRDQSKGILKISAVPELTDVNTGKPVSLSSSYFHREKSNIFSPQELPGSHVTEDVLKVSTIPGPAGQKTVLPTALPSSFSHREKPDIFYQKDLPDRHLTEDALKISSALGQADQITGLQTVPSGTYSHGENHKLVSEHVQRLIDNLNSSDSSVSSNNVLLNSQADDRVVINKPESAGFRDVGSEEIQDAENSAKTLKEIRTLLMEAENMALKRCNFPAPLARFRDISDISFIQSKKVVCFKEPSSTGVSNGDLLHRQPFTEESPSSRCIQKDIGTQTNLKCRRGIENWEFISSTTVRSPLQEAESKVSMALEETLRQYQAAKSVMRSEPEGCSGTIGNKIIIPMMTVIKSDSSSDASDGNGSCSWDSNLPESLESVSDVLLNFFPYVSPKTSITDSREEEGVSESEDGGGSSVDSLAAHVKNLLQCESSLNHAKEILRNAEEEESRVRAHAWNMKFNLAHDCGYSISELNEDDRRKVEEIKAELFGHGRTTDLSKGLQSPRGMGCKPEAVCSHIIIESHEKGCFRTLTSEHPQLDRHPCAFRSAGPSEMTRGRQNPSSCRAKHVNLSASLDQNNSHFKVWNSLQLKSHSPFQNFIPDEFKISKGLRMPFDEKMDPWLSELVEPAFVPPKEVDFHSSSQMPSPEPMKKFTTSITFSSHRHSKCISNSSVVKVGVTEGSQCTGASVGVFNSHFTEEQNPPRDLKQKTSSPSSFKMHSNSQDKEVTILAEGRRQSQKLPVDFERSFQEEKPLERSDFTGSHSEPSTRANCSNFKEIQISDNHTLISMGRPSSTLGVNRSSSRLGVKEKNVTITPDLPSCIFLEQRELFEQSKAPRADDHVRKHHSPSPQHQDYVAPDLPSCIFLEQRELFEQCKAPYVDHQMRENHSPLPQGQDSIASDLPSPISLEQCQSKAPGVDDQMNKHHFPLPQGQDCVVEKNNQHKPKSHISNINVEAKFNTVVSQSAPNHCTLAASASTPPSNRKALSCVHITLCPKTSSKLDSGTLDERFHSLDAASKARMNSEFNFDLHTVSSRSLEPTSKLLTSKPVAQDQESLGFLGPKSSLDFQVVQPSLPDSNTITQDLKTIPSQNSQIVTSRQIQVNISDFEGHSNPEGTPVFADRLPEKMKTPLSAFSEKLSSDAVTQITTESPEKTLFSSEIFINAEDRGHEIIEPGNQKLRKAPVKFASSSSVQQVTFSRGTDGQPLLLPYKPSGSTKMYYVPQLRQIPPSPDSKSDTTVESSHSGSNDAIAPDFPAQVLGTRDDDLSATVNIKHKEGIYSKRVVTKASLPVGEKPLQNENADASVQVLITGDENLSDKKQQEIHSTRAVTEAAQAKEKESLQKDTADSSAAAAAEHSAQVGDPEMKNLPDTKAITQKEEIHRKKTVPEEAWPNNKESLQINIEESECHSEFENTTRSVFRSAKFYIHHPVHLPSDQDICHESLGKSVFMRHSWKDFFQHHPDKHREHMCLPLPYQNMDKTKTDYTRIKSLSINVNLGNKEVMDTTKSQVRDYPKHNGQISDPQRDQKVTPEQTTQHTVSLNELWNKYRERQRQQRQPELGDRKELSLVDRLDRLAKILQNPITHSLQVSESTHDDSRGERSVKEWSGRQQQRNKLQKKKRFKSLEKSHKNTGELKKSKVLSHHRAGRSNQIKIEQIKFDKYILSKQPGFNYISNTSSDCRPSEESELLTDTTTNILSGTTSTVESDILTQTDREVALHERSSSVSTIDTARLIQAFGHERVCLSPRRIKLYSSITNQQRRYLEKRSKHSKKVLNTGHPLVTSEHTRRRHIQVANHVISSDSISSSASSFLSSNSTFCNKQNVHMLNKGIQAGNLEIVNGAKKHTRDVGITFPTPSSSEAKLEENSDVTSWSEEKREEKMLFTGYPEDRKLKKNKKNSHEGVSWFVPVENVESRSKKENVPNTCGPGISWFEPITKTRPWREPLREQNCQGQHLDGRGYLAGPGREAGRDLLRPFVRATLQESLQFHRPDFISRSGERIKRLKLIVQERKLQSMLQTERDALFNIDRERQGHQNRMCPLPKRVFLAIQKNKPISKKEMIQRSKRIYEQLPEVQKKREEEKRKSEYKSYRLRAQLYKKRVTNQLLGRKVPWD

SEQ ID NO: 184519 - protein, 2561 aa, Artificial Sequence
  derived and/or modified sequence
MEPEDLPWPGELEEEEEEEEEEEEEEEEAAAAAAANVDDVVVVEEVEEEAGRELDSDSHYGPQHLESIDDEEDEEAKAWLQAHPGRILPPLSPPQHRYSEGERTSLEKIVPLTCHVWQQIVYQGNSRTQISDTNVVCLETTAQRGSGDDQKTESWHCLPQEMDSSQTLDTSQTRFNVRTEDTEVTDFPSLEEGILTQSENQVKEPNRDLFCSPLLVIQDSFASPDLPLLTCLTQDQEFAPDSLFHQSELSFAPLRGIPDKSEDTEWSSRPSEVSEALFQATAEVASDLASSRFSVSQHPLIGSTAVGSQCPFLPSEQGNNEETISSVDELKIPKDCDRYDDLCSYMSWKTRKDTQWPENNLADKDQVSVATSFDITDENIATKRSDHFDAARSYGQYWTQEDSSKQAETYLTKGLQGKVESDVITLDGLNENAVVCSERVAELQRKPTRESEYHSSDLRMLRMSPDTVPKAPKHLKAGDTSKGGIAKVTQSNLKSGITTTPVDSDIGSHLSLSLEDLSQLAVSSLETTTGQHTDTLNQKTLADTHLTEETLKVTAIPEPADQKTATPTVLSSSHSHRGKPSIFYQQGLPDSHLTEEALKVSAAPGLADQTTGMSTLTSTSYSHREKPGTFYQQELPESNLTEEPLEVSAAPGPVEQKTGIPTVSSTSHSHVEDLLFFYRQTLPDGHLTDQALKVSAVSGPADQKTGTATVLSTPHSHREKPGIFYQQEFADSHQTEETLTKVSATPGPADQKTEIPAVQSSSYSQREKPSILYPQDLADSHLPEEGLKVSAVAGPADQKTGLPTVPSSAYSHREKLLVFYQQALLDSHLPEEALKVSAVSGPADGKTGTPAVTSTSSASSSLGEKPSAFYQQTLPNSHLTEEALKVSIVPGPGDQKTGIPSAPSSFYSHREKPIIFSQQTLPDFLFPEEALKVSAVSVLAAQKTGTPTVSSNSHSHSEKSSVFYQQELPDSDLPRESLKMSAIPGLTDQKTVPTPTVPSGSFSHREKPSIFYQQEWPDSYATEKALKVSTGPGPADQKTEIPAVQSSSYPQREKPSVLYPQVLSDSHLPEESLKVSAFPGPADQMTDTPAVPSTFYSQREKPGIFYQQTLPESHLPKEALKISVAPGLADQKTGTPTVTSTSYSQHREKPSIFHQQALPGTHIPEEAQKVSAVTGPGNQKTWIPRVLSTFYSQREKPGIFYQQTLPGSHIPEEAQKVSPVLGPADQKTGTPTPTSASYSHTEKPGIFYQQVLPDNHPTEEALKISVASEPVDQTTGTPAVTSTSYSQYREKPSIFYQQSLPSSHLTEEAKNVSAVPGPADQKTVIPILPSTFYSHTEKPGVFYQQVLPHSHPTEEALKISVASEPVDQTTGTPTVTSTSYSQHTEKPSIFYQQSLPGSHLTEEAKNVSAVPGPGDRKTGIPTLPSTFYSHTEKPGSFYQQVLPHSHLPEEALEVSVAPGPVDQTIGTPTVTSPSSSFGEKPIVIYKQAFPEGHLPEESLKVSVAPGPVGQTTGAPTITSPSYSQHRAKSGSFYQLALLGSQIPEEALRVSSAPGPADQTTGIPTITSTSYSFGEKPIVNYKQAFPDGHLPEEALKVSIVSGPTEKKTDIPAGPLGSSALGEKPITFYRQALLDSPLNKEVVKVSAAPGPADQKTETLPVHSTSYSNRGKPVIFYQQTLSDSHLPEEALKVPPVPGPDAQKTETPSVSSSLYSYREKPIVFYQQALPDSELTQEALKVSAVPQPADQKTGLSTVTSSFYSHTEKPNISYQQELPDSHLTEEALKVSNVPGPADQKTGVSTVTSTSYSHREKPIVSYQRELPHFTEAGLKILRVPGPADQKTGINILPSNSYPQREHSVISYEQELPDLTEVTLKAIGVPGPADQKTGIQIASSSSYSNREKASIFHQQELPDVTEEALNVFVVPGQGDRKTEIPTVPLSYYSRREKPSVISQQELPDSHLTEEALKVSPVSIPAEQKTGIPIGLSSSYSHSHKEKLKISTVHIPDDQKTEFPAATLSSYSQIEKPKISTVIGPNDQKTPSQTAFHSSYSQTVKPNILFQQQLPDRDQSKGILKISAVPELTDVNTGKPVSLSSSYFHREKSNIFSPQELPGSHVTEDVLKVSTIPGPAGQKTVLPTALPSSFSHREKPDIFYQKDLPDRHLTEDALKISSALGQADQITGLQTVPSGTYSHGENHKLVSEHVQRLIDNLNSSDSSVSSNNVLLNSQADDRVVINKPESAGFRDVGSEEIQDAENSAKTLKEIRTLLMEAENMALKRCNFPAPLARFRDISDISFIQSKKVVCFKEPSSTGVSNGDLLHRQPFTEESPSSRCIQKDIGTQTNLKCRRGIENWEFISSTTVRSPLQEAESKVSMALEETLRQYQAAKSVMRSEPEGCSGTIGNKIIIPMMTVIKSDSSSDASDGNGSCSWDSNLPESLESVSDVLLNFFPYVSPKTSITDSREEEGVSESEDGGGSSVDSLAAHVKNLLQCESSLNHAKEILRNAEEEESRVRAHAWNMKFNLAHDCGYSISELNEDDRRKVEEIKAELFGHGRTTDLSKGLQS

SEQ ID NO: 184520 - DNA, 12504 bp, Artificial Sequence
  derived and/or modified sequence
atggagcccgaggatttgccatggcctggggaattggaagaggaggaggaggaagaagaagaagaggaggaagaagaagaggaagctgcagcagcagccgccgccaatgtcgatgacgtggtggtggtggaagaagtcgaggaggaagccggtcgtgaactggatagtgattcccactacggtccacaacaccttgagagcatcgatgatgaagaggacgaggaagctaaagcctggctacaggcacaccctggcagaatcttgccgccattaagcccaccacagcacaggtatagcgagggcgagcgcacttctctggaaaagattgtaccgctaacttgccacgtgtggcagcagattgtgtaccagggtaatagtaggacacagatttctgacacgaatgtggtctgtctcgagacgactgctcaacggggatccggagacgaccaaaagacagaatcgtggcactgcctaccccaggagatggatagttcacagacactcgatactagtcaaactcggtttaatgtccgaaccgaagacaccgaagtgacagacttcccaagcttagaggaaggtattctaacacagtcggagaatcaggtaaaggaacctaacagggatctgttttgctccccgttactggtcattcaggattcttttgcctctcccgacctgcctctgttgacctgcttaacacaagatcaagagttcgcccccgacagcctgtttcatcagagcgagctctccttcgccccccttcgcgggatacccgataaaagcgaagataccgagtggagcagtcgcccaagtgaagtgagcgaggcgctgtttcaggccacagcagaggtcgcctctgatcttgcatccagtagatttagcgtctctcagcatccactcattggctcgacagccgtcggatctcagtgcccttttctcccttctgaacaggggaacaacgaagaaacaatctcctcagttgacgagctcaagatccctaaagactgcgaccgatacgatgacctatgctcctacatgtcatggaagacaagaaaggacacccagtggcctgagaacaatttagctgacaaggatcaggtcagtgtggcgacctcttttgacatcaccgacgaaaatattgctaccaaaagaagcgaccactttgacgccgctagaagttacgggcagtattggactcaggaagattcaagcaaacaggcagaaacatatcttacaaaaggactgcagggcaaggtggaatcagacgtgattaccctcgacggcctaaatgagaacgccgtggtttgcagcgaacgcgtggcagaactccagaggaaaccgactcgcgagagcgaatatcattcctctgatctgcggatgctgcggatgtctcccgacaccgtccccaaggccccaaagcacctgaaagctggagatacctccaaaggcgggatagccaaagtaactcaatcaaatctaaagagcgggattacaacgacacccgttgatagcgacatcgggtcacacctgagtctctccctggaggatctttcccagctggccgtctctagtctggaaaccacaaccggccagcacacagatacactcaaccagaagacattagctgacacccacctgaccgaagagactctcaaggttacggctattccagagccggcagaccagaaaaccgccactcctaccgtgctcagctcttctcacagtcacagaggcaaaccatctatcttctaccagcaagggttgccagatagccacctcactgaggaagcactcaaagtgtccgcagcgccgggtttggccgaccagactaccggtatgagtactttgacttcaacatcatattctcaccgcgagaaaccagggaccttctaccagcaggagctgcccgaatcgaatctgacggaagaaccattagaggtttctgccgcccccggccctgttgaacagaaaaccggaatccctaccgtttcaagtacctctcactcacatgtcgaggatctgttgttcttctatcgccagaccctgcccgacggtcatctcactgatcaggcccttaaagtgtcagccgtctccggccctgccgatcaaaaaacgggcaccgccactgtgttatccaccccgcactcccacagggagaagccaggcatattctatcagcaagaatttgcagactcacatcagacagaagagacactgacaaaggtgtctgcgacaccgggccctgctgatcagaagactgaaatcccagctgttcaaagttccagctattcacagagggagaagccttctattctatatccccaggatctggccgattctcacttgcctgaggaaggcctgaaggtctctgcagtcgccggtcctgccgaccagaagaccgggctgcccacggtgccaagttccgcctattcacatcgagagaaacttcttgtcttttatcagcaggccttgctggactctcatctccccgaagaagccctgaaagtgtctgcggtgagcgggcctgcagatggcaagaccgggacccctgccgtcacatcgacctcctcagcatcaagtagcctcggcgagaaacctagtgcattttaccagcagacgttgcctaatagccatctgaccgaagaggctttgaaggtttccatcgtgcctggacctggcgatcagaaaacagggattccttctgcaccatcttccttctactcacaccgggaaaaacccatcattttcagccagcagactttaccagatttcttgttccctgaggaggcgctgaaggtatccgccgtgtcagtgttggctgcccagaagacaggcacacctacagtatctagtaattcacattcgcactcggagaagagtagcgtattttaccagcaagaattgccagattccgatcttcctagagaatccctcaagatgtccgccattcccggtcttactgatcagaagaccgtaccgacaccaacagtcccgagtggatctttcagtcatagagaaaagccctctattttttatcaacaagagtggccggactcctacgcgacagagaaggctttaaaggtatctacaggaccgggaccagcggatcagaaaaccgagattcccgccgtgcagtcatcttcataccctcaacgcgaaaagccttccgttttatacccccaagtcctctctgacagccacctccccgaagaaagcctgaaagttagtgcctttcccggacccgccgatcagatgaccgatacccccgctgtgccttccaccttctacagccagcgtgagaaaccaggtattttttatcaacagaccctgccagagtcgcacctgcctaaggaggcccttaagatctcagttgctcctggactggccgatcagaagaccggcacacctactgttaccagtacgtcgtacagccagcatcgagagaaaccttctatttttcaccagcaggcactgccaggcacgcatatacccgaggaggcacaaaaagtttccgccgtgaccggtcccggaaatcagaagacatggatccctagagtattgtcaaccttctacagtcagcgcgagaaacccggtatcttctaccaacagacactgcctggaagtcatattcctgaggaggcccagaaagtctcacccgtgctgggacccgcggaccagaagacaggcaccccaacacctacgtctgcttcttattcacacacggagaaacctggaattttttaccagcaagtcctcccagataaccatcccactgaagaagctcttaagatcagtgtagcaagcgagcctgtggaccagactacaggtacacccgcagtgacatcaacctcttattcacaatatagagaaaaacccagcatcttttatcagcaaagcttgccctcatcgcatctgacggaggaggcgaagaatgtgtctgccgttccaggccccgccgatcagaaaacagtgattcccattttgccgtccaccttttactcccatacagagaaaccaggagtcttttaccagcaagtgctgccacactcacatcctacagaggaagctctcaagatcagcgtcgcctccgagcccgttgatcaaacaacaggcaccccaaccgtcactagcactagctattcacagcatacagaaaagccctcaatcttctatcagcagtccctgcctggttcccatttgacagaagaagcaaaaaacgtgagtgcagtccctgggcccggagaccggaagacagggatccctaccctgccctccacgttctacagtcacactgaaaagcctgggagcttttaccaacaagtattaccacattcgcacttgccagaagaagcactggaagttagtgtggcacctgggccagttgaccaaaccattggaactcccaccgtgacctcgcccagttcaagctttggtgagaagcccatcgtgatctacaaacaggccttccctgaggggcatctgcctgaggaaagcttgaaggtttcagttgcacccgggcctgtcgggcagaccaccggggccccaaccattacctctcccagttactcacaacacagagctaaatctggttcattctatcaactggccttgctcggctctcaaattccagaagaggctctgagagtatcatccgcccctggtcctgccgatcagacaactggcattcccactatcacctccacttcctattcctttggagagaagccaatcgtgaactacaagcaggcttttcccgacggacacctccccgaggaagcactgaaagtgagtatcgtgtccgggcccaccgagaaaaaaacagacattcccgccggcccgttgggctcctctgcactcggagagaagcccattactttttataggcaagctttgcttgatagcccactcaataaagaagtggtcaaggtctctgccgcaccaggcccggccgaccagaaaacagaaacactccccgtgcacagtacctcctatagtaatagaggcaagcctgtgatcttctatcagcagactttgtcagattctcaccttccagaagaagcgctgaaagtccccccagttccagggcccgatgcccagaagaccgagacccccagtgtaagcagcagcctctatagttaccgggagaaacctatcgttttctaccagcaggccctgcctgattcagaactgactcaagaggcactgaaggtctctgcagtcccacaaccagccgaccaaaaaacgggcctttctacggtgacttcttctttctactcacatacggaaaaacccaacatctcttatcaacaggagctccctgactcacatttgaccgaagaggcccttaaagtgagcaacgtccccgggccagctgatcagaagaccggagtgtcaactgtcaccagtacgagttattctcatcgcgaaaagccaatcgtttcttatcagcgagaactgcctcacttcaccgaggccgggttaaagatcctgagagttccagggcccgccgaccaaaaaaccggaattaacatacttccatccaacagctaccctcaacgcgagcattctgtcatctcatatgaacaggagctgccggatctgacagaggtcaccctcaaggcaatcggcgtcccaggcccagcggatcagaagacaggcatccaaatagcctcatcaagctcatactccaatagggaaaaggcctccatctttcaccagcaggaactacccgatgtaacagaggaagccctgaatgtttttgtagtaccaggacagggagaccggaagacagagattccaacagtcccattgtcctattactccagacgggagaaaccgtctgtaatttcccaacaggagcttcccgactcgcatctgactgaagaggctctgaaggtgtctcctgtgtcgatccccgctgaacagaagaccggcatccccatcggcctcagttcatcttactctcatagccataaagagaagctgaagatttcaacagtgcacatccccgatgatcagaagacggaatttcccgcagccactctctctagctatagccagattgaaaaacctaaaatctcaacggtaatcggacctaatgatcaaaaaaccccatcacagaccgccttccattcatcctattcccagaccgttaaacctaatatcctgttccagcagcagctaccggaccgggatcagtccaagggtattctcaagatctctgccgtgccagaactgacagacgtaaacactggcaaaccagtgagtctgtctagttcctatttccacagggagaaaagtaacatctttagcccccaggagttaccaggctctcatgtgacagaggacgttctgaaggtcagtacgattcccgggcccgccggtcagaagaccgtgctgcccacagccctcccgtcctctttcagccatcgcgagaagcccgacattttttaccagaaggatctgcctgaccgccatctgacagaggacgcactgaagatatctagtgctctggggcaggctgaccaaatcacaggtctacagaccgttcctagcgggacgtattcacacggcgagaaccataaattggtcagcgaacacgttcagcgcttaattgacaatttaaactcttccgattcttcagttagctctaacaacgtgcttttgaactcacaagcagatgacagggtggtaattaacaagccagaaagcgccgggtttcgtgacgtcggctcagaggagattcaggacgccgaaaatagcgccaagactctgaaagagataagaaccctgctcatggaggccgagaatatggcacttaaaagatgtaactttcccgcccccctagccaggtttcgggatatcagcgacatctcattcatacaatcaaaaaaggtcgtttgcttcaaggaaccctcctccaccggagtgtccaacggtgatttactgcatagacagcctttcaccgaagaatcccccagtagtaggtgtattcagaaagatatcgggacccaaacgaaccttaaatgccgccgtggaatcgagaactgggaatttatcagttctaccactgtgagatcccctctgcaagaagccgaatccaaagtgtcaatggctctcgaggagacactgagacagtaccaggctgcaaagtcagtgatgagatccgaaccggagggatgctcaggaacgataggtaataagattattatccccatgatgaccgttattaagtcagattcaagctctgacgcaagtgatgggaatggctcctgctcatgggattcaaatctgcctgaatctttagaatccgtgtctgatgtgctgctgaacttttttccttacgtcagtccaaagacctcaataaccgactcccgggaggaggaaggggtgagcgagagtgaggacggaggcggcagttcagtggacagcctcgctgcccatgtgaagaacctgttgcagtgtgagagttcactcaaccacgccaaagaaattctgcgaaacgccgaagaggaggagagccgagtgcgcgcacatgcttggaatatgaagttcaacctggcccatgactgcggatacagcatctctgaacttaacgaggacgatagaaggaaggtggaggagataaaggcagagttgtttggacacgggaggacaacagacctaagtaaaggactgcaatctcctcgagggatggggtgtaagcccgaggccgtgtgttcacacataattattgaatctcacgagaaggggtgtttccgcaccctgacatcagaacatccacagctcgataggcacccatgcgcatttcggtccgctggtcctagtgaaatgacacgagggcgccaaaacccttcttcttgtcgagcaaagcacgtgaatctcagcgcgtcactggaccagaataatagtcattttaaggtatggaattctctccagttaaaatcacatagccccttccagaactttatcccagacgaattcaaaatttccaagggtctgagaatgcccttcgatgaaaagatggatccttggctgtctgaactcgtcgaacctgccttcgtccctccaaaagaagtggacttccacagttcctcacaaatgccttcaccagagcctatgaaaaagtttaccactagtattaccttcagctcccatcgccatagtaaatgcattagcaattcttcagtggtgaaggtaggcgtgacggagggcagccaatgcacgggtgcatctgtgggggtattcaattctcattttaccgaagagcaaaatcccccccgagatcttaaacagaagacttcgagcccatcctcatttaagatgcattcgaatagccaggacaaggaagttaccatactggcagagggcaggaggcagtcccagaaactgcccgtggacttcgagaggtccttccaggaagaaaagccactagaaaggagcgacttcacaggttcccattccgaaccctctaccagagcaaactgttccaactttaaagaaatccaaataagtgataatcatacgttgatctctatgggcagaccatcatctaccttaggcgtcaaccgctcgagttctaggctcggtgtaaaggaaaaaaacgtgacaatcactccagatcttccatcatgtatttttctggaacagcgcgaattatttgagcagagtaaagctcccagagctgacgaccacgtgcgtaaacaccattctccatcaccacagcaccaggactacgttgcgccagatttaccgagctgcatcttcttggagcaacgggagctctttgaacagtgcaaggcaccatatgtagaccatcagatgcgagagaatcactcaccattaccacagggacaagacagcatagcgagcgacttaccgtcgccaataagcctagagcaatgtcagagcaaggctccaggcgtcgacgatcagatgaataagcaccacttccccctgccccaaggacaggattgcgtggtcgaaaagaacaaccagcataagcccaagtcacacatcagcaacattaatgtcgaggcgaagttcaacacagtcgttagtcagagtgccccaaatcactgtactctggccgctagcgcttctacacctcccagcaaccgcaaagccttgtcctgtgtccacattacactttgccccaagacctcctctaagctcgacagcggaactctggatgaaagattccattcactggatgccgcatccaaggctagaatgaattctgagttcaactttgatctccatactgtgtcgtcccggagcctagagcctacctcaaagctgctgaccagcaagccagtggcccaggaccaggagtctcttggcttcctcggacctaagtcctcactcgactttcaagtagtgcagcctagcttgcctgacagtaatactattacgcaggatctgaagaccataccctctcaaaattcccagattgtcacgtcacggcaaattcaggttaacatctcagactttgagggtcactccaaccctgagggcacccccgtatttgccgatcggctccctgagaaaatgaagacaccactctcagctttcagcgaaaaactgtccagcgatgcagtgacacagataactacagagtcgccagagaagaccctattctctagtgaaatctttatcaacgctgaggacaggggccacgaaatcatcgagcccggaaaccagaagttaaggaaggcccccgtgaaatttgccagttcatcatctgtgcagcaagtgacatttagcaggggtactgatgggcagccactgctcttgccttataagccctcgggctcgacaaaaatgtattacgtcccccagctaagacagatccccccatctcctgactccaagagcgatacgactgtcgagtcaagtcactcgggctctaatgatgcaatagctccagatttcccagcacaggttttgggtactagagatgatgacctgtccgccacagtcaatataaagcacaaggaaggcatttactcgaagcgagttgtcaccaaggcctcgcttcctgtgggcgagaagccattgcagaatgagaacgccgatgcaagtgtgcaagtactgatcactggggacgagaacctctcagacaaaaaacagcaggagatccatagcactagagctgtgactgaggcggctcaggctaaagagaaagagtcgctgcagaaagataccgccgactctagtgcggcagcagcagcggagcattctgcccaggtgggagatcctgagatgaagaatcttcctgataccaaagccataacgcaaaaggaagaaattcaccggaagaagacagtgcccgaggaggcctggcctaataataaagagagtctccagattaatattgaagagtctgagtgccacagcgaatttgaaaatacaacacgctctgtcttccgctctgcaaaattctatatccaccatcccgtccacctaccaagcgatcaggatatatgtcatgaaagtctgggcaagtctgtatttatgcgccactcatggaaggatttttttcagcatcaccccgacaagcaccgcgaacacatgtgccttcccctgccataccagaacatggacaagacaaagaccgattacactaggatcaaatcactgagtatcaacgtgaaccttggcaacaaggaggttatggacaccacgaaatcacaggtgcgggattatcctaaacacaatggtcaaatcagtgatccgcaacgtgaccagaaagtgactccagagcaaacaactcagcatactgtgagcttaaatgagctgtggaacaaataccgtgagcgccaaagacagcaaagacaacctgaactaggggaccggaaagaactgtccttagttgacagacttgaccgcctggccaagattctgcagaatcctatcacccactctctgcaagtttctgagagtacccacgatgattcccgtggcgaaagaagtgtaaaagagtggagcggcagacaacagcaaagaaataagctgcagaagaagaaaaggttcaagagcctcgaaaagagccacaagaataccggagagcttaaaaaaagcaaggtgctgtctcatcacagggcaggtcggagcaatcagatcaagattgaacagattaagttcgacaagtatattctgtccaagcagcctggattcaactacatctccaacactagttctgactgtcgtccatcagaagaatcagaattgttgacagacaccaccacaaatatcttaagtgggacaacaagtacagtggagagcgatatcttgacgcagacggatcgcgaggttgcattacatgaaagatcaagtagcgtgtcgacgatcgatacagcccggctgatccaagctttcggccatgaaagagtgtgccttagccctcggcggataaagttgtatagcagtattaccaaccaacaaaggaggtacttggagaagcggtccaaacattcgaagaaggtgctcaatacgggtcaccctctggtcacatccgagcacactcgtcgaagacacatccaggtggcaaatcacgttattagttcggattccatttcttcttcggcctccagtttcttgtccagcaactccacattttgtaataaacagaacgtgcacatgctcaataaggggatccaggcagggaaccttgaaatcgttaatggagccaaaaagcatacccgtgatgtgggtataacattcccaacaccaagttcaagcgaggctaagctcgaagaaaacagcgacgtgacaagctggtcagaagagaaaagagaagagaagatgctgtttacagggtaccctgaagaccggaagctcaaaaagaacaagaaaaattcgcacgagggagtttcctggttcgtacccgtggagaacgtggaaagccgatcgaaaaaggagaatgtgccgaacacttgtggtcctgggatcagctggttcgagccaattaccaagacccgcccttggcgcgagccacttcgcgaacagaattgccaggggcagcacctggacggaagaggctatcttgccggaccgggacgcgaagctggccgggacctccttcggccttttgtgcgcgccacattgcaagagtctttgcaatttcacagacccgattttatctccagaagcggagaacggatcaagagacttaaacttatcgttcaagagcggaagctgcagtctatgctccagacagagcgagatgctctattcaacatagatcgggagcgccagggtcatcagaacagaatgtgtccgttgcctaaaagagtatttttggctatccaaaagaacaaaccgatctctaaaaaagagatgatccaacgatcaaaacggatctatgaacagctgccggaggttcagaaaaagcgggaagaggaaaaacgcaaatcagaatataagtcctaccgattgcgcgcacaactttacaagaaacgcgttaccaatcaattgctcgggcgcaaagttccctgggattag

SEQ ID NO: 184521 - DNA, 7686 bp, Artificial Sequence
  derived and/or modified sequence
atggaacccgaggatctgccctggcccggcgaattggaagaagaggaagaggaagaagaagaggaggaggaggaagaggaagaggccgctgctgcggccgcggccaacgtcgatgacgtggtggtggtggaggaggtggaagaggaagccggtagagagctcgacagtgatagccactacggacctcagcacctggagtctattgacgatgaggaagacgaagaagcgaaagcctggctgcaggcccatccagggagaattcttccacctctgtcaccgcctcaacacaggtattctgaaggtgagcgaaccagtctggagaagatcgtcccactcacatgccatgtgtggcaacagattgtgtatcagggaaactctagaacccagatctcagacacaaatgtcgtgtgcctcgaaacaacagcccagagaggtagcggcgacgaccagaaaaccgaatcttggcactgcctcccacaagagatggactcctcacagaccctggatacgagccagaccagatttaatgtgcgcaccgaagacactgaagtgactgatttcccctccttagaagaggggatccttacccagtccgaaaaccaggtcaaggagcctaaccgcgatctgttctgtagtcctttattagttatccaggattctttcgcgtcaccagacctcccccttctgacatgtctgacgcaagaccaggagttcgcgcctgactccttgttccatcaatccgagctcagcttcgctcctctgcgggggatcccagacaaatccgaggacactgaatggagctctcgccccagcgaggtgagtgaggccctcttccaggccacagctgaagtggcttcagatctggcttcatcccgttttagcgtctctcagcacccactgatcgggagcactgcagtgggctcccaatgtccattcttgccgtcagaacagggcaacaacgaggaaacgatctcctccgtcgacgaactgaaaattcccaaagactgtgatagatacgacgacctttgctcttatatgagttggaaaaccagaaaagacacacagtggcctgagaacaacctggctgataaagaccaggtctccgtcgcaacctcgttcgatatcaccgacgagaacatagctactaagcgctccgaccactttgacgctgcacggagctatgggcagtactggacccaagaagacagcagcaaacaggctgagacatacctaactaaaggtctacagggaaaggtggaatcagacgtgattacactggatggtctcaacgagaatgcagttgtgtgctcagagagagtcgccgagctccagcgcaaaccgacccgagagagtgaatatcattcttccgatctgaggatgttgaggatgtctcccgatacagtccctaaggccccaaagcacttaaaagccggtgatacctccaagggaggcatcgcaaaagttacccaaagtaacctgaagagcggtataaccactacacccgtcgattctgacatcggcagtcacctctcactgagcctcgaggacctgtcccagttagccgtgagctctctggaaactactaccggacagcacacagatactctgaatcagaaaacattggctgacactcacctgaccgaagaaaccttgaaagtgactgccataccagagcccgctgatcagaagaccgctaccccaactgtgttgagctcctcacattctcaccgtgggaaacccagcatattctaccagcaagggctccctgattcccatctcacggaggaggccctgaaggtttcagcagctcctggcctggctgaccagaccaccggaatgagtacactgacttcaacgtcatactctcatcgcgaaaaacctggaaccttctaccagcaggagctccccgagtccaacctgacagaggaaccactggaagtgagcgccgcccccggcccagtggagcaaaagactggcatccccaccgtaagctccacatcacactcacacgtggaagacctcctgttcttctaccgccagaccttgcccgatggacacctgaccgatcaagcactcaaagtctccgcagtaagtggcccagcagaccagaagactgggacagccaccgtactctcaactccgcactcccacagagaaaaaccagggatcttctaccagcaagaattcgcagacagtcaccagacggaagaaactctaacaaaggtgtccgctacacctggcccagctgatcagaagacagagatccctgccgtgcaatcctcctcctattcccagcgggagaagccatctattctttacccccaggacctggccgattctcaccttcccgaggaggggctcaaggtatccgcagttgctggtcccgctgatcagaagacaggtctgcctacagttccatcttcggcttactcgcacagggagaaattgctggtattctatcagcaggctctgctcgactctcatctgccagaggaagctcttaaggtgagcgctgtcagtgggccagcagacggaaagaccgggaccccggctgtgacttctacttcctcagcttcctctagtctgggagagaaaccatcagcgttttatcagcagacactacccaattcacacttaaccgaggaagccctaaaagtgagcatcgtgccaggccccggggaccaaaaaactgggattccgagcgctcctagtagtttctatagccatcgagaaaaaccgattattttcagccagcaaacattgcccgatttcctgtttcctgaggaagctcttaaggtgagcgcggttagtgtcctggcagcccagaagaccggaacacccacggtctcatccaactcacactcccatagcgagaagagttcggtcttctaccaacaagaactgcctgactctgacctcccccgcgaaagtctgaaaatgagtgccatacccggtctgaccgaccaaaaaacagtgccaaccccaacggtgccctcaggctcatttagccaccgggaaaaaccttcaattttctatcagcaggaatggcctgattcatacgcgactgaaaaagccctgaaagttagtactggccctggcccagcagaccagaagaccgagattcccgccgtccaatctagctcatacccacagcgcgaaaaaccctccgtcctctatccccaggtccttagcgactctcacctcccggaagaatcactcaaagtgagcgcattcccaggcccagccgaccagatgaccgacactcccgcagtcccgtctaccttctactcacagagagaaaaacccggcatcttttaccagcaaaccctgccagagagtcacctccccaaggaggccctcaaaatttctgtggcacccggcctcgctgaccagaaaactggcacacctaccgtgacatcaacatcttacagtcaacaccgagagaaaccttcaatcttccaccaacaggccctgcctggcacccatattccagaggaggctcagaaagtgagcgccgtaaccggacccgggaaccagaaaacttggatcccaagggtactaagcacgttctatagccagagagagaagccaggaatattctaccagcaaaccctccccggatcgcacattcccgaggaggcacaaaaagtaagcccagtactcggcccagccgaccagaaaacagggaccccaactcccactagcgcttcctactctcacactgagaagcctggcatcttctaccagcaggtgctgcctgataatcaccccacagaagaggcactgaagatatccgtagccagcgagcctgtggatcagactacgggcacccctgctgtcactagcacttcatactcacagtatcgggagaagcctagcattttttatcaacagagcctccctagctctcatcttacagaggaggccaaaaacgtgtctgcagttccagggcccgctgatcaaaagacagtgattcctattttgccaagcacattctatagccatactgaaaagccaggagttttctaccagcaggtgctgccccattcacatccaacagaggaagctctgaagatcagcgtcgcaagcgagcctgtggatcagacgactgggacgcccactgtcacatccacaagctactcacagcatacggagaagccctcaattttctatcaacaatcattaccaggctcgcatctgaccgaggaggcgaagaacgtctcagctgtgcccggtcctggtgacaggaaaaccggtataccaacactgccctctacattttattcccatactgaaaagcctggtagcttttaccaacaggtcctacctcacagtcatttgccggaggaggcactcgaagtgtccgtagctcccggccccgttgatcaaaccattggaacaccgaccgtcacttccccctcctcctccttcggcgagaagccgattgtcatctataagcaggctttccctgaaggccatttaccagaggagtctcttaaagtctccgtggctccggggccagttgggcaaacaacgggcgctccaaccatcactagccccagttactcgcagcaccgtgccaaaagtggcagcttctaccagttagctcttctgggctcccagatcccagaagaggctttgagagtcagcagcgcgcccggcccagccgatcaaacgaccggcatccctacaattaccagtacttcgtatagtttcggcgaaaaaccaatcgttaattacaaacaggcatttcccgatggccatttacctgaagaagcgttaaaggtgtcaattgtgagtgggccaaccgaaaagaaaaccgatatcccagctggcccactggggtcttctgccttgggggagaagccaattacgttttatagacaggctctgctcgactcccctctcaataaggaggtggtgaaagtgtccgccgcccctgggcccgcagaccagaaaaccgaaactcttccggttcattccacctcatattcaaaccgtggtaaaccagtcattttctatcagcaaactctaagtgactctcaccttccagaagaggccctgaaggtaccgcccgttccagggcctgatgcacagaagaccgagaccccatcagtgtcatcatccttatacagttatcgggaaaagcccatagtgttctaccagcaagcccttccagactcagagttgactcaggaggccctaaaggtgagtgccgtcccacagcctgctgatcaaaagacaggtctgagtacggtgaccagttccttctacagccataccgaaaagcccaacattagctatcagcaagagctccccgatagtcacctcacagaggaggcattgaaggtaagcaatgttcctggaccggccgatcaaaagacaggggtctctaccgtcacttcaaccagctatagccatagagaaaagcccatcgtgagctaccagcgcgagctgcctcattttacagaggcaggtttaaaaatcctgcgtgtacccgggcccgctgaccagaagaccggtataaacatccttccctctaactcataccctcagcgcgaacattcagtaatctcctatgagcaggagttacccgacctgactgaagttacgctgaaggctattggagtgcctgggccggccgatcagaagactggaatccagatcgcgtcttctagttcttactccaatagagagaaggcttcaatatttcaccaacaggagcttcctgacgtcaccgaggaggctctcaatgtcttcgtggtgcccgggcaaggtgaccgtaagaccgagataccaaccgtcccactgtcctactattcacgaagagaaaaaccatctgtgatatcacagcaggaactgccagactcccatctcacagaggaggctctcaaggtcagccctgtatccatccctgccgagcagaaaaccggcatacctatcggcttaagctcgtcgtactctcacagtcacaaagagaaactgaagatctctaccgtgcatattcctgacgaccagaagactgaattccctgcggcaactctgagtagttacagtcagatcgaaaaaccaaagatttctactgtcataggaccgaatgatcagaagacccccagccagaccgcattccactcatcctactcccaaacagtaaaacccaacattctgtttcagcagcagctccccgatcgggatcagagcaaggggattctgaagatcagcgccgtgccagaactgactgacgtcaatactggcaaaccagtgagtctgagctctagctattttcaccgggagaagtctaatatcttttcacctcaggaattacccggctcccacgtcactgaggatgtgttaaaggtgtccacaattcctggcccggcaggacagaaaacagtcctgccgacggcattaccatcctctttttcccacagagagaaacctgatatcttctatcagaaggacttgccagaccggcacctgacggaagacgcacttaaaatttcaagtgccctgggacaggcggatcagatcactggactccaaaccgtgccaagtggaacctattcccacggcgagaatcataagctcgtgtctgagcacgttcagaggttgatcgataatcttaatagctcagactctagcgtgtccagtaataatgtacttctgaacagccaggccgatgaccgggtcgtgatcaacaagccagaatcggccggtttcagagacgtgggcagcgaggagattcaggacgccgaaaactctgcaaagactctcaaggagatcaggactctgttgatggaggccgagaacatggcactgaaacgatgtaattttcccgctccattagctcggttccgggacatcagcgacataagctttattcagagcaagaaggtggtttgtttcaaggaaccctcctctacaggggtatccaatggcgacctgctccaccggcagcccttcaccgaggagtcaccttctagcaggtgcattcagaaagacattggcacgcagacaaacctcaagtgtcgccgcgggatcgaaaactgggaatttatctcttccacaaccgtgcgctcccctctgcaggaggcagagtcgaaagtgtctatggcgctggaggaaaccttgcgccaataccaggcagcaaagagcgtcatgcggtctgaacccgagggttgctccgggactatcgggaacaaaatcatcatcccaatgatgacagtgatcaagtcagattcatcttcagacgcctctgacggcaatggaagttgttcgtgggattctaatctcccagagtctcttgaatccgtatccgatgtcctgctgaacttctttccatatgttagccctaaaacctctatcacggatagcagagaagaggagggagtatccgagtctgaagacggaggagggtcttcagtagacagcctggcggctcacgtgaaaaacctactccagtgcgaaagctcccttaatcacgcgaaggagatcctccgaaacgcagaggaggaggaatctagagttcgtgcccatgcatggaatatgaagtttaatctggcacacgactgtggctatagcatctcggaactcaacgaagatgacagacgcaaggtagaggaaattaaagccgagctgtttggccatggccgtacaaccgatctttcaaagggcttgcaatcttag

SEQ ID NO: 184522 - DNA, 12504 bp, Artificial Sequence
  derived and/or modified sequence
atggagcctgaggacctgccctggccaggagagctggaggaggaggaggaggaggaggaggaggaggaggaggaggaggaggaggccgctgctgctgctgctgccaacgtggatgatgtggtggtggtggaggaggtggaggaggaggccggccgggagctggacagcgacagccactacggcccccagcacctggagagcattgatgatgaggaggatgaggaggccaaggcctggctgcaggcccaccctggccgcatcctgccccccctgagccccccccagcaccgctacagcgagggggagaggaccagcctggagaagatcgtgcccctgacctgccacgtgtggcagcagatcgtgtaccagggcaacagcaggacccagatcagtgacaccaacgtggtgtgcctggagaccacagcccagaggggcagcggagatgaccagaagacagagagctggcactgcctgccccaggagatggacagcagccagaccctggacaccagccagacccgcttcaacgtgaggacagaggacacagaggtgacagacttccccagcctggaggagggcatcctgacccagagcgagaaccaggtgaaggagcccaacagagacctcttctgcagccccctgctggtgatccaggacagctttgccagcccagacctgcccctgctgacctgcctgacccaggaccaggagtttgccccagacagcctcttccaccagagcgagctgagctttgcccccctgcggggcatcccagacaagtctgaggacacagagtggagcagccggcccagcgaggtgtctgaggccctcttccaggccacagctgaggtggccagtgacctggccagcagccgcttctctgtgtcccagcaccccctgattggcagcacagctgtgggcagccagtgccccttcctgcccagcgagcagggcaacaatgaggagaccatcagctctgtggatgagctgaagatccccaaggactgtgacagatatgatgacctgtgcagctacatgtcctggaagaccaggaaggacacccagtggccagagaacaacctggccgacaaggaccaggtgtctgtggccaccagctttgacatcacagatgagaacatcgccaccaagagaagtgaccactttgatgctgcccggagctatggccagtactggacccaggaggacagcagcaagcaggccgagacctacctgaccaagggcctgcagggcaaggtggagagtgatgtgatcaccctggatggcctgaatgaaaatgctgtggtgtgcagcgagcgggtggccgagctgcagaggaagcccacccgggagagcgagtaccacagcagtgacctgaggatgctgaggatgagcccagacacagtgcccaaggcccccaagcacctgaaggccggggacaccagcaagggcggcatcgccaaggtgacccagagcaacctgaagagcggcatcaccaccacccctgtggacagcgacatcggcagccacctgagcctgagcctggaggacctgagccagctggccgtgagcagcctggagaccaccaccggccagcacacagacaccctgaaccagaagaccctggccgacacccacctgacagaggagaccctgaaggtgacagccatccctgagcctgctgaccagaagacagccacccccaccgtgctgagcagcagccacagccaccggggcaagcccagcatcttctaccagcagggcctgcctgacagccacctgacagaggaggccctgaaggtgtctgctgcccctggcctggccgaccagaccaccggcatgagcaccctgaccagcaccagctacagccaccgggagaagccaggcaccttctaccagcaggagctgcctgagagcaacctgacagaggagcccctggaggtgtctgctgcccctggccctgtggagcagaagacaggcatccccaccgtgagcagcaccagccacagccacgtggaggacctgctcttcttctaccggcagaccctgcctgatggccacctgacagaccaggccctgaaggtgtctgctgtgtctggccctgctgaccagaagacaggaacagccaccgtgctgagcaccccccacagccaccgggagaagccaggcatcttctaccagcaggagtttgctgacagccaccagacagaggagaccctgaccaaggtgtctgccaccccaggccctgctgaccagaagacagagatcccagctgtgcagagcagcagctacagccagcgggagaagcccagcatcctgtacccccaggacctggccgacagccacctgcctgaggagggcctgaaggtgtctgctgtggccggccctgctgaccagaagacaggcctgcccaccgtgcccagcagcgcctacagccaccgggagaagctgctggtgttctaccagcaggccctgctggacagccacctgcctgaggaggccctgaaggtgtctgctgtgtctggccctgcagatggcaagacaggcaccccagctgtgaccagcaccagcagcgccagcagcagcctgggggagaagcccagcgccttctaccagcagaccctgcccaacagccacctgacagaggaggccctgaaggtgtccatcgtgcccggccctggggaccagaagacaggcatccccagcgcccccagcagcttctacagccaccgggagaagcccatcatcttcagccagcagaccctgcctgacttcctgtttcctgaggaggccctgaaggtgtctgctgtgtctgtgctggccgcccagaagacaggcacccccaccgtgagcagcaacagccacagccacagcgagaagagctctgtgttctaccagcaggagctgcctgacagcgacctgccccgggagagcctgaagatgtctgccatccctggcctgacagaccagaagacagtgcccacccccaccgtgcccagcggcagcttcagccaccgggagaagcccagcatcttctaccagcaggagtggccagacagctatgccacagagaaggccctgaaggtgtccacaggccctggccctgctgaccagaagacagagatcccagctgtgcagagcagcagctacccccagcgggagaagcccagcgtgctgtacccccaggtgctgagtgacagccacctgcctgaggagagcctgaaggtgtctgccttccctggccctgctgaccagatgacagacaccccagctgtgcccagcaccttctacagccagcgggagaagccaggcatcttctaccagcagaccctgcctgagagccacctgcccaaggaggccctgaagatctctgtggcccctggcctggccgaccagaagacaggcacccccaccgtgaccagcaccagctacagccagcaccgggagaagcccagcatcttccaccagcaggccctgcccggcacccacatccctgaggaggcccagaaggtgtctgctgtgacaggccctggcaaccagaagacctggatcccccgggtgctgagcaccttctacagccagcgggagaagccaggcatcttctaccagcagaccctgcccggcagccacatccctgaggaggcccagaaggtgtcccctgtgctgggccctgctgaccagaagacaggcacccccacccccaccagcgccagctacagccacacagagaagccaggcatcttctaccagcaggtgctgcctgacaaccaccccacagaggaggccctgaagatctctgtggccagcgagcctgtggaccagaccaccggcaccccagctgtgaccagcaccagctacagccagtaccgggagaagcccagcatcttctaccagcagagcctgcccagcagccacctgacagaggaggccaagaatgtgtctgctgtgcccggccctgctgaccagaagacagtcatccccatcctgcccagcaccttctacagccacacagagaagccaggagtcttctaccagcaggtgctgccccacagccaccccacagaggaggccctgaagatctctgtggccagcgagcctgtggaccagaccaccggcacccccaccgtgaccagcaccagctacagccagcacacagagaagcccagcatcttctaccagcagagcctgcccggcagccacctgacagaggaggccaagaatgtgtctgctgtgcccggccctggggacaggaagacaggcatccccaccctgcccagcaccttctacagccacacagagaagccaggcagcttctaccagcaggtgctgccccacagccacctgcctgaggaggccctggaggtgtctgtggcccctggccctgtggaccagaccatcggcacccccaccgtgaccagccccagcagcagctttggagagaagcccatcgtcatctacaagcaggccttccctgagggccacctgcctgaggagagcctgaaggtgtctgtggcccctggccctgtgggccagaccaccggggcccccaccatcaccagccccagctacagccagcaccgggccaagagcggcagcttctaccagctggccctgctgggcagccagatccctgaggaggccctgcgggtgtcctctgcccctggccctgctgaccagaccaccggcatccccaccatcaccagcaccagctacagctttggagagaagcccatcgtgaactacaagcaggccttcccagatggccacctgcctgaggaggccctgaaggtgtccatcgtgtctggccccacagagaagaagacagacatcccagctggccccctgggcagcagcgccctgggggagaagcccatcaccttctaccggcaggccctgctggacagccccctgaacaaggaggtggtgaaggtgtctgctgcccctggccctgctgaccagaagacagagaccctgcctgtgcacagcaccagctacagcaacagaggcaagcctgtgatcttctaccagcagaccctgagtgacagccacctgcctgaggaggccctgaaggtgccccctgtgcccggcccagatgcccagaagacagagaccccatctgtgagcagcagcctgtacagctaccgggagaagcccatcgtgttctaccagcaggccctgcctgacagcgagctgacccaggaggccctgaaggtgtctgctgtgccccagcctgctgaccagaagacaggcctgagcacagtgaccagcagcttctacagccacacagagaagcccaacatctcctaccagcaggagctgcctgacagccacctgacagaggaggccctgaaggtgtccaatgtgcccggccctgctgaccagaagacaggagtgtccacagtgaccagcaccagctacagccaccgggagaagcccatcgtgtcctaccagcgggagctgccccacttcacagaagctggcctgaagatcctgcgggtgcccggccctgctgaccagaagacaggcatcaacatcctgcccagcaacagctacccccagcgggagcacagcgtcatctcctatgagcaggagctgcctgacctgacagaggtgaccctgaaggccatcggcgtgcccggccctgctgaccagaagacaggcatccagatcgccagcagcagcagctacagcaaccgggagaaggccagcatcttccaccagcaggagctgcctgatgtgacagaggaggccctgaatgtgtttgtggtgcccggccagggcgacaggaagacagagatccccaccgtgcccctgagctactacagccggcgggagaagcccagcgtcatcagccagcaggagctgcctgacagccacctgacagaggaggccctgaaggtgtcccctgtgtccatcccagctgagcagaagacaggcatccccatcggcctgagcagcagctacagccacagccacaaggagaagctgaagatcagcacagtgcacatcccagatgaccagaagacagagttccctgctgccaccctgagcagctacagccagatcgagaagcccaagatcagcaccgtcatcggccccaatgaccagaagacccccagccagacagccttccacagcagctacagccagacagtgaagcccaacatcctcttccagcagcagctgcctgaccgggaccagagcaagggcatcctgaagatctctgctgtgcctgagctgacagatgtgaacacaggcaagcctgtgtccctgagcagcagctacttccaccgggagaagagcaacatcttcagcccccaggagctgcccggcagccacgtgacagaagatgtgctgaaggtgtccaccatccctggccctgctggccagaagacagtgctgcccacagccctgcccagcagcttcagccaccgggagaagccagacatcttctaccagaaggacctgcctgacagacacctgacagaagatgccctgaagatcagcagcgccctgggccaggccgaccagatcaccggcctgcagacagtgcccagcggcacctacagccacggggagaaccacaagctggtgtctgagcacgtgcagaggctgattgacaacctgaacagcagtgacagctctgtgagcagcaacaacgtgctgctgaacagccaggctgatgacagagtggtgatcaacaagccagagagcgctggcttcagagatgtgggcagcgaggagatccaggatgctgagaacagcgccaagaccctgaaggagatccgcaccctgctgatggaggccgagaacatggccctgaagcgctgcaacttccctgcccccctggcccgcttccgggacatcagtgacatctccttcatccagagcaagaaggtggtgtgcttcaaggagcccagcagcactggagtgtccaatggagacctgctgcaccggcagcccttcacagaggagagccccagcagccgctgcatccagaaggacatcggcacccagaccaacctgaagtgccggcggggcatcgagaactgggagttcatcagcagcaccaccgtgcgcagccccctgcaggaggccgagagcaaggtgtccatggccctggaggagaccctgcggcagtaccaggccgccaagtctgtgatgaggtctgagcctgagggctgcagcggcaccatcggcaacaagatcatcatccccatgatgaccgtcatcaagagtgacagcagcagtgatgccagtgatggaaatggcagctgctcctgggacagcaacctgcctgagagcctggagagcgtgtctgatgtgctgctgaacttcttcccctacgtgagccccaagaccagcatcacagacagccgggaggaggagggcgtgtctgagagtgaagatggcggcggcagctctgtggacagcctggccgcccacgtgaagaacctgctgcagtgtgagagcagcctgaaccacgccaaggagatcctgagaaatgctgaggaggaggagagccgggtgcgggcccacgcctggaacatgaagttcaacctggcccatgactgtggctacagcatcagcgagctgaatgaagatgacaggaggaaggtggaggagatcaaggccgagctgtttggacatggccgcaccacagacctgagcaagggcctgcagagcccccggggcatgggctgcaagccagaggccgtgtgcagccacatcatcatcgagagccatgagaagggctgcttccgcaccctgaccagcgagcacccccagctggacagacacccctgtgccttccgctctgctggccccagcgagatgacccggggccggcagaaccccagcagctgccgggccaagcacgtgaacctgagcgccagcctggaccagaacaacagccacttcaaggtgtggaacagcctgcagctgaagagccacagccccttccagaacttcatcccagatgagttcaagatcagcaagggcctgaggatgccctttgatgagaagatggacccctggctgtctgagctggtggagcccgcctttgtgccccccaaggaggtggacttccacagcagcagccagatgcccagccctgagcccatgaagaagttcaccaccagcatcaccttcagcagccaccgccacagcaagtgcatcagcaacagctctgtggtgaaggtgggcgtgacagagggcagccagtgcaccggggcctctgtgggcgtcttcaacagccacttcacagaggagcagaaccccccccgggacctgaagcagaagaccagcagccccagcagcttcaagatgcacagcaacagccaggacaaggaggtgaccatcctggccgagggccggcggcagagccagaagctgcctgtggactttgagaggagcttccaggaggagaagcccctggagaggagtgacttcaccggcagccacagcgagcccagcacccgggccaactgcagcaacttcaaggagatccagatcagtgacaaccacaccctcatctccatgggccggcccagcagcaccctgggcgtgaacagaagcagcagccggctgggcgtgaaggagaagaatgtgaccatcaccccagacctgcccagctgcatcttcctggagcagcgggagctgtttgagcagagcaaggcccccagggcagatgaccacgtgaggaagcaccacagccccagcccccagcaccaggactatgtggccccagacctgcccagctgcatcttcctggagcagcgggagctgtttgagcagtgcaaggccccctacgtggaccaccagatgagggagaaccacagccccctgccccagggccaggacagcatcgccagtgacctgcccagccccatcagcctggagcagtgccagagcaaggcccctggggtggatgaccagatgaacaagcaccacttccccctgccccagggccaggactgtgtggtggagaagaacaaccagcacaagcccaagagccacatcagcaacatcaacgtggaggccaagttcaacacagtggtgtcccagagcgcccccaaccactgcaccctggccgccagcgccagcaccccacccagcaacaggaaggccctgagctgtgtgcacatcaccctgtgccccaagaccagcagcaagctggacagcggcaccctggatgagcgcttccacagcctggatgctgccagcaaggccaggatgaacagcgagttcaactttgacctgcacacagtgagcagccgcagcctggagcccaccagcaagctgctgaccagcaagcctgtggcccaggaccaggagagcctgggcttcctgggccccaagagcagcctggacttccaggtggtgcagcccagcctgcctgacagcaacaccatcacccaggacctgaagaccatccccagccagaacagccagatcgtgaccagccggcagatccaggtgaacatcagtgactttgagggccacagcaaccctgagggcacccctgtgtttgctgaccggctgcctgagaagatgaagacccccctgagcgccttcagcgagaagctgagcagtgatgctgtgacccagatcaccacagagagccctgagaagaccctcttcagcagcgagatcttcatcaatgctgaggaccggggccacgagatcatcgagcccggcaaccagaagctgaggaaggcccctgtgaagtttgccagcagcagctctgtgcagcaggtgaccttcagccggggcacagatggccagcccctgctgctgccctacaagcccagcggcagcaccaagatgtactacgtgccccagctgcggcagatcccccccagcccagacagcaagagtgacaccaccgtggagagcagccacagcggcagcaatgatgccatcgccccagacttccctgcccaggtgctgggcaccagagatgatgacctgagcgccaccgtgaacatcaagcacaaggagggcatctacagcaagagggtggtgaccaaggccagcctgcctgtgggggagaagcccctgcagaatgaaaatgctgatgcctctgtgcaggtgctgatcactggagatgagaacctgagtgacaagaagcagcaggagatccacagcaccagggctgtgacagaagctgcccaggccaaggagaaggagagcctgcagaaggacacagctgacagcagcgctgctgctgctgctgagcacagcgcccaggtgggggaccctgagatgaagaacctgcctgacaccaaggccatcacccagaaggaggagatccacaggaagaagacagtgcctgaggaggcctggcccaacaacaaggagagcctgcagatcaacatcgaggagagcgagtgccacagcgagtttgagaacaccaccaggagcgtcttccgcagcgccaagttctacatccaccaccctgtgcacctgcccagcgaccaggacatctgccacgagagcctgggcaagtctgtgttcatgaggcacagctggaaggacttcttccagcaccacccagacaagcaccgggagcacatgtgcctgcccctgccctaccagaacatggacaagaccaagacagactacacccgcatcaagagcctgagcatcaacgtgaacctgggcaacaaggaggtgatggacaccaccaagagccaggtgcgggactaccccaagcacaacggccagatcagtgacccccagagggaccagaaggtgaccccagagcagaccacccagcacacagtgtccctgaatgagctgtggaacaagtaccgggagcggcagaggcagcagaggcagcctgagctgggggacaggaaggagctgagcctggtggaccggctggaccggctggccaagatcctgcagaaccccatcacccacagcctgcaggtgtctgagagcacccatgatgacagcagaggagagaggtctgtgaaggagtggagcggccggcagcagcagaggaacaagctgcagaagaagaagcgcttcaagagcctggagaagagccacaagaacacaggagagctgaagaagagcaaggtgctgagccaccaccgggccggccgcagcaaccagatcaagattgagcagatcaagtttgacaagtacatcctgagcaagcagcccggcttcaactacatcagcaacaccagcagtgactgccggcccagcgaggagagcgagctgctgacagacaccaccaccaacatcctgagcggcaccaccagcacagtggagagtgacatcctgacccagacagaccgggaggtggccctgcacgagaggagcagctctgtgtccaccatcgacacagcccggctcatccaggcctttggacatgagcgggtgtgcctgagcccccggcgcatcaagctgtacagcagcatcaccaaccagcagaggcgctacctggagaagaggagcaagcacagcaagaaggtgctgaacacaggccaccccctggtgaccagcgagcacacccggcggcggcacatccaggtggccaaccacgtgatcagcagtgacagcatcagcagcagcgccagcagcttcctgagcagcaacagcaccttctgcaacaagcagaatgtgcacatgctgaacaagggcatccaggccggcaacctggagatcgtgaatggagccaagaagcacaccagagatgtgggcatcaccttccccacccccagcagcagcgaggccaagctggaggagaacagtgatgtgacctcctggagcgaggagaagcgggaggagaagatgctgttcaccggctacccagaggacaggaagctgaagaagaacaagaagaacagccatgaaggagtgtcctggtttgtgcctgtggagaatgtggagagccgcagcaagaaggaaaatgtgcccaacacctgtggccctggcatctcctggtttgagcccatcaccaagacccggccctggagggagcccctgcgggagcagaactgccagggccagcacctggatggccggggctacctggccggccctggccgggaggccggccgggacctgctgcggccctttgtgcgggccaccctgcaggagagcctgcagttccacaggccagacttcatcagccgctctggagagcgcatcaagaggctgaagctgattgtgcaggagaggaagctgcagagcatgctgcagacagaaagagatgccctcttcaacatcgaccgggagcggcagggccaccagaacaggatgtgccccctgcccaagagggtcttcctggccatccagaagaacaagcccatcagcaagaaggagatgatccagaggagcaagaggatctatgagcagctgcctgaggtgcagaagaagcgggaggaggagaagaggaagtctgagtacaagagctaccgcctgcgggcccagctgtacaagaagagggtgaccaaccagctgctgggcaggaaggtgccctgggactag

SEQ ID NO: 184523 - DNA, 7686 bp, Artificial Sequence
  derived and/or modified sequence
atggagcctgaggacctgccctggccaggagagctggaggaggaggaggaggaggaggaggaggaggaggaggaggaggaggaggccgctgctgctgctgctgccaacgtggatgatgtggtggtggtggaggaggtggaggaggaggccggccgggagctggacagcgacagccactacggcccccagcacctggagagcattgatgatgaggaggatgaggaggccaaggcctggctgcaggcccaccctggccgcatcctgccccccctgagccccccccagcaccgctacagcgagggggagaggaccagcctggagaagatcgtgcccctgacctgccacgtgtggcagcagatcgtgtaccagggcaacagcaggacccagatcagtgacaccaacgtggtgtgcctggagaccacagcccagaggggcagcggagatgaccagaagacagagagctggcactgcctgccccaggagatggacagcagccagaccctggacaccagccagacccgcttcaacgtgaggacagaggacacagaggtgacagacttccccagcctggaggagggcatcctgacccagagcgagaaccaggtgaaggagcccaacagagacctcttctgcagccccctgctggtgatccaggacagctttgccagcccagacctgcccctgctgacctgcctgacccaggaccaggagtttgccccagacagcctcttccaccagagcgagctgagctttgcccccctgcggggcatcccagacaagtctgaggacacagagtggagcagccggcccagcgaggtgtctgaggccctcttccaggccacagctgaggtggccagtgacctggccagcagccgcttctctgtgtcccagcaccccctgattggcagcacagctgtgggcagccagtgccccttcctgcccagcgagcagggcaacaatgaggagaccatcagctctgtggatgagctgaagatccccaaggactgtgacagatatgatgacctgtgcagctacatgtcctggaagaccaggaaggacacccagtggccagagaacaacctggccgacaaggaccaggtgtctgtggccaccagctttgacatcacagatgagaacatcgccaccaagagaagtgaccactttgatgctgcccggagctatggccagtactggacccaggaggacagcagcaagcaggccgagacctacctgaccaagggcctgcagggcaaggtggagagtgatgtgatcaccctggatggcctgaatgaaaatgctgtggtgtgcagcgagcgggtggccgagctgcagaggaagcccacccgggagagcgagtaccacagcagtgacctgaggatgctgaggatgagcccagacacagtgcccaaggcccccaagcacctgaaggccggggacaccagcaagggcggcatcgccaaggtgacccagagcaacctgaagagcggcatcaccaccacccctgtggacagcgacatcggcagccacctgagcctgagcctggaggacctgagccagctggccgtgagcagcctggagaccaccaccggccagcacacagacaccctgaaccagaagaccctggccgacacccacctgacagaggagaccctgaaggtgacagccatccctgagcctgctgaccagaagacagccacccccaccgtgctgagcagcagccacagccaccggggcaagcccagcatcttctaccagcagggcctgcctgacagccacctgacagaggaggccctgaaggtgtctgctgcccctggcctggccgaccagaccaccggcatgagcaccctgaccagcaccagctacagccaccgggagaagccaggcaccttctaccagcaggagctgcctgagagcaacctgacagaggagcccctggaggtgtctgctgcccctggccctgtggagcagaagacaggcatccccaccgtgagcagcaccagccacagccacgtggaggacctgctcttcttctaccggcagaccctgcctgatggccacctgacagaccaggccctgaaggtgtctgctgtgtctggccctgctgaccagaagacaggaacagccaccgtgctgagcaccccccacagccaccgggagaagccaggcatcttctaccagcaggagtttgctgacagccaccagacagaggagaccctgaccaaggtgtctgccaccccaggccctgctgaccagaagacagagatcccagctgtgcagagcagcagctacagccagcgggagaagcccagcatcctgtacccccaggacctggccgacagccacctgcctgaggagggcctgaaggtgtctgctgtggccggccctgctgaccagaagacaggcctgcccaccgtgcccagcagcgcctacagccaccgggagaagctgctggtgttctaccagcaggccctgctggacagccacctgcctgaggaggccctgaaggtgtctgctgtgtctggccctgcagatggcaagacaggcaccccagctgtgaccagcaccagcagcgccagcagcagcctgggggagaagcccagcgccttctaccagcagaccctgcccaacagccacctgacagaggaggccctgaaggtgtccatcgtgcccggccctggggaccagaagacaggcatccccagcgcccccagcagcttctacagccaccgggagaagcccatcatcttcagccagcagaccctgcctgacttcctgtttcctgaggaggccctgaaggtgtctgctgtgtctgtgctggccgcccagaagacaggcacccccaccgtgagcagcaacagccacagccacagcgagaagagctctgtgttctaccagcaggagctgcctgacagcgacctgccccgggagagcctgaagatgtctgccatccctggcctgacagaccagaagacagtgcccacccccaccgtgcccagcggcagcttcagccaccgggagaagcccagcatcttctaccagcaggagtggccagacagctatgccacagagaaggccctgaaggtgtccacaggccctggccctgctgaccagaagacagagatcccagctgtgcagagcagcagctacccccagcgggagaagcccagcgtgctgtacccccaggtgctgagtgacagccacctgcctgaggagagcctgaaggtgtctgccttccctggccctgctgaccagatgacagacaccccagctgtgcccagcaccttctacagccagcgggagaagccaggcatcttctaccagcagaccctgcctgagagccacctgcccaaggaggccctgaagatctctgtggcccctggcctggccgaccagaagacaggcacccccaccgtgaccagcaccagctacagccagcaccgggagaagcccagcatcttccaccagcaggccctgcccggcacccacatccctgaggaggcccagaaggtgtctgctgtgacaggccctggcaaccagaagacctggatcccccgggtgctgagcaccttctacagccagcgggagaagccaggcatcttctaccagcagaccctgcccggcagccacatccctgaggaggcccagaaggtgtcccctgtgctgggccctgctgaccagaagacaggcacccccacccccaccagcgccagctacagccacacagagaagccaggcatcttctaccagcaggtgctgcctgacaaccaccccacagaggaggccctgaagatctctgtggccagcgagcctgtggaccagaccaccggcaccccagctgtgaccagcaccagctacagccagtaccgggagaagcccagcatcttctaccagcagagcctgcccagcagccacctgacagaggaggccaagaatgtgtctgctgtgcccggccctgctgaccagaagacagtcatccccatcctgcccagcaccttctacagccacacagagaagccaggagtcttctaccagcaggtgctgccccacagccaccccacagaggaggccctgaagatctctgtggccagcgagcctgtggaccagaccaccggcacccccaccgtgaccagcaccagctacagccagcacacagagaagcccagcatcttctaccagcagagcctgcccggcagccacctgacagaggaggccaagaatgtgtctgctgtgcccggccctggggacaggaagacaggcatccccaccctgcccagcaccttctacagccacacagagaagccaggcagcttctaccagcaggtgctgccccacagccacctgcctgaggaggccctggaggtgtctgtggcccctggccctgtggaccagaccatcggcacccccaccgtgaccagccccagcagcagctttggagagaagcccatcgtcatctacaagcaggccttccctgagggccacctgcctgaggagagcctgaaggtgtctgtggcccctggccctgtgggccagaccaccggggcccccaccatcaccagccccagctacagccagcaccgggccaagagcggcagcttctaccagctggccctgctgggcagccagatccctgaggaggccctgcgggtgtcctctgcccctggccctgctgaccagaccaccggcatccccaccatcaccagcaccagctacagctttggagagaagcccatcgtgaactacaagcaggccttcccagatggccacctgcctgaggaggccctgaaggtgtccatcgtgtctggccccacagagaagaagacagacatcccagctggccccctgggcagcagcgccctgggggagaagcccatcaccttctaccggcaggccctgctggacagccccctgaacaaggaggtggtgaaggtgtctgctgcccctggccctgctgaccagaagacagagaccctgcctgtgcacagcaccagctacagcaacagaggcaagcctgtgatcttctaccagcagaccctgagtgacagccacctgcctgaggaggccctgaaggtgccccctgtgcccggcccagatgcccagaagacagagaccccatctgtgagcagcagcctgtacagctaccgggagaagcccatcgtgttctaccagcaggccctgcctgacagcgagctgacccaggaggccctgaaggtgtctgctgtgccccagcctgctgaccagaagacaggcctgagcacagtgaccagcagcttctacagccacacagagaagcccaacatctcctaccagcaggagctgcctgacagccacctgacagaggaggccctgaaggtgtccaatgtgcccggccctgctgaccagaagacaggagtgtccacagtgaccagcaccagctacagccaccgggagaagcccatcgtgtcctaccagcgggagctgccccacttcacagaagctggcctgaagatcctgcgggtgcccggccctgctgaccagaagacaggcatcaacatcctgcccagcaacagctacccccagcgggagcacagcgtcatctcctatgagcaggagctgcctgacctgacagaggtgaccctgaaggccatcggcgtgcccggccctgctgaccagaagacaggcatccagatcgccagcagcagcagctacagcaaccgggagaaggccagcatcttccaccagcaggagctgcctgatgtgacagaggaggccctgaatgtgtttgtggtgcccggccagggcgacaggaagacagagatccccaccgtgcccctgagctactacagccggcgggagaagcccagcgtcatcagccagcaggagctgcctgacagccacctgacagaggaggccctgaaggtgtcccctgtgtccatcccagctgagcagaagacaggcatccccatcggcctgagcagcagctacagccacagccacaaggagaagctgaagatcagcacagtgcacatcccagatgaccagaagacagagttccctgctgccaccctgagcagctacagccagatcgagaagcccaagatcagcaccgtcatcggccccaatgaccagaagacccccagccagacagccttccacagcagctacagccagacagtgaagcccaacatcctcttccagcagcagctgcctgaccgggaccagagcaagggcatcctgaagatctctgctgtgcctgagctgacagatgtgaacacaggcaagcctgtgtccctgagcagcagctacttccaccgggagaagagcaacatcttcagcccccaggagctgcccggcagccacgtgacagaagatgtgctgaaggtgtccaccatccctggccctgctggccagaagacagtgctgcccacagccctgcccagcagcttcagccaccgggagaagccagacatcttctaccagaaggacctgcctgacagacacctgacagaagatgccctgaagatcagcagcgccctgggccaggccgaccagatcaccggcctgcagacagtgcccagcggcacctacagccacggggagaaccacaagctggtgtctgagcacgtgcagaggctgattgacaacctgaacagcagtgacagctctgtgagcagcaacaacgtgctgctgaacagccaggctgatgacagagtggtgatcaacaagccagagagcgctggcttcagagatgtgggcagcgaggagatccaggatgctgagaacagcgccaagaccctgaaggagatccgcaccctgctgatggaggccgagaacatggccctgaagcgctgcaacttccctgcccccctggcccgcttccgggacatcagtgacatctccttcatccagagcaagaaggtggtgtgcttcaaggagcccagcagcactggagtgtccaatggagacctgctgcaccggcagcccttcacagaggagagccccagcagccgctgcatccagaaggacatcggcacccagaccaacctgaagtgccggcggggcatcgagaactgggagttcatcagcagcaccaccgtgcgcagccccctgcaggaggccgagagcaaggtgtccatggccctggaggagaccctgcggcagtaccaggccgccaagtctgtgatgaggtctgagcctgagggctgcagcggcaccatcggcaacaagatcatcatccccatgatgaccgtcatcaagagtgacagcagcagtgatgccagtgatggaaatggcagctgctcctgggacagcaacctgcctgagagcctggagagcgtgtctgatgtgctgctgaacttcttcccctacgtgagccccaagaccagcatcacagacagccgggaggaggagggcgtgtctgagagtgaagatggcggcggcagctctgtggacagcctggccgcccacgtgaagaacctgctgcagtgtgagagcagcctgaaccacgccaaggagatcctgagaaatgctgaggaggaggagagccgggtgcgggcccacgcctggaacatgaagttcaacctggcccatgactgtggctacagcatcagcgagctgaatgaagatgacaggaggaaggtggaggagatcaaggccgagctgtttggacatggccgcaccacagacctgagcaagggcctgcagagctag

SEQ ID NO: 184524 - DNA, 12922 bp, Artificial Sequence
  derived and/or modified sequence
aggcgggcggcactgcgcctaagctgggccacaaccgccagtcagggctctccccttcccctccctccccccctcctcctcctcctctgccgcccagagcgagacaccaacatggagcccgaggatctgccatggccgggcgagctggaggaggaggaggaggaggaggaggaggaggaggaggaagaggaggaggctgcagcggcggcggcggcgaacgtggacgacgtagtggtcgtggaggaggtggaggaagaggcggggcgggagttggactccgactctcactacgggccccagcatctggaaagtatagacgacgaggaggacgaggaggccaaggcctggctgcaggcgcaccccggcaggattttgcctccgctgtcgcccccgcagcaccgctactcggagggcgagcggacctccctggagaagattgttccattgacctgtcatgtatggcaacagatagtatatcaaggcaatagtagaacacaaatttctgatactaatgtggtctgtttggaaacaacagctcagcggggttctggggatgatcagaaaacagaatcttggcattgtcttcctcaagaaatggactcttcccaaaccttggatacatcccagactaggtttaatgtgagaacggaagatactgaagtgacagacttcccctctctggaggagggcatattgacgcaatcagaaaatcaagtaaaggaacccaacagagatctcttctgttctccactgctagtcatacaagatagctttgcttctcctgatttgcctttgctgacctgtttgacacaagaccaagaatttgcgcctgattctttatttcatcaaagtgaactaagttttgcacctctgaggggaattcctgataagtctgaagatactgaatggtcttctcgaccatcggaagttagtgaagctttattccaggctactgcagaagtagcttcagacttagcaagcagtcgctttagtgtatctcagcacccgcttataggcagcacagctgttgggtctcagtgcccttttttaccttctgaacaagggaataatgaagagactatttcgtctgttgatgaactgaaaattcccaaagactgtgatcgttatgatgatctttgttcatatatgtcatggaagacacgaaaagatacacagtggcctgaaaacaatttagctgataaagatcaagtttcagttgcaacttcatttgacataactgatgaaaacatagctactaaaagaagtgaccattttgatgctgctcgttcatatgggcagtattggacacaggaagattcatctaagcaggcagaaacatatttaaccaagggcctgcaggggaaggttgagtctgacgtcattactctggatggcctaaatgaaaatgctgttgtatgcagtgaaagagttgctgaactacaaagaaagccaacaagagagtcggaatatcactcttcagatctcagaatgttgaggatgtctcctgacactgtgccaaaggctcctaaacatttaaaagcaggagacacttctaaaggaggcatagctaaagttactcaatccaacttgaagtcaggcatcactaccactcctgttgattcagacattggatctcatttatccttgtcccttgaggacctgtctcagttggctgtaagttctctagaaactactactggtcaacacactgatactctcaaccaaaagacattagcagatactcatctaactgaagagactctgaaagtcacagctattcctgaaccagctgaccagaagactgcaacaccaacagtactctctagttcccactcacatagggggaagcccagcattttctaccagcagggcttgccagacagtcatctaactgaagaggctttgaaagtttcagctgctcctggactagctgaccagacaactggcatgtcaactctaacctctacttcctactcacatagagagaagcctggtactttttaccaacaagagttaccagagagtaacttaaccgaagagcctttggaagtttcagctgctcctggcccagtggagcagaagacgggaatacctacagtatcctctacatcccactcacatgtagaggacctcctctttttctatcgacagaccttgccagatggtcatctaactgatcaggctctgaaagtctcagctgtgtctggaccagctgaccagaagactgggacagcaacagtactctctactccccactcacatagagagaagcctggtattttttaccaacaagagttcgcagacagtcatcaaactgaagagactcttactaaagtttcagccactcctggaccagctgaccagaagactgagataccagcagtacagtctagttcttactcacaaagagaaaagcctagtattttgtacccacaggacttagcagacagtcatctacctgaagagggtctgaaagtttcagctgttgctggaccagctgaccagaagactggcctaccaacagtaccctctagtgcatactcacacagagagaagctccttgttttctaccaacaggccttgctggacagccatctacccgaagaggctctgaaagtttcagctgtttctggaccagctgacggaaagactgggacaccagctgtaacctctacttcctctgcgtcctcttcacttggagaaaagcccagtgctttctatcagcagaccttacccaatagtcatctaactgaagaggctctgaaagtatcaattgttcctggaccaggtgatcagaagactgggataccctcagcaccatctagtttctactcacacagagagaagcccattattttttcccagcagaccctgccagactttcttttccctgaagaagctctgaaggtttcagctgtttctgtattggctgcccagaagactgggacaccaacagtgtcctctaattctcactcacatagcgagaaatctagtgttttctaccagcaagagttgccagacagtgatctacctagagaatctctgaaaatgtctgctattcctggactgactgaccagaagactgtcccaacaccaacagtaccttcaggttccttctcacatagagagaagcccagtattttctatcaacaggagtggccagatagttatgcaactgaaaaggctctgaaagtttcaactggccctggaccagctgaccagaagactgagataccagcagtacagtctagttcttacccacagagggagaagcctagtgttttgtacccacaggtgttatcagacagtcatctacctgaagagagtctgaaagtttcagccttccctggaccagctgaccagatgactgacacaccagcagtaccgtctactttctactcacaaagagagaagcctggtattttctaccaacagaccttgccagagagtcatctgcctaaagaggctctgaaaatttcagtagctcctggactagcagaccagaagactggcacaccaactgtaacctcaacttcctactcacaacatagagaaaagcccagcattttccaccagcaggccttgccaggtactcatatacctgaagaggctcagaaagtttcagctgttactggaccaggtaaccagaagacttggataccaagagtactttctaccttctactcacaaagagagaaacctggtattttctatcaacagaccttgccaggtagtcacatacctgaagaggcacagaaagtttcacctgttcttggaccagctgaccagaagactgggacaccaactccaacctctgcttcttactcacacacagagaagcctggtattttctaccaacaggtcttgccagataatcatccaactgaagaggctctgaaaatttcagttgcctctgaaccagttgaccagacaactggcacaccagctgtaacctctacttcctactcacaatatagagagaagcccagcattttctaccaacagtcgttgccaagtagtcatctaactgaagaggctaagaatgtttcagcggttcctggaccagctgaccagaagactgtgataccaattttaccctctactttctactcacacacagagaagcctggtgttttctaccaacaggtcttgccacatagtcatccaactgaagaggctctgaaaatttcagttgcctctgaaccagttgaccagacaactggcacaccaactgtaacctctacttcttactcacaacatacagagaagccgagtattttctaccaacagtcgttgccaggtagtcatctaactgaagaggctaagaacgtttcagcggttcctggaccaggtgaccggaagactgggataccaactttaccctctactttctactcacacacagagaagcctggtagtttctaccaacaggtcttgccacatagtcatctacctgaagaggctttggaagtttcagttgctcctggaccagttgaccagacgattggcacaccaactgtaacctccccttccagctcatttggagagaagcccattgttatctacaaacaggcctttccagagggtcatctacctgaagagtctctgaaagtttcagttgctcctggaccagttggccagacaactggcgcaccaactataacctctccttcctactcacaacatagagcaaagtctggcagtttctaccaactggcattgctaggtagtcaaatacctgaagaggctctcagagtttcttctgctcctggaccagctgaccagacaactggcataccaaccataacctctacttcctactcatttggagagaagccgattgttaactacaaacaggcctttccagatggtcatctacctgaagaggctctgaaagtttccattgtttctggacctactgaaaaaaagactgacataccagcaggacctttaggttccagtgcacttggagagaagcccattactttctaccggcaggctctgctagacagtcctctaaataaagaggttgtgaaagtttcagctgctcctggaccagctgaccagaagactgagacattaccagtacattctactagctactcaaatagggggaagcctgtcattttctaccagcagaccctatcagacagtcatttacctgaagaagctctgaaagttccacctgttcctggaccagatgcccagaagactgagacaccatcagtatcctctagtttatactcatatagagagaagcccattgtcttctaccaacaggccctgccagacagtgagctaactcaagaagctctgaaagtttcagctgttcctcaaccagctgaccagaagactgggttatctactgtaacttcctctttctattcacatacagagaagcctaatatttcttaccagcaagagttgccagatagtcatctaactgaagaggctctgaaagtttcaaatgttcctggaccagctgaccagaagactggggtatcaacagtaacctctacttcctactcacacagagagaagcccattgtttcctaccagcgagagttgccgcattttactgaagcaggtttgaaaattttaagagttcctggaccagctgaccagaagactggaataaacatcctgccctctaattcctacccacagagagagcactctgtcatttcttatgagcaggagttgccagatcttactgaagtaactttgaaagcaataggggttcctgggcctgctgaccagaagactgggatacaaatagcatcctctagttcctactcaaatagagagaaggccagtatttttcatcagcaggagttgccagatgttactgaagaagctttaaatgtttttgttgttcctggacaaggtgaccggaagactgagataccaacagtacctttaagttactactcacgtagagagaagcccagtgttatctctcaacaggagttgccagacagtcatctcacagaagaggctctgaaagtttcacctgtttctataccagcagagcagaagactgggataccaataggactgtctagttcctactcacattcacataaagagaaactcaagatttcaactgtgcatataccagatgaccagaaaactgagtttccagcagctacccttagttcctactcacaaatagagaagcccaagatttcaactgtgattggaccaaatgaccagaagactccatcccagacagcttttcatagttcctattctcaaacagtaaagcccaatattttatttcaacagcagttgccagatagagatcaaagtaaaggtattctaaagatttcagctgtccctgaactaactgatgtgaatactggaaaaccagtatctctctctagttcttattttcacagagagaaatcgaatattttcagtccacaggaattgccaggtagtcatgtaactgaagatgtgctgaaggtttcaacaattcctggaccagctggccagaaaacagtattaccaacagctcttcctagttccttttcacatcgagagaaaccagatattttctatcaaaaggatttgccagatagacatctaactgaagatgctctaaagatctcaagtgctcttgggcaagctgatcaaattaccggattacaaacagttccctctggtacttactcacatggtgagaatcacaagcttgtttcagaacatgtccaaaggctaatagataatttgaattcttctgactccagtgttagctcaaataatgtgcttttaaattctcaggctgatgacagagttgtaataaataaaccagaatctgcaggttttagagatgttggctctgaagaaatccaggatgcagaaaatagtgctaaaactcttaaggaaattcggacacttttgatggaggcagaaaatatggcactgaaacgatgcaattttcctgctccccttgcccgtttcagagatattagtgatatttcatttatacaatctaagaaggtggtttgcttcaaagaaccctcttccacgggtgtatctaatggtgatttgcttcacagacagccattcacagaggaaagcccaagcagcaggtgcatacagaaggatattggcacacagacgaatttgaaatgccggagaggcattgaaaattgggagtttattagttcaactacagttagaagtcctctacaggaagcagagagcaaagtcagtatggcattagaagaaactcttaggcaatatcaagcagccaaatctgtaatgaggtctgaacctgaagggtgtagtggaaccattgggaataaaattattatccctatgatgactgtcataaaaagtgattcaagtagtgatgccagtgatggaaatggttcctgctcgtgggacagtaatttaccagagtctttggaatcagtttctgatgttcttctaaacttctttccatatgtttcacccaagacaagtataacagatagcagggaggaagagggtgtgtcagagagtgaggatggtggtggtagcagtgtagattcactggctgcacatgtgaaaaaccttctgcaatgtgaatcctcactgaatcatgctaaagaaatactcagaaatgcagaggaagaggaaagccgggtacgagcacatgcctggaatatgaagttcaatttagcacatgattgtggatactccatttcagaattaaatgaagatgacaggaggaaagtagaagagatcaaggcagagttatttggtcatggaagaacaactgacttgtccaagggtttacagagtccacggggaatgggatgcaagccagaagctgtatgtagtcacattattattgagagccatgaaaagggatgtttccggactctaacttctgaacatccacaactagatagacacccttgtgctttcagatctgctggaccctcagaaatgaccagaggacggcagaacccatcatcatgcagagccaagcatgtcaacctttctgcatccttagaccagaacaactcccatttcaaagtttggaattccttgcagttaaaaagtcattccccatttcagaactttatacctgatgaattcaaaatcagcaaaggtcttcgaatgccattcgatgaaaagatggacccttggctgtcagaattagtagaacctgcttttgtgccacctaaagaagtggattttcattcttcatcacaaatgccgtccccagaacccatgaaaaagtttactacctccatcactttttcatctcaccgacattctaaatgcatttccaattcctctgttgttaaggttggtgttactgaaggtagccagtgtactggagcatctgtgggggtatttaattctcatttcactgaagaacaaaatcctcccagagatcttaaacagaaaacctcttccccttcatcatttaaaatgcatagtaattcacaagataaagaagtgactattttagcagaaggtagaaggcaaagccaaaaattacctgttgattttgagcgttcttttcaagaagaaaaacccttagaaagatcagattttacaggcagtcattctgagcccagtaccagggcaaattgtagcaatttcaaggaaattcagatttctgataaccatacccttattagcatgggcagaccaagttccaccctaggagtaaacagatcgagttccagactaggagtaaaagagaagaatgtaactataactccagatcttccttcttgcatttttcttgaacaacgagagctctttgaacaaagcaaagccccacgtgcagatgaccatgtgaggaaacaccattctccctctcctcaacatcaggattatgtagctccagaccttccttcttgcatttttcttgaacaacgagaactctttgaacagtgcaaagccccatatgtagatcatcaaatgagagaaaaccattctccccttcctcaaggtcaggattctatagcttcagaccttccgtctcccatttctcttgaacaatgccaaagcaaagcgccaggtgtagatgaccaaatgaataaacaccattttccccttcctcaaggtcaggattgtgtagtggaaaagaataatcaacataagcctaaatcacacatttctaatataaatgttgaagccaagttcaatactgtggtctcccagtcagccccaaatcactgtacattagcagcatctgcatctactcctccttcaaatagaaaagcactttcttgtgttcatataactctttgtcccaagacttcttccaagttggatagtggaactttagatgaaagattccattcattggatgctgcttctaaagcgaggatgaatagtgagtttaactttgacttacatactgtatcttcgagatcactggaaccaacctccaaattattgaccagtaaacctgtagcacaggatcaagaatctttaggttttctaggacctaaatcttcactggatttccaagtcgtacagccttctcttccagacagtaacactattactcaggacttgaaaaccataccttctcagaatagccagatagtaacctccaggcaaatacaagtgaacatttcagatttcgaaggacattccaatccagaggggaccccagtatttgcagatcgattaccagagaagatgaagaccccactttctgctttctctgaaaaattgtcatctgatgcagtcactcagataacaacagaaagtccagaaaagaccctattttcatctgagatttttattaatgctgaagatcgtggacatgaaattatagagcctggtaaccagaagctacgcaaagctcctgtcaagtttgcctcatcatcttcagtccaacaggttactttttctcgcggcacagatggccagcctttattattgccatataagccttctggtagtaccaagatgtattatgttccacaattaagacaaattcctccatctccggattccaaatcagataccaccgttgaaagctcccattcaggatccaatgatgccattgctccagacttcccagctcaggtgctaggcacaagagatgatgacctctcagccactgttaacattaaacataaagaaggaatctacagtaagagggtagtgactaaggcatccttgccagtgggagaaaaacccttgcagaatgaaaatgcagatgcctcagttcaagtgctaatcactggggatgagaacctctcagacaaaaaacagcaagagattcacagtacaagggcagtgactgaggctgcccaggctaaagaaaaagaatctttgcagaaagatactgcagattccagtgctgctgctgctgcagagcactcagctcaagtaggagacccagaaatgaagaacttgccagacactaaagccattacacagaaagaggagatccataggaagaagacagttcccgaggaagcctggccaaacaataaagaatccctacagatcaatattgaagagtccgaatgtcattcagaatttgaaaatactacccgttctgtcttcaggtcagcaaagttttacattcatcatcccgtacacctaccaagtgatcaagatatttgccatgaatctttgggaaagagtgttttcatgagacattcttggaaagatttctttcagcatcatccagacaaacatagagaacacatgtgtcttcctcttccttatcaaaacatggacaagactaagacagattataccagaataaagagcctcagcatcaatgtgaatttgggaaacaaagaagtgatggatactactaaaagtcaagttagagattatccaaaacataatggacaaattagtgatccacaaagggatcagaaggtcaccccagagcaaacaactcagcacactgtgagtttgaatgaactgtggaacaagtatcgggagcgacagaggcaacagagacagcctgagttgggtgacaggaaagaactgtccttggtggaccgacttgatcgtttggctaaaattcttcagaatccaatcacacattctctccaggtctcagaaagtacacatgatgatagcagaggggaacgaagtgtgaaggaatggagtggtagacaacagcagagaaataagcttcagaaaaagaagcggtttaaaagcctagagaaaagccataaaaatacaggcgagcttaaaaaaagcaaggtgctttctcatcatcgagctgggaggtctaatcaaattaaaattgaacagattaaatttgataaatatattctgagtaaacagccaggttttaattatataagcaacacttcttcggattgtcggccctcagaggagagtgagctgctcacagatactaccaccaacatcctttccggcaccacttctactgtcgaatcagatatattgacccaaacagatagagaggtggctctgcacgaaaggagtagctctgtttccactattgacactgcccggctgattcaagcttttggccatgaaagagtatgcttgtcacccagacgaattaaattatatagcagcatcaccaaccaacagaggagataccttgagaagcggagcaaacacagcaagaaagtgctgaatacaggtcatcccctagtgacttctgagcacaccagaaggagacacatccaggtagcaaaccatgtgatttcttctgactctatttcctcttctgccagtagtttcctgagctcaaactctactttttgcaacaagcagaatgtacacatgttaaacaagggcatacaagcaggtaacttggagattgtgaacggtgccaaaaaacacactcgagatgttgggataactttcccaactccaagttccagcgaggctaaattggaagagaacagtgatgtgacttcttggtcagaagaaaaacgtgaagagaaaatgctctttaccggttatcctgaggacagaaagttaaaaaagaacaagaagaattcccatgaaggagtttcctggtttgttcctgtggaaaatgtggagtctagatcaaagaaggaaaacgtgcctaacacttgtggccctggcatctcctggtttgaaccaataaccaagaccagaccctggagggagccactgcgggagcagaactgtcaggggcagcacctggacggtcggggctacctggcaggcccaggcagagaggctggcagagacctactgaggccatttgtgagagcaacccttcaggaatcgcttcagtttcacagacctgacttcatctcccgctctggggagcggataaagcgcctgaagttaatagtccaggagaggaagctgcagagcatgttacagaccgagcgggatgcactattcaacattgacagggaacggcagggccaccagaatcgcatgtgcccgctgcccaagagagtcttcctggctatccagaagaacaagcctatcagcaagaaggaaatgattcagaggtccaaacggatttatgagcagcttccagaagtacagaaaaagagagaagaagagaagagaaaatcagaatataagtcataccggctgcgagcccagctatataaaaagagagtgaccaatcaacttctggggagaaaagttccctgggactgacacaagtttattttcctcagagccttggaattctattttatgaacctagagaagcagaatccttacttttgtgagtctggttgaataaagcttattctttgtccatgtgtattttagaaatagtaacttctaaagagtctggaacaaagtggtgattaaaattcctaatggtttgggagcaatactttctgcatagtggccttgtccaatggcctgtgtgttacaatgatatgatcatttctcaagaataagtccctttttgtatgtgtttttatacttttagaaaataaaaactttagattaactc

SEQ ID NO: 184525 - DNA, 7797 bp, Artificial Sequence
  derived and/or modified sequence
aggcgggcggcactgcgcctaagctgggccacaaccgccagtcagggctctccccttcccctccctccccccctcctcctcctcctctgccgcccagagcgagacaccaacatggagcccgaggatctgccatggccgggcgagctggaggaggaggaggaggaggaggaggaggaggaggaggaagaggaggaggctgcagcggcggcggcggcgaacgtggacgacgtagtggtcgtggaggaggtggaggaagaggcggggcgggagttggactccgactctcactacgggccccagcatctggaaagtatagacgacgaggaggacgaggaggccaaggcctggctgcaggcgcaccccggcaggattttgcctccgctgtcgcccccgcagcaccgctactcggagggcgagcggacctccctggagaagattgttccattgacctgtcatgtatggcaacagatagtatatcaaggcaatagtagaacacaaatttctgatactaatgtggtctgtttggaaacaacagctcagcggggttctggggatgatcagaaaacagaatcttggcattgtcttcctcaagaaatggactcttcccaaaccttggatacatcccagactaggtttaatgtgagaacggaagatactgaagtgacagacttcccctctctggaggagggcatattgacgcaatcagaaaatcaagtaaaggaacccaacagagatctcttctgttctccactgctagtcatacaagatagctttgcttctcctgatttgcctttgctgacctgtttgacacaagaccaagaatttgcgcctgattctttatttcatcaaagtgaactaagttttgcacctctgaggggaattcctgataagtctgaagatactgaatggtcttctcgaccatcggaagttagtgaagctttattccaggctactgcagaagtagcttcagacttagcaagcagtcgctttagtgtatctcagcacccgcttataggcagcacagctgttgggtctcagtgcccttttttaccttctgaacaagggaataatgaagagactatttcgtctgttgatgaactgaaaattcccaaagactgtgatcgttatgatgatctttgttcatatatgtcatggaagacacgaaaagatacacagtggcctgaaaacaatttagctgataaagatcaagtttcagttgcaacttcatttgacataactgatgaaaacatagctactaaaagaagtgaccattttgatgctgctcgttcatatgggcagtattggacacaggaagattcatctaagcaggcagaaacatatttaaccaagggcctgcaggggaaggttgagtctgacgtcattactctggatggcctaaatgaaaatgctgttgtatgcagtgaaagagttgctgaactacaaagaaagccaacaagagagtcggaatatcactcttcagatctcagaatgttgaggatgtctcctgacactgtgccaaaggctcctaaacatttaaaagcaggagacacttctaaaggaggcatagctaaagttactcaatccaacttgaagtcaggcatcactaccactcctgttgattcagacattggatctcatttatccttgtcccttgaggacctgtctcagttggctgtaagttctctagaaactactactggtcaacacactgatactctcaaccaaaagacattagcagatactcatctaactgaagagactctgaaagtcacagctattcctgaaccagctgaccagaagactgcaacaccaacagtactctctagttcccactcacatagggggaagcccagcattttctaccagcagggcttgccagacagtcatctaactgaagaggctttgaaagtttcagctgctcctggactagctgaccagacaactggcatgtcaactctaacctctacttcctactcacatagagagaagcctggtactttttaccaacaagagttaccagagagtaacttaaccgaagagcctttggaagtttcagctgctcctggcccagtggagcagaagacgggaatacctacagtatcctctacatcccactcacatgtagaggacctcctctttttctatcgacagaccttgccagatggtcatctaactgatcaggctctgaaagtctcagctgtgtctggaccagctgaccagaagactgggacagcaacagtactctctactccccactcacatagagagaagcctggtattttttaccaacaagagttcgcagacagtcatcaaactgaagagactcttactaaagtttcagccactcctggaccagctgaccagaagactgagataccagcagtacagtctagttcttactcacaaagagaaaagcctagtattttgtacccacaggacttagcagacagtcatctacctgaagagggtctgaaagtttcagctgttgctggaccagctgaccagaagactggcctaccaacagtaccctctagtgcatactcacacagagagaagctccttgttttctaccaacaggccttgctggacagccatctacccgaagaggctctgaaagtttcagctgtttctggaccagctgacggaaagactgggacaccagctgtaacctctacttcctctgcgtcctcttcacttggagaaaagcccagtgctttctatcagcagaccttacccaatagtcatctaactgaagaggctctgaaagtatcaattgttcctggaccaggtgatcagaagactgggataccctcagcaccatctagtttctactcacacagagagaagcccattattttttcccagcagaccctgccagactttcttttccctgaagaagctctgaaggtttcagctgtttctgtattggctgcccagaagactgggacaccaacagtgtcctctaattctcactcacatagcgagaaatctagtgttttctaccagcaagagttgccagacagtgatctacctagagaatctctgaaaatgtctgctattcctggactgactgaccagaagactgtcccaacaccaacagtaccttcaggttccttctcacatagagagaagcccagtattttctatcaacaggagtggccagatagttatgcaactgaaaaggctctgaaagtttcaactggccctggaccagctgaccagaagactgagataccagcagtacagtctagttcttacccacagagggagaagcctagtgttttgtacccacaggtgttatcagacagtcatctacctgaagagagtctgaaagtttcagccttccctggaccagctgaccagatgactgacacaccagcagtaccgtctactttctactcacaaagagagaagcctggtattttctaccaacagaccttgccagagagtcatctgcctaaagaggctctgaaaatttcagtagctcctggactagcagaccagaagactggcacaccaactgtaacctcaacttcctactcacaacatagagaaaagcccagcattttccaccagcaggccttgccaggtactcatatacctgaagaggctcagaaagtttcagctgttactggaccaggtaaccagaagacttggataccaagagtactttctaccttctactcacaaagagagaaacctggtattttctatcaacagaccttgccaggtagtcacatacctgaagaggcacagaaagtttcacctgttcttggaccagctgaccagaagactgggacaccaactccaacctctgcttcttactcacacacagagaagcctggtattttctaccaacaggtcttgccagataatcatccaactgaagaggctctgaaaatttcagttgcctctgaaccagttgaccagacaactggcacaccagctgtaacctctacttcctactcacaatatagagagaagcccagcattttctaccaacagtcgttgccaagtagtcatctaactgaagaggctaagaatgtttcagcggttcctggaccagctgaccagaagactgtgataccaattttaccctctactttctactcacacacagagaagcctggtgttttctaccaacaggtcttgccacatagtcatccaactgaagaggctctgaaaatttcagttgcctctgaaccagttgaccagacaactggcacaccaactgtaacctctacttcttactcacaacatacagagaagccgagtattttctaccaacagtcgttgccaggtagtcatctaactgaagaggctaagaacgtttcagcggttcctggaccaggtgaccggaagactgggataccaactttaccctctactttctactcacacacagagaagcctggtagtttctaccaacaggtcttgccacatagtcatctacctgaagaggctttggaagtttcagttgctcctggaccagttgaccagacgattggcacaccaactgtaacctccccttccagctcatttggagagaagcccattgttatctacaaacaggcctttccagagggtcatctacctgaagagtctctgaaagtttcagttgctcctggaccagttggccagacaactggcgcaccaactataacctctccttcctactcacaacatagagcaaagtctggcagtttctaccaactggcattgctaggtagtcaaatacctgaagaggctctcagagtttcttctgctcctggaccagctgaccagacaactggcataccaaccataacctctacttcctactcatttggagagaagccgattgttaactacaaacaggcctttccagatggtcatctacctgaagaggctctgaaagtttccattgtttctggacctactgaaaaaaagactgacataccagcaggacctttaggttccagtgcacttggagagaagcccattactttctaccggcaggctctgctagacagtcctctaaataaagaggttgtgaaagtttcagctgctcctggaccagctgaccagaagactgagacattaccagtacattctactagctactcaaatagggggaagcctgtcattttctaccagcagaccctatcagacagtcatttacctgaagaagctctgaaagttccacctgttcctggaccagatgcccagaagactgagacaccatcagtatcctctagtttatactcatatagagagaagcccattgtcttctaccaacaggccctgccagacagtgagctaactcaagaagctctgaaagtttcagctgttcctcaaccagctgaccagaagactgggttatctactgtaacttcctctttctattcacatacagagaagcctaatatttcttaccagcaagagttgccagatagtcatctaactgaagaggctctgaaagtttcaaatgttcctggaccagctgaccagaagactggggtatcaacagtaacctctacttcctactcacacagagagaagcccattgtttcctaccagcgagagttgccgcattttactgaagcaggtttgaaaattttaagagttcctggaccagctgaccagaagactggaataaacatcctgccctctaattcctacccacagagagagcactctgtcatttcttatgagcaggagttgccagatcttactgaagtaactttgaaagcaataggggttcctgggcctgctgaccagaagactgggatacaaatagcatcctctagttcctactcaaatagagagaaggccagtatttttcatcagcaggagttgccagatgttactgaagaagctttaaatgtttttgttgttcctggacaaggtgaccggaagactgagataccaacagtacctttaagttactactcacgtagagagaagcccagtgttatctctcaacaggagttgccagacagtcatctcacagaagaggctctgaaagtttcacctgtttctataccagcagagcagaagactgggataccaataggactgtctagttcctactcacattcacataaagagaaactcaagatttcaactgtgcatataccagatgaccagaaaactgagtttccagcagctacccttagttcctactcacaaatagagaagcccaagatttcaactgtgattggaccaaatgaccagaagactccatcccagacagcttttcatagttcctattctcaaacagtaaagcccaatattttatttcaacagcagttgccagatagagatcaaagtaaaggtattctaaagatttcagctgtccctgaactaactgatgtgaatactggaaaaccagtatctctctctagttcttattttcacagagagaaatcgaatattttcagtccacaggaattgccaggtagtcatgtaactgaagatgtgctgaaggtttcaacaattcctggaccagctggccagaaaacagtattaccaacagctcttcctagttccttttcacatcgagagaaaccagatattttctatcaaaaggatttgccagatagacatctaactgaagatgctctaaagatctcaagtgctcttgggcaagctgatcaaattaccggattacaaacagttccctctggtacttactcacatggtgagaatcacaagcttgtttcagaacatgtccaaaggctaatagataatttgaattcttctgactccagtgttagctcaaataatgtgcttttaaattctcaggctgatgacagagttgtaataaataaaccagaatctgcaggttttagagatgttggctctgaagaaatccaggatgcagaaaatagtgctaaaactcttaaggaaattcggacacttttgatggaggcagaaaatatggcactgaaacgatgcaattttcctgctccccttgcccgtttcagagatattagtgatatttcatttatacaatctaagaaggtggtttgcttcaaagaaccctcttccacgggtgtatctaatggtgatttgcttcacagacagccattcacagaggaaagcccaagcagcaggtgcatacagaaggatattggcacacagacgaatttgaaatgccggagaggcattgaaaattgggagtttattagttcaactacagttagaagtcctctacaggaagcagagagcaaagtcagtatggcattagaagaaactcttaggcaatatcaagcagccaaatctgtaatgaggtctgaacctgaagggtgtagtggaaccattgggaataaaattattatccctatgatgactgtcataaaaagtgattcaagtagtgatgccagtgatggaaatggttcctgctcgtgggacagtaatttaccagagtctttggaatcagtttctgatgttcttctaaacttctttccatatgtttcacccaagacaagtataacagatagcagggaggaagagggtgtgtcagagagtgaggatggtggtggtagcagtgtagattcactggctgcacatgtgaaaaaccttctgcaatgtgaatcctcactgaatcatgctaaagaaatactcagaaatgcagaggaagaggaaagccgggtacgagcacatgcctggaatatgaagttcaatttagcacatgattgtggatactccatttcagaattaaatgaagatgacaggaggaaagtagaagagatcaaggcagagttatttggtcatggaagaacaactgacttgtccaaggggttgcaatcctag

SEQ ID NO: 184526 - DNA, 12504 bp, Artificial Sequence
  derived and/or modified sequence
atggagcccgaggacctgccctggcccggcgagctggaggaggaggaggaagaggaagaagaagaggaggaggaggaggaggaggctgcggcagccgcggcagccaatgtcgacgatgtggttgtggtggaggaagtcgaagaagaggccggccgcgagctcgatagcgactcccactacggtcctcagcacctcgagagcattgatgatgaagaggatgaagaggccaaggcctggctacaagcacatcccgggcgcatcctgccaccactgagccccccccaacacaggtactctgagggcgaacgaacttctctagaaaagattgttcccctcacatgccacgtgtggcagcagattgtgtatcaggggaacagtaggacacagatatctgacacgaatgtggtttgtttggaaacaactgcccagcgaggctcaggagatgaccagaagactgaatcctggcattgcttaccccaggagatggattcctcacagacactcgacactagccaaacgaggttcaatgtgcggaccgaagacaccgaggtaaccgatttccctagccttgaagaagggatactcacacaaagcgagaaccaggtcaaagagcccaaccgtgatctgttctgctcccctctgctagtgattcaagactccttcgctagcccggacctgcctctcctgacgtgtctgactcaggaccaggagtttgctcctgattccctgttccaccagagtgagctgagcttcgcacccctcagaggcattccggataaatcagaagacacagaatggtcttcccgacccagtgaagttagtgaggccctcttccaggctaccgcagaggtggctagcgacctcgcatccagtcgctttagcgtttcccagcaccctttgattggatcaaccgccgtggggagccagtgccccttcctccccagcgagcagggaaataacgaagaaacaatctcctcggtcgatgagcttaagatccccaaggactgcgatcgctacgacgacctgtgctcatatatgagctggaaaacaaggaaagatactcagtggccagagaacaacctcgccgacaaagatcaggtctccgtcgccacgtcatttgacatcaccgatgagaatatcgcgactaaaagatctgaccatttcgacgcggcccgctcttacggacaatactggacccaggaagactccagcaaacaggctgaaacttacctcacaaaaggcttacaaggcaaagtggaaagtgatgtgattactctggacggccttaatgaaaacgctgtggtgtgctctgagagagtggctgaattacagagaaagcctacacgggaatctgaatatcacagctccgacttaaggatgttgcgtatgagtccggatactgtccccaaagcgcccaaacatcttaaggctggcgatacgagtaagggaggcatcgctaaggtgactcagtcaaatcttaagagtggtatcactacaacccccgttgactccgatatcggcagccacttgtcgcttagtctcgaggatctgtctcagttggccgtctctagtctcgaaacaactaccgggcagcacacagacactcttaaccagaaaacactggccgacacccacctgaccgaggagacactgaaggtaactgcgattcccgaacctgccgaccaaaagacagccacgccaaccgtgctaagttcctcacacagccataggggcaaaccaagcattttttatcaacaggggttaccagattcacacctcacagaagaagcacttaaagtgtctgcagcccctggactcgctgatcagacaacaggcatgtctactctcacgtccaccagctactctcaccgagaaaagccaggcacattttatcaacaggaactcccagagagcaacttgacggaggaaccactggaagtatctgccgcgcccggacccgtggaacagaagacaggcattcctaccgtttcctcgacatcacacagccacgtagaggatcttttgttcttttatcggcaaacccttcctgatggacacctcactgatcaagccttaaaagtttctgccgtgtccggccctgctgaccagaaaacaggcacggcaaccgtgttatcgaccccccatagccaccgcgagaagcctggaatcttttaccaacaggagtttgcggatagtcatcagactgaagaaactctcactaaggtttccgccacccccggaccggccgaccagaagaccgaaatccctgcagttcagtcatcttcctattcacaaagggaaaagccatcaattctttacccccaggacctggcagacagtcatttaccagaagaaggcttgaaggtctccgctgtggccgggccagcagaccagaagaccggtttgcctactgtacctagctccgcctatagccatcgggagaagctcctcgtcttttatcaacaggcgctgctcgattctcacttgcccgaggaggctctaaaagtaagtgccgtgtcaggacctgccgatggcaaaactggaaccccggctgtgacatctaccagttctgccagtagtagtctgggcgagaaacctagcgccttctaccagcagacacttccgaactcgcatctgacggaagaagccctgaaggtatctatcgtccccggacctggggatcaaaagactgggattccctccgcccccagctccttctatagtcatcgcgagaagcccattatattcagtcagcagacactccctgattttttgtttcccgaggaggcactcaaagtgtctgctgtgtctgtgctcgcggctcagaagacagggacaccaaccgtcagttctaatagccattcccattcagagaagtcgagcgtgttctaccagcaggaactccctgattccgacctccctcgcgagtctctcaagatgtctgccattcccggtctgactgaccaaaagacagtgccaacacccacagtgccgtcagggagcttctcccatcgtgagaagccgtcgattttttaccagcaggaatggccagattcctatgccacggagaaggctctgaaggtgtccaccggacctggacctgcggatcagaagacggaaattccggctgtgcagtctagctcctacccccagcgagagaagccttccgtactgtaccctcaggtgctcagcgactctcacttgcccgaggagagtctgaaggtcagtgcctttccagggcctgccgaccagatgactgatacccctgccgtgccctccacattttactctcagcgagaaaaaccaggtattttttaccaacagacgctacccgagtctcacctccccaaagaggccctgaagatctccgtcgctcctggcttggctgaccagaagacaggaactcccactgttacgtctacatcttattcccagcatagggagaagccatctatttttcatcagcaggcacttccgggaacgcacatcccagaggaggcacaaaaggtctcagctgtcaccggtcctgggaatcagaagacctggatcccaagagtcttgagtaccttctactcacaaagagaaaagccggggattttttaccagcagactctgccaggctcccacatacctgaggaggcacaaaaggtatcccccgtgttgggacccgccgaccagaagacaggcacaccaactcctacaagtgcgagttactcccatacagagaaaccgggaatcttttaccagcaggttctgcctgataatcacccaaccgaggaagccctgaaaattagtgtggctagcgagcccgttgatcagaccactggcaccccggccgttaccagtactagttactcacagtatagggaaaagccaagcatcttttatcagcagtcactgccgtccagccatctaacggaggaggctaagaatgtgagtgctgttcctgggcccgcagatcagaagactgtaatcccaatcctcccgtcaaccttctattcacatacagagaaaccgggggttttttaccagcaggtgctgccccactctcacccgaccgaagaggctctgaagatctctgtggccagcgagcccgtcgatcagaccactggcaccccaactgtgacatccacatcttatagccagcacacagaaaagcctagcatcttctaccaacagtcattgccaggctcccatctcacggaggaggccaagaatgtgtccgccgtacccggccctggcgatcgcaagaccgggattcctactctgccgagtacgttttactcacatacagagaagcctggctccttctatcagcaagtcctgccccatagccacctcccggaggaggccctggaagttagcgtagctccagggcctgttgaccagacaatcggtacgcctaccgtcaccagcccgtcatcaagcttcggggaaaagcccatcgtcatctataagcaggccttcccagaaggccacctgccggaggagagcctcaaagtctccgtagcccctggcccagtggggcagacaaccggggcccccacaatcacctccccaagttactcccagcacagggccaagagcggatcattctaccaactcgcgttgctcggcagtcagataccagaggaagccttgcgggtttcatctgcgcctgggcccgcagaccaaacaaccgggattcccaccataaccagtacctcatatagcttcggcgagaagccaattgtcaattataaacaggctttcccagatggccacctgccagaggaagctctgaaggtgagcattgtgagcggccctaccgaaaagaaaaccgatattcctgccggccctttgggatcttccgccctgggagaaaagccaattaccttttacaggcaggccttgcttgacagccccctgaacaaggaagtggtcaaggtgtctgccgccccagggcctgctgatcagaaaacagagacactgccagtacactccacttcttatagtaaccgcggcaagcctgtaatcttctatcaacagacactgtcagactctcatctgcccgaagaggctttgaaggtccctcctgttcccggaccagatgcccagaagaccgaaactccttcagtgtccagcagcttgtacagttaccgcgaaaagccaatcgtgttctatcaacaggctctccccgattcggagctgacccaagaggcacttaaagttagcgctgttccgcagcccgccgaccagaagaccggtctgtccactgtcacgtcatccttttattctcataccgaaaaacccaacatcagttatcagcaggaacttcctgatagccacctgacagaagaggcgctaaaagtgtcgaacgttcccggaccagccgatcaaaaaacaggcgtctcaaccgtgacaagcacctcttatagccatagagaaaaacctatagtaagttatcagagggagctcccccactttacggaagccggcctgaagattctgcgggtccccgggcccgctgaccagaagacgggaatcaacatccttccctccaactcgtatccccaaagggaacactcagtgatttcctacgaacaggaactccctgaccttacagaagtcactttgaaggcaattggggtgccaggtccagccgatcagaaaaccggaatccagattgcaagttcatccagctacagcaacagagaaaaagccagtattttccaccaacaggagcttcctgacgtgactgaggaagcgttaaacgtgttcgtagtccccgggcaaggcgaccggaaaactgagatacccacagtcccgctcagttattactctagaagagagaaaccaagcgtgatctcccaacaggagttgccagattcacatttgactgaggaggctctaaaagtgtctccagtgagtattcctgcggaacaaaaaacaggtataccaatcggcttgagctcctcgtactcccatagtcataaggagaaactaaaaatctcgaccgtccacatccctgatgaccagaagactgagtttccggcagccacgctctcgtcatactcacaaatagagaaacctaagataagtaccgtgattggaccaaacgaccagaagacgccatcccagacggccttccactcatcctactcacaaaccgtgaagccaaatattttgtttcaacagcaactgccagatcgcgatcagtccaagggcattttaaaaatcagcgcggtgcccgagctgaccgatgtgaacacagggaaacccgtgagtctgagctcttcgtactttcatcgagaaaagtcaaacatcttttccccgcaagaactgcctggaagtcacgtgacggaagacgtcctcaaagtcagcacaatcccggggccggccgggcagaagaccgtgctccccacagcgctgccatccagcttttcccaccgcgagaagccagatatcttctatcaaaaggatctccccgacagacatcttacagaggacgcattgaaaatttcgtctgcactgggccaagctgatcagatcactggtttgcagaccgttccctcgggcacttacagccacggtgagaaccataaactggtgagcgagcatgtgcagaggctgatcgacaacttaaactcttccgactcatcagtgtcgtcaaacaatgtgcttctaaactctcaggccgacgaccgcgtggttatcaataagcccgaatccgcaggatttagagacgtgggctcagaagagattcaggatgcggagaacagcgctaaaacactgaaagagatccgcacactgctgatggaggctgagaacatggcgctcaagcgctgtaattttcccgctcccctggccagattcagagatatatctgacatttctttcatccagagtaagaaggtggtgtgtttcaaagagccatccagcactggagtgtcgaacggggacctactgcacaggcagcccttcacggaggaatcccccagtagtcgatgtattcagaaagacataggaactcagactaatctcaagtgcagacgcggaatcgagaattgggagttcatctcaagcactacagtgcggtcccctctgcaagaagcggagagtaaggtgtctatggcactggaagagacattgcgtcagtaccaagcagcaaagtccgtgatgagatcagagcccgagggctgctccggcacgatcggcaacaagatcattatccctatgatgaccgtgatcaaatctgattcatcttccgacgcttccgacggaaatggctcctgctcatgggactctaatttgcctgagtcccttgagtcagtctcggatgtgttgttgaacttcttcccctacgtgagccccaagacaagcataaccgattctcgggaagaggaaggcgtttctgagtcagaagatggtggggggagcagtgtggacagcttagctgcccatgtcaagaacctactgcagtgcgaatctagtttgaaccacgcaaaggagatcctgcgaaacgccgaagaggaggagagtcgtgttagggcacacgcgtggaacatgaaattcaacctcgcccacgactgtgggtactctattagcgagctgaatgaggacgaccgacgtaaagtcgaagagatcaaggccgaattgtttggacatggaagaactaccgacttgtccaaaggactgcagtcaccaaggggtatgggatgtaaaccggaggccgtgtgtagtcatataataattgagagtcacgaaaagggatgcttcagaaccctgacctccgagcacccgcaacttgacaggcacccgtgtgccttccggagtgctggcccaagcgagatgactagaggcaggcaaaacccttcaagctgtagggctaaacacgtgaacctttctgcatccttggaccagaacaactctcatttcaaagtctggaattctttgcagctgaaatcccacagtcctttccagaactttattcctgacgagtttaagatttcaaaggggcttcggatgcctttcgatgagaaaatggatccctggcttagcgagctggtggagcctgcatttgttcctccaaaagaggtggatttccactcgtcatcacagatgccatctcccgaacctatgaagaagtttactaccagtatcactttttcatcacaccgacattcaaagtgcatctccaactctagcgttgtcaaggtgggtgtgacagaaggttctcagtgtacaggtgcctctgttggcgtcttcaactcacactttaccgaggagcagaatccccccagggaccttaagcagaagacatcatccccaagttctttcaaaatgcatagcaattcccaggacaaggaagtgacaatacttgctgaagggcggcggcagtctcagaagctcccagtcgatttcgagaggagttttcaggaggagaaacccctagagaggagtgatttcaccggatcccattcggaaccctccacgagggccaattgttcaaatttcaaagaaatacagatcagcgacaatcatacacttattagtatgggccggccgagttctacccttggcgtcaatcgctccagtagcagattgggagtgaaagagaaaaatgtgacaattaccccagatcttccaagctgcatatttctagagcagcgtgagctgttcgagcagagcaaagctccacgcgctgatgaccacgtcaggaaacatcattcgccatcaccccagcatcaggattacgtcgccccggatctcccatcttgtatcttcctggagcagagggagctgtttgaacagtgtaaagctccttatgtcgaccaccaaatgcgcgagaaccattctccacttccccagggacaagacagcatcgcatccgatcttcctagccccatcagcttagaacagtgccagtccaaagctccaggggttgatgatcagatgaacaagcatcactttcccctgccacagggccaggattgtgtggtcgagaaaaataaccagcataagcccaagtcccatatctctaatattaatgtggaggccaaattcaacactgtagtcagtcagtcagctccaaatcattgcacactagcggccagtgccagcactccaccgtccaatcggaaggccctgagttgcgtacatatcaccctctgtccgaagacatccagtaaactggatagcggtacccttgatgagcggttccactcattggacgcggcaagcaaagctaggatgaactccgagttcaacttcgacctgcatactgtgtcatcaagatccctggagccaacatctaagctgctgacatctaaacctgtcgcacaggaccaggagtccttgggatttctgggacccaagtcatccctggatttccaggtcgttcaacccagcctccccgatagtaataccataactcaggacctgaagaccattccttcccagaacagtcagattgtgacatctaggcagattcaggtaaatatcagcgattttgaaggacactcaaacccagaaggcaccccagtgtttgctgaccggcttcccgagaagatgaagacgcccctcagtgctttcagtgagaagctctcttctgacgcggtaacacaaattactaccgaaagcccagagaagacactgttttcatctgagatttttattaacgcagaggaccggggacacgaaattatagagcccggcaatcaaaaactccgcaaagccccagtgaaattcgccagtagctctagcgtgcaacaggtgacgttttctcgagggactgatggtcaaccactgcttctgccatacaagccctccgggtcgactaaaatgtactacgttccgcaactgcgtcagattcccccctctccggacagcaagtccgatactaccgtggaatcatcccattccggctccaacgacgccatcgccccggattttccggctcaggtgctgggcactcgagatgatgatctgtcggccactgttaatatcaagcataaagaaggcatctattctaagagggttgtgaccaaggcttcccttccagttggcgaaaaacccctacagaacgagaacgcagatgcaagcgtgcaggtgctgattaccggcgatgagaatctttccgacaagaagcagcaagagattcactctaccagggcggtgactgaggcggctcaagccaaggaaaaggagtcacttcagaaggacacagccgatagttcggccgcggcagcagctgagcactctgcacaggtgggcgatccagagatgaaaaacctacccgatacaaaagcgattacacagaaggaggagatccaccgcaagaagacggttcctgaggaagcatggccaaataacaaggagtcgctccagattaacatcgaggaatcggaatgccattcagaatttgaaaatacaacccgtagtgtttttcgctctgctaaattctacatccatcaccctgtgcatctgccatcagatcaagatatttgccacgaatccctcggtaagtccgtgttcatgcggcactcctggaaagacttttttcagcaccatccggataagcatagggagcacatgtgcctgccattgccctaccagaatatggataagacaaaaactgattacacccggataaagtccttgtcaattaatgtgaatctgggcaacaaggaagtgatggataccactaaatcacaggtccgagattaccctaagcacaatggccaaatatccgatccgcagcgggatcagaaagtgacccccgagcagaccacccagcacactgtgtcattaaatgagctctggaataaatacagagaacgtcagaggcagcagcgtcagcccgaacttggcgacaggaaagaactgtctcttgtggaccgactcgaccgcctggctaagatcctgcagaatccaattactcactctcttcaggtttcggaaagtactcacgatgattcccgcggtgaacgcagcgtcaaggagtggtccggccgccagcagcagagaaacaagctccaaaagaaaaagaggttcaagtcgctagagaaatcccacaaaaatactggtgaactcaagaagtccaaagtgcttagtcaccatagggcaggtagaagtaatcagattaaaattgagcagataaagtttgacaaatacattctgtccaaacagcccggcttcaattacattagcaatacgagcagcgattgtcgaccttcagaagagtccgaactcctgaccgacaccaccacgaacatcttaagtggaaccacttcgacggtagagtccgacatcctgactcagaccgatcgcgaggtggctctgcacgaaaggagtagctccgtctccacgatagatactgcgcgcctgatacaggccttcgggcacgagagggtctgcctcagcccccgtcggatcaaactctatagttccatcacaaaccagcagcggcgatacctggagaagcgatctaagcactctaaaaaagtgcttaatactggtcatcctcttgtgacctccgaacatacgcgtcgacggcacatccaggtggccaatcatgtcatctctagtgacagcatcagctcctccgcatcctcttttttgtcctctaactctacattctgcaacaagcagaatgttcacatgctcaataaaggtattcaggccggaaacctggaaatcgtgaacggggctaagaaacatacccgggatgtaggcatcacattccccactcctagttcatccgaggcaaagctggaagaaaactccgatgtgacgtcctggtctgaggagaagagagaggagaaaatgctattcaccggctatccggaggataggaagctgaaaaaaaataaaaagaacagccacgagggagtgagttggttcgttcctgtcgaaaatgtggagagtcgcagcaaaaaggaaaacgtgcccaatacatgtgggcccgggatatcttggttcgaaccgatcacgaaaacacggccctggagagagccactaagggaacagaactgccaggggcagcatctcgatggacgaggttatctggcaggccccggtcgcgaggccgggagggatcttctgcgcccattcgtcagagcaactctgcaggagtccctgcagttccataggccggactttattagccggtctggcgagagaattaaacgcctaaaactgatcgtccaggaaagaaaactgcaaagcatgctgcaaactgaacgcgacgcactcttcaacatagacagggagcgccagggacatcagaatcggatgtgcccactgcctaagcgggtgttcctggccatccaaaagaacaaaccaatctccaagaaggagatgatccagcggagcaaaagaatctacgagcagttgcctgaagtacagaagaaacgcgaagaggaaaaaagaaagtctgagtataagagctatcgtctccgggcccaactgtacaagaaaagggtgaccaaccagctgctgggtaggaaagtaccctgggactag

SEQ ID NO: 184527 - DNA, 7686 bp, Artificial Sequence
  derived and/or modified sequence
atggagcccgaggacctgccctggcccggcgagctggaggaggaggaagaggaagaagaagaggaagaggaggaggaagaggaggctgctgctgccgcagcggctaatgtggatgacgttgttgtggtggaggaagtcgaagaggaggcgggtcgcgagctggactccgattcacactacggaccacaacatctggagagcatcgacgatgaggaggatgaagaggctaaggcttggctgcaggctcacccaggacgcatactgccgcccctgtccccccctcagcacaggtacagcgaaggagaaagaacgagtttagagaagatcgtacccctgacgtgccacgtttggcagcagatcgtctaccagggcaattcgaggacacagatctccgacacaaacgtggtgtgcctggaaaccaccgcccaaaggggtagcggggatgaccagaagactgaatcttggcattgcctgccacaagagatggactcgtcccaaaccctggatacatctcagacccggttcaacgtgagaaccgaggatacagaggttacagattttcccagtctggaagagggtatcctgactcagtctgaaaaccaggttaaagagccaaatcgtgatctgttctgtagtcctcttttggtaattcaggacagcttcgcatccccagacctgcctcttctgacctgcctgacccaagaccaagaatttgctccagactcactcttccaccagtccgaactttcctttgcaccactccgaggaatcccagataagtcagaggacaccgagtggtcatcacgtccatccgaagtcagtgaggcgttgttccaggctaccgccgaggtagcaagtgacctggcctcctcccgcttttctgtttcccaacaccctctgattgggagtacggccgtagggagccagtgtccattcttaccaagcgagcagggaaataatgaggagacaatatcatcagtggatgaactgaaaattccaaaagactgcgataggtacgatgatctatgctcttacatgtcctggaagacaagaaaggatacccagtggccagagaacaatttggccgacaaggatcaggtgagcgtcgccacgtcgttcgacatcaccgacgaaaatattgctactaagcgcagcgaccactttgatgctgccagatcttatgggcagtactggacccaggaagattctagtaaacaggctgagacctacctgacaaagggcctgcaagggaaggtcgaaagtgatgtaatcacattggatggactgaatgagaatgctgtggtgtgctcagagagggttgcagagcttcagagaaagcccacccgtgagtctgaatatcacagctcggatcttcgaatgctgagaatgtcaccagataccgtccccaaagctccaaagcacctgaaggctggcgatacatcgaagggcggcatcgccaaggtaactcagtccaacctaaaatctggaatcactacaactcccgtggactctgacataggcagtcacctttctttgtcgctggaggacttatcccaactcgccgtgtccagcttggaaacaactaccggtcaacataccgacaccctgaatcagaagacgcttgcagatacgcacctgactgaagaaacactgaaagtcacagctatacccgagcccgcggaccagaaaactgcaacgcctactgttctctcctcctcacactcccatcgcgggaagccctctatattctaccagcaaggcctcccagattcccacttgacagaagaggcccttaaggtatccgctgcaccaggtttagctgaccagacaacaggcatgagcaccttaacgtcaacttcctatagtcacagagaaaaacctgggacattttatcagcaagaactccctgagtccaatctcacagaggagcccctagaagtgagtgccgctcctggacccgtcgaacagaagacagggatcccaacggtgagtagtacctctcactctcatgtggaggacctgctttttttctaccgccagactttaccggacggacacctcacagaccaggctcttaaagtctctgccgtgtcaggtccggccgatcagaaaacagggaccgccacagtactttcaaccccccactcccaccgggaaaagccaggaatcttctaccaacaggaattcgcagactcgcaccagacagaagagacactgactaaagtgtccgcgacccctggccctgccgatcaaaagacagagatccctgcagtgcaaagcagctcttacagccagcgcgagaagcccagtatactgtatccacaggacctcgccgacagccacctgccagaggagggcttgaaggtatccgctgtggcaggcccagccgatcaaaagaccgggctgccaaccgtcccatcttctgcctacagtcaccgggagaagctgcttgttttctaccagcaagccctcttagactctcacctgcccgaagaggctttgaaagtctctgccgtttctggaccggctgatggaaaaacaggaacacccgccgttacttccacttccagtgcatcttcaagccttggcgagaaaccatcagcattctaccagcagaccttgccaaacagccatctcacagaagaagctctgaaagtgtcaatcgtgcccggacctggggatcagaagaccgggatcccatctgcccccagcagcttttacagccatcgggaaaagcctattatctttagccagcagacactacccgacttcttgttccctgaggaagcacttaaggtgtctgccgtgagtgtgctcgctgcccagaaaacggggaccccaaccgtcagttcaaatagccactcgcattctgagaaatcaagcgtgttttatcagcaagaactgcccgactccgatctacccagggagtccttgaaaatgtccgctatccccggattaacagaccaaaagacagtgccaacaccaaccgtcccgtcagggtcgttctcccatcgtgaaaagccctctattttttatcagcaggagtggcctgatagctatgccacggagaaggccttgaaagtgtctactggcccgggcccggctgaccagaagacggagattcctgccgtccaaagctcgtcttatcctcagcgcgagaaaccctctgtcctatatccgcaggtgttgtcagattctcacttgcctgaggaatctctgaaggtttcagctttccccggccccgccgaccagatgactgacactcctgctgtgccaagcaccttctactcccagagagaaaaaccggggatcttctaccagcagactctgcctgagtcccatctgcccaaggaagccctgaaaatcagcgtggcgccgggacttgcagatcaaaagaccggtactcccaccgtcacttccaccagctactcccaacatagggagaaaccctccatttttcatcagcaggcattacctggcacccatattccggaagaagcccagaaggtcagcgccgtcacgggtcctgggaaccagaagacttggattccacgtgtgctcagtacattctactcacagcgtgagaagcctggcatcttttatcagcaaactctgccagggtcgcacatccccgaggaagctcaaaaggtgtcccctgtgctaggccctgctgaccagaaaacaggaactccgaccccaacctctgcatcgtacagccatactgagaagcctggaatattctaccagcaggtgttgcctgataatcaccccacggaagaagccctgaagattagcgtcgcttctgagcccgtggaccagacaacaggcactccagcagtcacttccacgtcatactctcagtaccgagagaagcctagcattttctatcagcagagcctgccaagctctcacctgacggaggaggccaaaaatgtttcagcagtgccaggaccagccgaccaaaagaccgtgattccaatcttaccaagtacattctacagtcacaccgagaagccaggagtgttctatcaacaggtgttacctcactcccacccaacagaggaggcattgaagatctctgtggccagcgagcctgtcgaccaaactaccggcacccccacagtgacttctacgtcatactctcagcacacggagaaaccctcgatcttctaccagcagtctttgccaggaagccatcttaccgaagaggctaagaacgtgtcagccgtgccgggccctggtgacagaaaaaccggtatacctaccctgccatccacgttctactcccacaccgagaagcctgggtcattctatcagcaggtgctgcctcattcccatctgcccgaagaggccctggaggtgtctgtggcccctggacccgtggaccagactatcggcacccccaccgtgacctcccccagttcctccttcggcgaaaagccaatcgtcatttataaacaggcctttcccgagggtcatctcccggaggagtcactcaaagtcagcgtagccccaggccctgtgggccagactaccggtgctccgaccatcaccagcccctcctattcccagcatcgtgcaaaatccgggagcttctaccagctcgctctgctggggtcccagattccagaggaggccctgcgcgtgtccagcgctcctggccccgcagaccaaacaacagggattcctactattactagtacgagttactcatttggagaaaagccgattgtcaattacaagcaggctttcccagatggacacctacctgaggaagccttaaaagtgagtatcgtttccggtcccaccgaaaaaaagaccgacattccagccgggcccctgggcagcagtgctctgggggaaaaaccaatcacgttttacagacaggcgttacttgactcgccactgaataaagaggtggtcaaagtctcagcagcccccggtccagctgaccagaaaaccgagacactgcccgtacattccacttcctacagtaacagggggaagcctgtcatattttatcagcaaacactgtctgacagtcatctgcccgaagaggcactgaaagtgcctccagtgccgggacctgatgcacagaagacagagaccccttccgtttctagcagcctttattcataccgagagaaaccgattgttttctaccagcaggcactgcccgactccgagttgacgcaggaggcgctgaaagtgtcagctgtgccccagcccgcagatcagaaaaccgggctgtcaaccgtgacgtcaagtttctatagccacaccgagaagcctaacattagctatcagcaggagctgcccgattctcatctaaccgaggaagccctcaaggtatctaacgttccaggaccggccgatcaaaagactggtgtgagcactgtgacctctaccagctacagccaccgcgagaagcccattgtgtcgtatcagagggaactaccccactttactgaggccggccttaaaattttgcgggttcccgggcccgcagatcaaaaaaccggaataaatatattaccatcaaactcttatccacaaagggaacattcagttatctcgtacgagcaggagttgccagacttgacggaggtgaccctcaaggccatcggagtaccaggcccagctgatcaaaaaactggaatccagatcgcatcttcgtcctcttactcaaatcgcgaaaaggccagtatctttcatcagcaggagcttcctgatgtgaccgaagaggccttgaacgtctttgttgtgccaggccagggcgaccggaagactgaaattcctaccgttccactgtcatattactcgcgcagagaaaagccaagcgtaatctcgcagcaggagctgcctgacagccacctgacagaagaagcgctcaaggtttcccccgtgagcattcctgctgagcagaaaactggcatacctatcgggctcagcagctcctatagccattcccacaaggagaaactgaagatctcaacagtacacatcccagacgaccaaaaaaccgagtttcctgccgcaactctgtcctcatacagtcagatcgagaagccgaagattagcacagtgattggaccgaacgatcagaagaccccttcgcagactgccttccacagctcatattcccaaactgtgaagccaaacatcttgttccagcaacagcttcctgatagggatcaaagtaaaggcatactcaagatcagcgccgtccctgaacttaccgatgtgaatacgggaaagccagttagcctaagtagcagctactttcatagggaaaagtcaaacattttctcccctcaggagcttcctggcagtcatgtcacagaagacgtcctgaaagtctctacaatccctggaccggcgggacagaagacagtattgccaaccgccctgccaagctcgttctcacatagagagaaaccagatattttctaccagaaggacctgcctgacaggcacctcaccgaagacgccctcaaaatctcatcagccttggggcaagccgaccagatcactggtcttcaaaccgttccatctgggacatacagtcatggcgaaaaccataaacttgtgtcggagcatgtccaacgactcattgacaacttaaactcttctgactcatctgtatcttccaacaacgttctgctgaattcacaggcagacgaccgggtagtgatcaacaagcccgagtctgccggatttcgggatgtcggcagtgaagagattcaggacgccgaaaattccgcaaagacactgaaggaaatccggactttgctgatggaagccgagaacatggccctcaagcgctgcaactttcctgcacctttagcccgattccgggacatatccgacatcagcttcatccaaagtaaaaaagtggtgtgttttaaagaaccttcctccacaggggtaagcaatggagatctcctgcatcgccagccatttactgaggaaagtccgagctccaggtgtattcagaaggacatcgggactcaaacgaaccttaagtgccgccggggtattgagaactgggagtttatatccagtaccactgtgcggagtcccctgcaagaggcagagtctaaggtatccatggctctggaggaaacattgcgacagtatcaagcagctaaaagtgtaatgcgaagcgaacccgagggttgcagcgggaccatagggaacaagatcataatcccaatgatgacagtcataaagagcgacagctcatctgacgccagcgacggtaacgggagctgttcctgggacagcaatctcccggagagtctggagtccgtgtctgatgtcctcctgaacttcttcccttatgtttcccctaaaacttccatcacggacagtcgggaggaagagggggtctctgagagtgaggacggcggcggcagctcagtggacagcctggcagcccacgtgaagaatctgctgcagtgcgagagcagcctgaaccatgccaaggagatcctgcggaatgcagaagaggaggagtcacgggttcgcgctcatgcctggaacatgaagttcaatcttgcacatgactgcggatattcaatctccgaactaaatgaggacgaccgaaggaaggtggaagagatcaaagcagaactgttcggtcatggaagaacaacagacctgagtaaaggcctgcagagttag

SEQ ID NO: 184528 - DNA, 12504 bp, Artificial Sequence
  derived and/or modified sequence
atggagccagaggacctgccttggcctggggagcttgaagaggaagaagaggaggaagaagaagaagaggaggaggaggaggaagccgcagcagccgcagctgctaatgtcgacgacgtggtggtggtggaagaggttgaggaggaggcgggtagggaactcgatagcgatagtcattatgggccacaacatctcgagtcaattgacgatgaagaagacgaagaagccaaggcatggctgcaagcgcacccaggacgcattttaccccctctgtcccccccacagcataggtattcagagggagagaggaccagtctcgaaaagatcgtgcctctcacctgtcacgtgtggcagcagatcgtgtatcagggaaatagcaggacccagattagcgacaccaacgttgtttgtctggagactacagcccaaaggggctccggtgatgatcaaaagacagaatcatggcactgtctcccacaggaaatggacagctctcaaactctagacacttcccagacacgctttaacgtgcgtaccgaggacaccgaggtgaccgatttccccagcctcgaggaaggaatccttacccagagcgaaaaccaagtgaaagaacctaatcgggatctattttgtagtcctctgctggtaattcaggacagttttgctagcccagaccttccgctgttgacctgtctgactcaagatcaagaattcgctccagactcattgtttcaccagtcagagctgtccttcgcaccgctcagaggaattcccgataagtctgaagatactgagtggagcagcaggcctagcgaggtttcagaggccctctttcaggcgactgctgaagttgccagcgacctggcatcgagtcgattctcagtttctcagcatccactgatcggcagtaccgccgttggctcccaatgcccgtttctgccctctgagcagggtaataatgaagaaaccatatctagcgttgatgagctaaaaatccccaaagactgcgatagatacgacgatctctgtagctacatgtcatggaaaacacgcaaggacactcagtggcccgaaaataatctggcagacaaggaccaagtttccgtggctactagctttgatattactgatgaaaatatcgctacaaagaggagcgatcactttgacgctgcccgatcttacggacagtattggacccaggaggattcaagtaaacaggcagagacctatctaaccaagggactacaggggaaagtcgagagcgatgttattacgctcgatggactgaacgagaacgccgtggtgtgttctgagcgcgtcgcagagctgcaacgcaaaccaacccgtgagtccgagtatcacagctcagaccttcggatgctacgcatgagccctgataccgtccccaaggctccgaagcacctgaaagcaggagatacgtccaaaggcggtatagcaaaggtcacccagtcaaatctcaaatccggaatcactacaacccctgtcgacagcgacattgggtcgcacctgagcttgagtctggaggatctctctcagctggccgtgagcagccttgaaactacgacaggccagcacacagatactctcaaccaaaaaacgctcgctgacacccacctgactgaagagacgctgaaggtgaccgctatccccgagccggcagaccagaagactgccactccaaccgtactttccagcagccatagccacagaggcaagccatcgattttctatcagcaggggttacctgactcacacctcaccgaggaagccttgaaggtttccgccgctccgggactggccgatcagacaacaggcatgtcaaccttgacctctacttcctatagccaccgtgagaaacctgggactttttatcagcaggaactgcctgagtctaacttgacggaggaaccactggaagtgtcagctgctcctggcccagtagagcagaaaaccggcattcccactgtttccagcactagtcacagccacgtggaagatctcctatttttctatcgtcagacattaccggacggacacctaactgatcaggcactcaaggtgtctgcagtttctggcccagctgaccaaaaaaccggcactgcaacggtacttagcactccacacagccatcgggagaagcctgggatattttaccagcaagaattcgcagactcccaccagactgaggaaaccttaaccaaagtgtcggcaacacctggccctgccgaccagaagacggagatccctgcggttcaaagtagctcctatagccagcgcgaaaagccttcgatcctgtatccacaggatctcgccgattcccatcttccagaagaagggctaaaagtgagtgcagtggcaggccctgccgatcagaaaacaggcctaccaactgttccatccagtgcttacagccatcgcgaaaagctcttggtgttctaccagcaggcactgctagattctcatctccctgaagaggctctgaaggtgagtgcagtctcaggcccagcagacggaaaaacggggacacccgctgtcacctctacctcgagcgcaagttcttcactgggtgaaaagccatccgcattttatcagcagacattacccaatagtcacctaaccgaagaggcgctcaaggtaagcattgtgccgggaccaggcgatcagaagacaggaataccatctgccccaagctcattctattcccatcgagaaaagccaatcatcttctcacagcaaacccttcccgactttttgtttccggaagaggccctcaaggtttccgctgtcagtgtcctggctgcgcagaaaacaggaaccccaaccgtctcgagcaatagccattcccattctgaaaaatcaagtgtcttctaccagcaagaattgccagattccgacctccctcgggaaagcctcaagatgtccgccatccctggacttacagatcagaagaccgtgcctacacctactgtaccctccgggagcttctcccacagagagaaacctagcattttctaccaacaggagtggccagattcttacgctacagagaaagcactcaaagtgtccaccgggcctggcccagcagaccagaagacagagatacctgcggtgcagtctagcagttatccccagcgggagaagcctagcgtgctgtatcctcaggtgcttagtgacagccacctgcccgaggaatcccttaaggtcagcgccttccctggaccagccgatcagatgactgacactccagcagtacccagtactttctactcacagcgcgaaaagccaggcatcttctaccagcaaactctccctgaatcccatctaccgaaagaagccctcaagattagcgtggccccaggcctggcggatcagaagacggggaccccaacagttacgtcaacgtcatactcccagcaccgtgagaagccctccatcttccatcagcaggctctgcccggtactcacattccagaggaggcccagaaggtgtcagcagtgaccggacctgggaaccaaaaaacctggatcccacgggtgttgtctactttctactctcagagagagaaacctgggatcttctatcagcagacactgccaggatctcacatccctgaggaggcccagaaagttagcccggttttgggcccagccgatcagaaaacgggcaccccaaccccaacatccgcctcctactcccacacagaaaaacctggaatcttctaccagcaagttctgccagataatcatcccacagaagaggcacttaagatcagcgtagcttccgagccagtcgatcagaccactggaactcccgcagtgacttcaacctcctactcccagtatcgggagaaaccatcaatattttaccagcagtcactgccttcaagtcatctaactgaggaggcaaagaatgtgtctgccgttcccggtcccgctgaccagaaaacggtgattcccattctgccatcaacattttactctcatacagagaaaccaggagtgttttatcagcaggtgctgccacatagccatccaacagaggaggcgcttaagatctccgttgcgtccgaacctgtggaccagaccactggcacaccaaccgtcacatctactagttattcccaacacacagagaaacctagcatattctaccagcagagccttcccggaagccatctcaccgaagaggccaagaatgtgtcggccgtccctgggccaggcgatcggaaaaccggcataccaactctgccaagtactttttacagtcacaccgagaaaccgggaagcttttatcagcaggtgttaccacatagtcatctgcctgaagaggccttggaggtgtccgtcgccccaggcccagtggatcagacgattggcaccccaactgtgacatctccctcatcatccttcggagagaagcccatcgtcatctataaacaggcattccctgaaggtcacctgccggaggaaagcttgaaggtttctgtggctccagggcctgttggccagaccaccggggcaccaactattacgagtcccagctattctcaacatcgtgctaagagcggctcattttaccagctggcccttcttgggtcccagattccagaagaagcactgagggtcagtagtgctcccggacccgctgaccagactaccggcattccaaccataactagcacctcctattccttcggtgagaagcctatcgtcaactacaagcaagcgtttccggatggccatcttcctgaagaggctctaaaggtctcgatcgtgtccggtcctaccgaaaaaaaaacggatattcccgctggccctcttgggagctcggcactaggggagaaacccattaccttttacaggcaggcccttctagatagtcccttgaataaagaagttgtgaaagtgtcagccgctccgggacccgctgatcaaaaaacagagaccctccctgtgcatagtacgtcttactcaaaccggggaaaacccgtgatcttttatcagcagaccctctcagacagccacctacccgaggaagcactgaaggttccacccgtccccggtcccgacgcccaaaaaactgagaccccatccgtgtcgagcagcctgtatagttatcgcgaaaaacccattgtgttctatcagcaggcactgcccgacagcgaacttacccaggaggcactgaaggtgtctgcagtcccccagcccgcagatcagaagacaggccttagtacggtaacatctagcttttattctcatactgagaaacctaacatctcttaccagcaggagttgccagattcacacctcacagaagaggctctgaaggtgtccaatgttcccggaccagcggatcagaagaccggagttagcaccgttactagtacctcttatagccatagagaaaagccaatcgtgtcataccaacgcgagctgccccacttcaccgaggcaggccttaaaatccttagggtccccggaccggcagatcagaaaaccggaatcaatattctcccctctaacagttacccccaacgtgagcacagcgtgatctcgtacgagcaggagctcccagatctgactgaggtgacccttaaggctattggcgtaccaggtcctgctgatcagaagacgggcattcagatcgcatcttcttccagctactctaaccgtgagaaagcctcaatttttcaccagcaagaactgccggatgtcacggaagaagcacttaatgtgtttgtggtgccaggacagggagataggaagacggaaatcccaaccgtacccctttcttattattcccgacgtgagaagccttctgtgatttctcagcaggagctgcccgacagtcatctgacagaagaagcgctcaaggtctcccctgttagcatcccagccgaacagaagaccggcatccctatcggcttgtccagtagctattcacactctcataaagaaaagctgaagatttccaccgtgcacattccggatgatcagaagaccgagtttcctgcagccactctgagtagctactcccaaattgaaaagccaaagatctcaacagtaattggccctaacgaccagaagacacccagccagaccgcatttcattcatcatattctcagaccgtcaaaccgaacatcctcttccagcagcagctgcctgatagggatcagtccaagggcatccttaagatttcagcggtgcccgagctgacggacgtcaacacaggaaagcctgtgagtctgtccagttcctacttccaccgcgagaagtcaaatatcttcagtccacaggaattgcctgggagtcacgtcacagaggacgtactcaaagtgagcacgatcccaggtcccgctgggcaaaagactgtcctgcccacagcactgccatcctcattctcacatagagagaagcctgatatattttatcagaaggatctgcccgatagacacctgactgaggatgcactaaaaatctcttctgcgctggggcaagccgatcaaattacaggattacaaaccgtgccctcaggtacctacagtcacggtgaaaatcacaaactggtttcggaacacgtgcagcggctcatcgataacctgaacagttctgattccagcgtgagttcaaataatgttctgctgaattcacaggcggatgacagagtggtgattaataaaccagagtctgccggtttcagggacgttggttcggaagaaatccaggatgccgagaatagcgccaaaacgctgaaggaaatccgaacactcctgatggaggccgagaacatggccctgaagaggtgcaattttccagcacctttggccaggtttagggacatatccgatatttcttttattcaaagcaagaaggttgtgtgcttcaaggagccttcgagcaccggcgtcagcaatggcgatctgctccaccggcagccattcacagaggagagccccagctcgcggtgtattcaaaaggatatcgggacgcaaacaaaccttaagtgccgtcgcggaatcgagaattgggagtttatatcctctaccacagtaagaagtccattgcaggaagcggaatctaaggtatctatggccctagaagagactctgcgacagtaccaagcagccaaaagtgttatgcggtcagagcctgagggctgtagcgggacgataggaaataagattattatcccgatgatgacagttataaaatcagactccagttcggacgcctctgacggtaacggctcttgctcttgggacagcaatttaccagagtcactcgagtcagtctcagatgtcttactcaatttttttccgtatgtgtcgcccaaaactagcatcacggattcccgggaggaggaaggagtctcagagtctgaagatggaggcggaagctccgtcgatagtttagctgcccatgttaaaaaccttttgcaatgtgagagcagtttaaatcacgcgaaggagatcttaaggaatgccgaggaggaggagtcacgcgtgcgcgcacacgcctggaacatgaagttcaacctggcccatgactgtggatatagtattagcgaacttaatgaggacgacagacgaaaggttgaggagatcaaggccgagctctttgggcacggcaggactactgacctgagtaaaggcctgcagtcacccagaggaatgggctgcaagccagaggcagtctgttcccatattatcattgaaagccatgagaaggggtgttttcgcactctgacttctgagcatccacaacttgacaggcatccctgcgccttcaggagcgccggtccaagcgaaatgacccggggacgccaaaatccctcttcttgccgagctaaacatgttaacctgagtgcttcccttgatcaaaataacagccactttaaagtttggaattccctgcagctgaagtcacacagtccctttcagaacttcatacccgatgagtttaagattagcaaaggcttacgcatgccctttgatgagaaaatggacccatggctcagcgagcttgtcgagccagccttcgtacccccaaaagaggtggactttcattcctcgagccagatgcccagcccagagccaatgaaaaagttcactacatctataaccttcagctcacaccggcatagcaagtgcatcagcaattcaagcgtggtcaaggtgggggtgacggaggggtcgcagtgcacaggcgcttcggtcggtgtcttcaacagccatttcactgaagagcagaatcccccacgtgatcttaagcagaagacttcttccccatctagcttcaaaatgcactcaaattcccaggataaagaggtcacgatcctcgctgaaggaaggcgccagagtcagaagctccctgtcgatttcgagagatcattccaggaggaaaagccactggagcggagcgattttaccggctcacatagcgagccttccacgagagctaattgctcgaatttcaaagagattcaaatctcagacaatcacaccttgattagcatgggccgaccgtccagtactctcggagtcaaccgctcaagctcccggcttggcgtgaaggaaaagaatgttacaatcactcccgaccttccatcctgcatcttcttggagcagagggaactatttgagcaatctaaggcaccacgggctgacgaccatgtgcgaaagcaccattccccttcaccacagcaccaggactatgtggctccagacttgccttcctgcatattcctggaacagagagagctgttcgaacagtgcaaagctccgtacgttgaccaccagatgcgggagaatcacagccctctgccacagggtcaggacagcatcgcatcggatcttccctcaccaatcagtctggaacagtgtcaatcaaaagcccctggcgtcgacgatcaaatgaacaaacaccactttccactgccgcagggtcaagactgtgtcgtcgagaaaaacaatcagcataagccaaagtcccatatctccaacataaatgtcgaggctaagtttaacaccgtcgtcagtcagtcagcccctaaccactgcactttggccgcttctgcatcaactcccccatccaatcggaaagcgttatcttgtgtgcatattacattgtgccctaagactagtagcaagcttgactccggaaccttagatgagcgctttcactccttggacgccgcatcaaaggcccgaatgaactcagagtttaattttgatctgcacactgtctcatctcggtcactggagcctacgtccaagttgttgaccagcaagccggtcgctcaggaccaggaaagcttaggtttcctaggacctaagtcctcactggactttcaggtggttcagccatccctccctgactccaataccatcacgcaggatctgaagacgattccaagccaaaacagccagatcgtgacctctcggcagatccaggtgaacatcagcgatttcgagggtcattccaaccccgaagggacacccgtttttgccgatcgactgcctgaaaagatgaagacaccattatccgctttcagtgaaaaactttcctccgacgctgtcacccagattaccactgagagccccgagaagaccttattcagtagtgaaatcttcattaacgccgaggatcggggacacgaaattatagaacccggtaatcagaaattacgcaaggcacccgttaagttcgccagttcaagctcagtccagcaggtgaccttttctcggggtactgacggccagcctctgctactcccctacaaacccagtggatctactaagatgtattacgtgcctcaactccgccagatacctcctagccctgattccaaatctgatacgaccgtggagtctagccactccggctcaaatgacgcgatagcacctgattttcctgcccaagtgctagggacccgcgacgacgatctgtcagctacggtgaacataaagcacaaagaaggaatatacagcaaaagggtggttaccaaggcgagtctgcctgtcggcgagaaaccattgcagaacgagaacgcagatgccagcgtgcaggtgctgatcaccggcgacgagaacctcagcgataagaagcagcaggaaattcattcaactcgagccgtcaccgaggcagctcaagcaaaagagaaagaatcacttcagaaggacacagccgactctagtgccgcagcggcagccgagcactctgcccaggttggagatcccgagatgaagaacctgcccgacacgaaagcgatcacgcagaaggaggagatccacaggaaaaagactgtgccggaggaggcttggccaaataataaggagtctctgcaaattaacattgaggaatctgagtgtcatagcgaatttgaaaataccacccgatccgtgtttagaagtgccaaattttacattcatcatcccgtacatttgcccagcgaccaggatatctgccacgagagcctgggcaaaagcgtatttatgaggcactcatggaaagatttctttcaacatcacccagacaagcaccgagagcatatgtgtctgcccctgccttaccagaacatggacaagaccaagacagattacacgcgaattaaaagcctcagcatcaacgttaacctgggaaataaggaggtgatggacaccactaagtcgcaagtgagagattaccctaaacataacggacagatttcagacccccagcgagatcagaaggtgacccctgagcaaaccacccagcatacagtttcccttaacgaactatggaacaagtacagagaaagacagaggcaacaacggcagccagagctaggcgaccggaaggaactgtccctggtcgaccggctcgataggctcgcaaagatcttgcaaaaccccattacacattcgctgcaggtcagcgaaagcacgcatgatgacagtcggggtgagcggtcagtgaaggaatggagtggtcggcagcagcagcgtaacaaattacaaaaaaagaaaagatttaaaagcctggaaaaatcccacaagaacaccggcgagctcaaaaagagtaaagtactgtcacaccacagggccggaagatctaaccaaataaagattgaacagatcaagttcgacaagtacatcttgtccaagcagccaggattcaactatatatcaaatacctccagcgattgccgaccaagcgaagagtcagagctgttaaccgacactactactaatattctgtccggaaccacgagcacagttgagagcgatatcctcacgcagaccgacagggaggtagccctccacgaaagatcatcaagtgtgtctactatcgataccgcacggctgatccaggcattcgggcacgagagggtgtgtctgtccccgagaaggatcaaactctactcatctataacgaaccagcaacgcaggtatctggaaaaacgctccaagcactcaaagaaagtccttaacaccggacaccctttggtgacatccgagcatacgagacgacgccacattcaggtcgctaaccacgtgatttcatccgactctatcagtagctccgcctcctcattcctgtcttctaatagcaccttctgtaacaaacagaatgttcacatgctgaataagggaatccaagcagggaacctggagattgttaatggcgctaagaagcatacgcgcgacgtcggcataaccttccccacaccctcctcttccgaagcaaagctggaagaaaacagtgatgtcacgagttggtccgaagaaaaacgggaggagaaaatgctcttcacagggtaccccgaggatcggaagctgaagaagaacaagaaaaattctcacgaaggcgtcagttggtttgtccctgtcgaaaatgtggagagcaggagcaaaaaggagaatgtacctaacacttgcggacctggaatctcttggtttgagccgattaccaaaacccgcccatggcgcgaacctctgagagagcagaattgtcagggtcagcatctggacggtaggggttacctggctggacctggaagagaagctggcagggacctgctacgcccattcgtgcgtgccacgttgcaagagagtctacagtttcatagacccgattttatcagccggagcggggagcgaatcaaaagattaaagctgatcgtgcaggagcgcaaactccagtccatgctacagactgagcgcgacgctctattcaatattgaccgggaaaggcaagggcaccagaatcgcatgtgtcccctgcccaagcgcgtctttctcgcaattcagaaaaataagccaatcagcaaaaaagaaatgatccagcggtctaagaggatatacgagcaactccctgaagttcagaaaaaaagagaagaagagaagcggaaaagcgaatacaagtcctatcgactcagggcgcagctctacaagaaaagagtgacaaaccagctactgggaaggaaagtgccatgggattag

SEQ ID NO: 184529 - DNA, 7685 bp, Artificial Sequence
  derived and/or modified sequence
atggagcctgaagacctgccctggcccggagagctcgaggaggaagaggaagaagaagaagaagaggaggaagaggaagaggaagccgctgccgctgccgcagcaaacgtcgatgacgtcgtggtggtggaagaggttgaggaggaagccggacgtgaacttgactcagattcccattacggcccacaacatctcgaatctatcgatgatgaagaggatgaggaggccaaggcctggttgcaggcccacccgggaagaatactcccaccgttgtccccacctcagcaccgctacagcgaaggggaacgtaccagcctcgagaaaatcgtccctctgacatgtcatgtctggcaacagattgtgtaccagggtaacagccggacccagatctcggacactaatgtagtgtgcctggaaaccactgcacagagagggtcgggcgacgaccagaagaccgagagctggcattgtctcccgcaggaaatggacagtagtcagaccctggatacttcccaaacaagattcaatgttcgcaccgaggataccgaggtcacagattttccatcccttgaggaaggtattctgacacaatctgagaaccaggtcaaggagcctaatcgagaccttttttgttcacccttactcgtgatacaggatagttttgcatcccctgatctgcctctgcttacctgcctaacccaggaccaggagttcgcacctgattcactgtttcatcagtcagagcttagtttcgccccactcagaggcattcccgacaaatcagaggataccgaatggagctcccgcccttctgaggtgagtgaagcactgttccaagccaccgctgaagtcgcatcagatttagcaagttcaaggttcagcgtatcccagcatcccctaatcggcagtactgccgtgggatcccaatgccccttccttccttcggagcaagggaacaacgaagaaacgattagcagtgtggatgaactgaaaatacccaaggactgtgacagatacgacgacttatgctcctacatgagctggaagacccgcaaggacactcagtggcctgagaacaacctggctgacaaagatcaggtgtccgtggcgacttcatttgatattaccgatgagaacattgccacaaaacggagtgaccacttcgatgctgctcgaagttatggccagtactggacacaggaagattcttccaagcaagccgagacttacttgacgaaaggtctccagggtaaagtggaatcagatgtgataactttggatggattgaacgagaatgccgttgtatgttcagagagagtcgcagagttacagcgaaaaccaacccgggaatccgagtatcacagctccgacctgcgaatgcttagaatgtctccggacaccgtccccaaagcccctaagcacctgaaggctggggacacatctaaaggcggaatagctaaagtgacacaaagcaatctcaagtcaggcataacaaccacaccagtagattcggacattggaagccatttgtccttatcgctggaggatctgagccaacttgcggtcagcagtctggaaacgaccactgggcagcacaccgatacgctgaatcaaaagacacttgccgacactcacctaaccgaggaaactcttaaggttaccgctattcccgagcccgctgatcaaaagaccgccacacctacagttctctctagctcacattctcacaggggaaaacctagcattttttaccagcagggactgccagactcccatttgactgaagaggccctgaaagtgtccgccgcacccggacttgctgaccagaccactgggatgagtactctgacaagtactagttacagccaccgagaaaagccaggaacattttaccagcaagagctgcctgagagcaatcttactgaagaacctctggaggtgtcagcagccccaggaccagtggagcagaaaacaggaatccccaccgtgagctccaccagtcactcacatgtggaggacctgttgttcttctaccgccagacactacctgacgggcacttgacagatcaggctttaaaggtttccgccgtttctgggccagccgaccaaaagacggggaccgctaccgttctttcaactccccacagtcatagagaaaaacccggtattttttatcagcaagaatttgccgactcacatcagacagaagagacgctaacaaaggtgagcgctacacctggccctgcagatcaaaaaacagaaatccctgctgttcagagctcgtcctacagccagcgggagaaaccatccatcttatatcctcaggacttggctgacagccacctgccagaggaggggctgaaagtcagcgcagttgccggaccggcagaccagaaaactggtctgcccacggttcctagcagtgcatactcccaccgagaaaagctcctggtcttttatcagcaggctttgctggactcccacctgccagaggaggcactgaaggttagcgcggtatccggtcctgccgacgggaagaccggtacccccgctgtcacatccacctcctccgcatcttcatcactgggcgaaaagcctagtgctttctaccagcagaccctgcctaatagtcacctcaccgaagaggcgctcaaggtatcaatagtcccaggtcctggcgaccagaaaacaggaatccccagcgccccatcaagtttctatagccaccgcgagaagccaattatattttctcagcagacactgcccgacttcctttttccagaggaagcactgaaggttagcgccgtatccgtgctcgccgctcagaaaacaggtactccaacagttagcagtaattcacacagccacagcgagaaaagcagtgtgttttatcagcaggagctgcctgacagtgaccttccgcgagaaagtctgaagatgagcgccatccccggactcactgaccagaaaacagtgcccacccctaccgtgccgtcaggtagcttctcccaccgggagaaaccgagtattttctaccaacaagagtggcccgacagctacgcgacagagaaggcgttgaaagtttccactggccctggacccgcagaccagaaaacagagatacctgccgtccaatctagttcctacccgcagcgcgagaagccaagcgttttgtatccacaagtgctgtccgactcacatctgcccgaggagtccctaaaggtgtcggccttccccggacccgcagaccagatgacggacaccccagccgttcctagcacattttattcacagagggaaaagccgggaatattctaccagcagaccttaccggagtcgcacctaccgaaggaggccttgaaaataagcgtagcacctggcttggcagatcaaaagaccggaacgccaacagtgacatccacttcctactcacagcatagggagaagcccagcatctttcaccagcaggccctacccggaacccacatccctgaggaggcgcagaaggtgagcgcggtcactggacccggtaatcagaagacatggattccccgagttctatcgacgttctattctcagagggagaaacccggaattttctatcagcagacgctgccgggaagccacatccctgaagaggcgcagaaggtgagtcccgtcctgggtcccgctgatcagaagactggcacgccgactcctacttcggcatcctactcgcacacagagaaacctgggattttctaccagcaagtgctccctgacaaccatccaaccgaagaagctttgaagattagtgtggccagcgagccagtggaccagactacaggaactcctgctgtgaccagcacatcctactctcagtatcgtgaaaagcccagtatcttctaccagcagagcctgccatctagccaccttacggaggaggccaaaaacgtgagtgcagtcccaggacctgctgaccagaagacggtgataccaatcctgcctagtacattttactctcatactgaaaaaccaggtgtgttctaccaacaggtgttgccccattctcatcctacagaagaagcgctcaagatctcagtcgccagtgagcccgtcgatcagacaaccgggactccgacggtaactagcacaagctattcccagcatacagagaagccgtccatcttttaccagcagtctctgccaggatcgcacctgactgaagaggctaaaaacgtcagcgccgttcctggccctggggaccgcaaaaccggcattccgactcttccttctactttctatagtcacaccgagaagcctggtagtttctaccaacaggtgctgccccatagccatttgcccgaggaggccctggaagtatcagtcgctccaggtcctgtggatcagacgatcggtacacctaccgtgacatccccaagttcttcttttggcgagaaacccatagttatctacaagcaggcctttccggaaggccatctgccagaggagtccctgaaagtaagtgtcgcccctggaccagttggccagaccacgggcgcaccaaccataacttctccctcctattcacagcaccgggctaagtccggaagtttctaccaacttgccctgctgggtagtcagatccctgaagaggcactgagagtgagcagcgccccaggcccagcagaccagactaccggtataccgactattacatcgacgagctattcattcggagagaaaccaatcgtcaactataagcaagcttttccagatggccacttacctgaggaagcacttaaagtctccatcgtttcaggccctacagaaaagaagactgatattcctgcgggtcctttggggagttccgccctgggcgaaaaacccattaccttctacagacaggcactgctggattcaccactgaacaaagaggtggttaaggtgtctgcagcccctggcccagcagatcaaaagacggagaccctccctgtccactccacgagctacagtaaccgcggaaagcctgtgattttctaccagcagaccttatccgacagtcacctccccgaggaagcccttaaagtgccccctgttcccggacctgacgcccagaaaacggaaacgccatcagtgtcaagctccctgtactcctaccgggagaaacccattgtgttctatcagcaagctctgccagactccgagctgacccaggaggccctgaaggtgtcagccgttcctcagcctgctgaccagaagactggactgagcacagtgacgtctagcttttattcacataccgaaaaacccaatatctcataccagcaggagctccccgactcacatctcactgaggaagccctcaaggtttccaatgtgcctgggcctgcagatcagaagactggcgtctcaaccgtcacttcgaccagttacagtcatcgcgaaaagcctattgtttcttatcaaagagaactcccacacttcactgaggcgggtctgaagattctgcgagtacccggtccagcggatcagaaaaccggcattaatattcttccatccaattcatatccacagcgagaacactcggtcatcagctacgagcaggaactgccagacttgacagaggtgactctaaaagctattggggtccctggcccagccgatcagaagacaggtatccagattgccagctcttcctcctacagcaatcgggaaaaggctagtatcttccatcagcaagaactgccagatgtcaccgaggaagccctgaatgtgtttgtcgtccctggccaaggcgatcgcaagaccgagataccaacagtccctctaagctactattctcgacgggaaaagccttcagtgatatcccagcaggaactcccagattcacatctcacagaggaagctctgaaggtttcccctgtatcgatacccgcagagcagaagacaggtatccctatcggcctcagttcatcatacagtcactctcacaaggaaaaactcaagatttccacagtgcacatacccgatgaccagaaaacagaattccctgctgcaacattgtcttcctacagccaaatcgaaaagcccaagattagtacagtcatcggaccaaatgatcagaaaacaccttctcagacagccttccattcatcctacagtcagaccgtgaagccaaatattctcttccagcagcagttaccagatagagaccagtccaagggtatcctaaagatctctgcggtcccagagctgactgatgttaatacaggcaagcccgtgagtctctcctctagctatttccacagagaaaagtctaacattttctctccccaagagctgccagggagccacgtcacggaagacgtcctgaaggtatctacaattccagggcctgccggacaaaagacagtcctaccaaccgcgttgccaagctcattctcccaccgagaaaaacccgatatcttctatcagaaggatctaccagaccgtcatctgaccgaagacgcgctcaagattagctcggctttgggtcaggctgaccagatcactggcttacaaactgttccatctggaacatactcgcacggcgaaaatcacaaactggtctcagagcatgtgcaacgtttgatcgataacctaaacagttcagacagctccgtgagttcaaacaatgtgctgctgaacagtcaggcggacgacagagtggttattaacaaacctgaatctgctggtttccgagatgtcggatctgaggagatacaggatgcagaaaactctgccaaaacgttgaaggaaatacggaccctcctgatggaagctgagaatatggcactcaagcgctgcaattttcctgctcctctcgctcgttttcgcgacatatcagatatcagcttcatacagagtaagaaagtagtctgctttaaggaaccatcctcaacaggagtgtccaacggggatctgctccacaggcagccatttaccgaggaatccccctccagtcgctgcatccagaaggacatcgggacccagacaaatttgaagtgcaggcgcggtatcgaaaactgggaatttatttcaagtaccactgtcaggtctccactccaggaggctgaaagcaaggtgtccatggctcttgaagagacactgcggcagtaccaggccgctaaaagcgtgatgcgaagcgaacctgaggggtgttcagggacaattggcaataagatcatcatccctatgatgaccgtgattaaatcagattctagctccgatgcttctgacggaaatgggagctgctcctgggatagtaacctgcccgagtccctggaaagcgtaagcgacgtgctgctgaacttttttccctacgtgagccccaaaacaagtatcactgatagccgcgaggaagagggggtctcagagtccgaggacggcggaggctctagcgtggacagcctcgctgcccacgtaaaaaacctgttgcagtgtgagtcttctctgaaccatgctaaggaaatcctccgaaacgctgaggaagaggaaagtagagtcagggcccacgcctggaatatgaagttcaacctggcacatgactgcgggtattctatctccgagcttaatgaggatgatcgccgtaaggtcgaagaaatcaaagccgagctgttcggccacgggagaactactgatttgtcaaaggggctgcagtcata

SEQ ID NO: 184530 - DNA, 402 bp, Artificial Sequence
  derived and/or modified sequence
atggtgtcagttggattcggagacagagccggacttggaagttcctgcagatgttcccaaatcacacccgatatggctagtgcggtggccactagatacgtacttggccactggcctcgcgaccatatctgcggatgtggctctcatcaactctcctcatggcgagcagaaccagatggcggtgtgggcatgccccacacattgtctgagcccccttccggccttaccggcatctgggctggtgccttggtaagcccggaaaaacagatgaaggaaaacctccgatctaacgactcagaaccaaggcttcctggcttcgaatcatgcctaattcattctttagccgtctggccatgggcatccaattttgcaagtctgggcccttcggtaaacaagggatag

SEQ ID NO: 184531 - DNA, 12504 bp, Artificial Sequence
  derived and/or modified sequence
atggagcccgaggacctgccctggcccggcgagctggaggaggaggaggaggaggaggaggaggaggaggaggaggaggaggaggccgccgccgccgccgccgccaacgtggacgacgtggtggtggtggaggaggtggaggaggaggccggcagagagctggacagcgacagccactacggcccccagcacctggagagcatcgacgacgaggaggacgaggaggccaaggcctggctgcaggcccaccccggcagaatcctgccccccctgagccccccccagcacagatacagcgagggcgagagaaccagcctggagaagatcgtgcccctgacctgccacgtgtggcagcagatcgtgtaccagggcaacagcagaacccagatcagcgacaccaacgtggtgtgcctggagaccaccgcccagagaggcagcggcgacgaccagaagaccgagagctggcactgcctgccccaggagatggacagcagccagaccctggacaccagccagaccagattcaacgtgagaaccgaggacaccgaggtgaccgacttccccagcctggaggagggcatcctgacccagagcgagaaccaggtgaaggagcccaacagagacctgttctgcagccccctgctggtgatccaggacagcttcgccagccccgacctgcccctgctgacctgcctgacccaggaccaggagttcgcccccgacagcctgttccaccagagcgagctgagcttcgcccccctgagaggcatccccgacaagagcgaggacaccgagtggagcagcagacccagcgaggtgagcgaggccctgttccaggccaccgccgaggtggccagcgacctggccagcagcagattcagcgtgagccagcaccccctgatcggcagcaccgccgtgggcagccagtgccccttcctgcccagcgagcagggcaacaacgaggagaccatcagcagcgtggacgagctgaagatccccaaggactgcgacagatacgacgacctgtgcagctacatgagctggaagaccagaaaggacacccagtggcccgagaacaacctggccgacaaggaccaggtgagcgtggccaccagcttcgacatcaccgacgagaacatcgccaccaagagaagcgaccacttcgacgccgccagaagctacggccagtactggacccaggaggacagcagcaagcaggccgagacctacctgaccaagggcctgcagggcaaggtggagagcgacgtgatcaccctggacggcctgaacgagaacgccgtggtgtgcagcgagagagtggccgagctgcagagaaagcccaccagagagagcgagtaccacagcagcgacctgagaatgctgagaatgagccccgacaccgtgcccaaggcccccaagcacctgaaggccggcgacaccagcaagggcggcatcgccaaggtgacccagagcaacctgaagagcggcatcaccaccacccccgtggacagcgacatcggcagccacctgagcctgagcctggaggacctgagccagctggccgtgagcagcctggagaccaccaccggccagcacaccgacaccctgaaccagaagaccctggccgacacccacctgaccgaggagaccctgaaggtgaccgccatccccgagcccgccgaccagaagaccgccacccccaccgtgctgagcagcagccacagccacagaggcaagcccagcatcttctaccagcagggcctgcccgacagccacctgaccgaggaggccctgaaggtgagcgccgcccccggcctggccgaccagaccaccggcatgagcaccctgaccagcaccagctacagccacagagagaagcccggcaccttctaccagcaggagctgcccgagagcaacctgaccgaggagcccctggaggtgagcgccgcccccggccccgtggagcagaagaccggcatccccaccgtgagcagcaccagccacagccacgtggaggacctgctgttcttctacagacagaccctgcccgacggccacctgaccgaccaggccctgaaggtgagcgccgtgagcggccccgccgaccagaagaccggcaccgccaccgtgctgagcaccccccacagccacagagagaagcccggcatcttctaccagcaggagttcgccgacagccaccagaccgaggagaccctgaccaaggtgagcgccacccccggccccgccgaccagaagaccgagatccccgccgtgcagagcagcagctacagccagagagagaagcccagcatcctgtacccccaggacctggccgacagccacctgcccgaggagggcctgaaggtgagcgccgtggccggccccgccgaccagaagaccggcctgcccaccgtgcccagcagcgcctacagccacagagagaagctgctggtgttctaccagcaggccctgctggacagccacctgcccgaggaggccctgaaggtgagcgccgtgagcggccccgccgacggcaagaccggcacccccgccgtgaccagcaccagcagcgccagcagcagcctgggcgagaagcccagcgccttctaccagcagaccctgcccaacagccacctgaccgaggaggccctgaaggtgagcatcgtgcccggccccggcgaccagaagaccggcatccccagcgcccccagcagcttctacagccacagagagaagcccatcatcttcagccagcagaccctgcccgacttcctgttccccgaggaggccctgaaggtgagcgccgtgagcgtgctggccgcccagaagaccggcacccccaccgtgagcagcaacagccacagccacagcgagaagagcagcgtgttctaccagcaggagctgcccgacagcgacctgcccagagagagcctgaagatgagcgccatccccggcctgaccgaccagaagaccgtgcccacccccaccgtgcccagcggcagcttcagccacagagagaagcccagcatcttctaccagcaggagtggcccgacagctacgccaccgagaaggccctgaaggtgagcaccggccccggccccgccgaccagaagaccgagatccccgccgtgcagagcagcagctacccccagagagagaagcccagcgtgctgtacccccaggtgctgagcgacagccacctgcccgaggagagcctgaaggtgagcgccttccccggccccgccgaccagatgaccgacacccccgccgtgcccagcaccttctacagccagagagagaagcccggcatcttctaccagcagaccctgcccgagagccacctgcccaaggaggccctgaagatcagcgtggcccccggcctggccgaccagaagaccggcacccccaccgtgaccagcaccagctacagccagcacagagagaagcccagcatcttccaccagcaggccctgcccggcacccacatccccgaggaggcccagaaggtgagcgccgtgaccggccccggcaaccagaagacctggatccccagagtgctgagcaccttctacagccagagagagaagcccggcatcttctaccagcagaccctgcccggcagccacatccccgaggaggcccagaaggtgagccccgtgctgggccccgccgaccagaagaccggcacccccacccccaccagcgccagctacagccacaccgagaagcccggcatcttctaccagcaggtgctgcccgacaaccaccccaccgaggaggccctgaagatcagcgtggccagcgagcccgtggaccagaccaccggcacccccgccgtgaccagcaccagctacagccagtacagagagaagcccagcatcttctaccagcagagcctgcccagcagccacctgaccgaggaggccaagaacgtgagcgccgtgcccggccccgccgaccagaagaccgtgatccccatcctgcccagcaccttctacagccacaccgagaagcccggcgtgttctaccagcaggtgctgccccacagccaccccaccgaggaggccctgaagatcagcgtggccagcgagcccgtggaccagaccaccggcacccccaccgtgaccagcaccagctacagccagcacaccgagaagcccagcatcttctaccagcagagcctgcccggcagccacctgaccgaggaggccaagaacgtgagcgccgtgcccggccccggcgacagaaagaccggcatccccaccctgcccagcaccttctacagccacaccgagaagcccggcagcttctaccagcaggtgctgccccacagccacctgcccgaggaggccctggaggtgagcgtggcccccggccccgtggaccagaccatcggcacccccaccgtgaccagccccagcagcagcttcggcgagaagcccatcgtgatctacaagcaggccttccccgagggccacctgcccgaggagagcctgaaggtgagcgtggcccccggccccgtgggccagaccaccggcgcccccaccatcaccagccccagctacagccagcacagagccaagagcggcagcttctaccagctggccctgctgggcagccagatccccgaggaggccctgagagtgagcagcgcccccggccccgccgaccagaccaccggcatccccaccatcaccagcaccagctacagcttcggcgagaagcccatcgtgaactacaagcaggccttccccgacggccacctgcccgaggaggccctgaaggtgagcatcgtgagcggccccaccgagaagaagaccgacatccccgccggccccctgggcagcagcgccctgggcgagaagcccatcaccttctacagacaggccctgctggacagccccctgaacaaggaggtggtgaaggtgagcgccgcccccggccccgccgaccagaagaccgagaccctgcccgtgcacagcaccagctacagcaacagaggcaagcccgtgatcttctaccagcagaccctgagcgacagccacctgcccgaggaggccctgaaggtgccccccgtgcccggccccgacgcccagaagaccgagacccccagcgtgagcagcagcctgtacagctacagagagaagcccatcgtgttctaccagcaggccctgcccgacagcgagctgacccaggaggccctgaaggtgagcgccgtgccccagcccgccgaccagaagaccggcctgagcaccgtgaccagcagcttctacagccacaccgagaagcccaacatcagctaccagcaggagctgcccgacagccacctgaccgaggaggccctgaaggtgagcaacgtgcccggccccgccgaccagaagaccggcgtgagcaccgtgaccagcaccagctacagccacagagagaagcccatcgtgagctaccagagagagctgccccacttcaccgaggccggcctgaagatcctgagagtgcccggccccgccgaccagaagaccggcatcaacatcctgcccagcaacagctacccccagagagagcacagcgtgatcagctacgagcaggagctgcccgacctgaccgaggtgaccctgaaggccatcggcgtgcccggccccgccgaccagaagaccggcatccagatcgccagcagcagcagctacagcaacagagagaaggccagcatcttccaccagcaggagctgcccgacgtgaccgaggaggccctgaacgtgttcgtggtgcccggccagggcgacagaaagaccgagatccccaccgtgcccctgagctactacagcagaagagagaagcccagcgtgatcagccagcaggagctgcccgacagccacctgaccgaggaggccctgaaggtgagccccgtgagcatccccgccgagcagaagaccggcatccccatcggcctgagcagcagctacagccacagccacaaggagaagctgaagatcagcaccgtgcacatccccgacgaccagaagaccgagttccccgccgccaccctgagcagctacagccagatcgagaagcccaagatcagcaccgtgatcggccccaacgaccagaagacccccagccagaccgccttccacagcagctacagccagaccgtgaagcccaacatcctgttccagcagcagctgcccgacagagaccagagcaagggcatcctgaagatcagcgccgtgcccgagctgaccgacgtgaacaccggcaagcccgtgagcctgagcagcagctacttccacagagagaagagcaacatcttcagcccccaggagctgcccggcagccacgtgaccgaggacgtgctgaaggtgagcaccatccccggccccgccggccagaagaccgtgctgcccaccgccctgcccagcagcttcagccacagagagaagcccgacatcttctaccagaaggacctgcccgacagacacctgaccgaggacgccctgaagatcagcagcgccctgggccaggccgaccagatcaccggcctgcagaccgtgcccagcggcacctacagccacggcgagaaccacaagctggtgagcgagcacgtgcagagactgatcgacaacctgaacagcagcgacagcagcgtgagcagcaacaacgtgctgctgaacagccaggccgacgacagagtggtgatcaacaagcccgagagcgccggcttcagagacgtgggcagcgaggagatccaggacgccgagaacagcgccaagaccctgaaggagatcagaaccctgctgatggaggccgagaacatggccctgaagagatgcaacttccccgcccccctggccagattcagagacatcagcgacatcagcttcatccagagcaagaaggtggtgtgcttcaaggagcccagcagcaccggcgtgagcaacggcgacctgctgcacagacagcccttcaccgaggagagccccagcagcagatgcatccagaaggacatcggcacccagaccaacctgaagtgcagaagaggcatcgagaactgggagttcatcagcagcaccaccgtgagaagccccctgcaggaggccgagagcaaggtgagcatggccctggaggagaccctgagacagtaccaggccgccaagagcgtgatgagaagcgagcccgagggctgcagcggcaccatcggcaacaagatcatcatccccatgatgaccgtgatcaagagcgacagcagcagcgacgccagcgacggcaacggcagctgcagctgggacagcaacctgcccgagagcctggagagcgtgagcgacgtgctgctgaacttcttcccctacgtgagccccaagaccagcatcaccgacagcagagaggaggagggcgtgagcgagagcgaggacggcggcggcagcagcgtggacagcctggccgcccacgtgaagaacctgctgcagtgcgagagcagcctgaaccacgccaaggagatcctgagaaacgccgaggaggaggagagcagagtgagagcccacgcctggaacatgaagttcaacctggcccacgactgcggctacagcatcagcgagctgaacgaggacgacagaagaaaggtggaggagatcaaggccgagctgttcggccacggcagaaccaccgacctgagcaagggcctgcagagccccagaggcatgggctgcaagcccgaggccgtgtgcagccacatcatcatcgagagccacgagaagggctgcttcagaaccctgaccagcgagcacccccagctggacagacacccctgcgccttcagaagcgccggccccagcgagatgaccagaggcagacagaaccccagcagctgcagagccaagcacgtgaacctgagcgccagcctggaccagaacaacagccacttcaaggtgtggaacagcctgcagctgaagagccacagccccttccagaacttcatccccgacgagttcaagatcagcaagggcctgagaatgcccttcgacgagaagatggacccctggctgagcgagctggtggagcccgccttcgtgccccccaaggaggtggacttccacagcagcagccagatgcccagccccgagcccatgaagaagttcaccaccagcatcaccttcagcagccacagacacagcaagtgcatcagcaacagcagcgtggtgaaggtgggcgtgaccgagggcagccagtgcaccggcgccagcgtgggcgtgttcaacagccacttcaccgaggagcagaacccccccagagacctgaagcagaagaccagcagccccagcagcttcaagatgcacagcaacagccaggacaaggaggtgaccatcctggccgagggcagaagacagagccagaagctgcccgtggacttcgagagaagcttccaggaggagaagcccctggagagaagcgacttcaccggcagccacagcgagcccagcaccagagccaactgcagcaacttcaaggagatccagatcagcgacaaccacaccctgatcagcatgggcagacccagcagcaccctgggcgtgaacagaagcagcagcagactgggcgtgaaggagaagaacgtgaccatcacccccgacctgcccagctgcatcttcctggagcagagagagctgttcgagcagagcaaggcccccagagccgacgaccacgtgagaaagcaccacagccccagcccccagcaccaggactacgtggcccccgacctgcccagctgcatcttcctggagcagagagagctgttcgagcagtgcaaggccccctacgtggaccaccagatgagagagaaccacagccccctgccccagggccaggacagcatcgccagcgacctgcccagccccatcagcctggagcagtgccagagcaaggcccccggcgtggacgaccagatgaacaagcaccacttccccctgccccagggccaggactgcgtggtggagaagaacaaccagcacaagcccaagagccacatcagcaacatcaacgtggaggccaagttcaacaccgtggtgagccagagcgcccccaaccactgcaccctggccgccagcgccagcaccccccccagcaacagaaaggccctgagctgcgtgcacatcaccctgtgccccaagaccagcagcaagctggacagcggcaccctggacgagagattccacagcctggacgccgccagcaaggccagaatgaacagcgagttcaacttcgacctgcacaccgtgagcagcagaagcctggagcccaccagcaagctgctgaccagcaagcccgtggcccaggaccaggagagcctgggcttcctgggccccaagagcagcctggacttccaggtggtgcagcccagcctgcccgacagcaacaccatcacccaggacctgaagaccatccccagccagaacagccagatcgtgaccagcagacagatccaggtgaacatcagcgacttcgagggccacagcaaccccgagggcacccccgtgttcgccgacagactgcccgagaagatgaagacccccctgagcgccttcagcgagaagctgagcagcgacgccgtgacccagatcaccaccgagagccccgagaagaccctgttcagcagcgagatcttcatcaacgccgaggacagaggccacgagatcatcgagcccggcaaccagaagctgagaaaggcccccgtgaagttcgccagcagcagcagcgtgcagcaggtgaccttcagcagaggcaccgacggccagcccctgctgctgccctacaagcccagcggcagcaccaagatgtactacgtgccccagctgagacagatcccccccagccccgacagcaagagcgacaccaccgtggagagcagccacagcggcagcaacgacgccatcgcccccgacttccccgcccaggtgctgggcaccagagacgacgacctgagcgccaccgtgaacatcaagcacaaggagggcatctacagcaagagagtggtgaccaaggccagcctgcccgtgggcgagaagcccctgcagaacgagaacgccgacgccagcgtgcaggtgctgatcaccggcgacgagaacctgagcgacaagaagcagcaggagatccacagcaccagagccgtgaccgaggccgcccaggccaaggagaaggagagcctgcagaaggacaccgccgacagcagcgccgccgccgccgccgagcacagcgcccaggtgggcgaccccgagatgaagaacctgcccgacaccaaggccatcacccagaaggaggagatccacagaaagaagaccgtgcccgaggaggcctggcccaacaacaaggagagcctgcagatcaacatcgaggagagcgagtgccacagcgagttcgagaacaccaccagaagcgtgttcagaagcgccaagttctacatccaccaccccgtgcacctgcccagcgaccaggacatctgccacgagagcctgggcaagagcgtgttcatgagacacagctggaaggacttcttccagcaccaccccgacaagcacagagagcacatgtgcctgcccctgccctaccagaacatggacaagaccaagaccgactacaccagaatcaagagcctgagcatcaacgtgaacctgggcaacaaggaggtgatggacaccaccaagagccaggtgagagactaccccaagcacaacggccagatcagcgacccccagagagaccagaaggtgacccccgagcagaccacccagcacaccgtgagcctgaacgagctgtggaacaagtacagagagagacagagacagcagagacagcccgagctgggcgacagaaaggagctgagcctggtggacagactggacagactggccaagatcctgcagaaccccatcacccacagcctgcaggtgagcgagagcacccacgacgacagcagaggcgagagaagcgtgaaggagtggagcggcagacagcagcagagaaacaagctgcagaagaagaagagattcaagagcctggagaagagccacaagaacaccggcgagctgaagaagagcaaggtgctgagccaccacagagccggcagaagcaaccagatcaagatcgagcagatcaagttcgacaagtacatcctgagcaagcagcccggcttcaactacatcagcaacaccagcagcgactgcagacccagcgaggagagcgagctgctgaccgacaccaccaccaacatcctgagcggcaccaccagcaccgtggagagcgacatcctgacccagaccgacagagaggtggccctgcacgagagaagcagcagcgtgagcaccatcgacaccgccagactgatccaggccttcggccacgagagagtgtgcctgagccccagaagaatcaagctgtacagcagcatcaccaaccagcagagaagatacctggagaagagaagcaagcacagcaagaaggtgctgaacaccggccaccccctggtgaccagcgagcacaccagaagaagacacatccaggtggccaaccacgtgatcagcagcgacagcatcagcagcagcgccagcagcttcctgagcagcaacagcaccttctgcaacaagcagaacgtgcacatgctgaacaagggcatccaggccggcaacctggagatcgtgaacggcgccaagaagcacaccagagacgtgggcatcaccttccccacccccagcagcagcgaggccaagctggaggagaacagcgacgtgaccagctggagcgaggagaagagagaggagaagatgctgttcaccggctaccccgaggacagaaagctgaagaagaacaagaagaacagccacgagggcgtgagctggttcgtgcccgtggagaacgtggagagcagaagcaagaaggagaacgtgcccaacacctgcggccccggcatcagctggttcgagcccatcaccaagaccagaccctggagagagcccctgagagagcagaactgccagggccagcacctggacggcagaggctacctggccggccccggcagagaggccggcagagacctgctgagacccttcgtgagagccaccctgcaggagagcctgcagttccacagacccgacttcatcagcagaagcggcgagagaatcaagagactgaagctgatcgtgcaggagagaaagctgcagagcatgctgcagaccgagagagacgccctgttcaacatcgacagagagagacagggccaccagaacagaatgtgccccctgcccaagagagtgttcctggccatccagaagaacaagcccatcagcaagaaggagatgatccagagaagcaagagaatctacgagcagctgcccgaggtgcagaagaagagagaggaggagaagagaaagagcgagtacaagagctacagactgagagcccagctgtacaagaagagagtgaccaaccagctgctgggcagaaaggtgccctgggactag

SEQ ID NO: 184532 - DNA, 7686 bp, Artificial Sequence
  derived and/or modified sequence
atggagcccgaggacctgccctggcccggcgagctggaggaggaggaggaggaggaggaggaggaggaggaggaggaggaggaggccgccgccgccgccgccgccaacgtggacgacgtggtggtggtggaggaggtggaggaggaggccggcagagagctggacagcgacagccactacggcccccagcacctggagagcatcgacgacgaggaggacgaggaggccaaggcctggctgcaggcccaccccggcagaatcctgccccccctgagccccccccagcacagatacagcgagggcgagagaaccagcctggagaagatcgtgcccctgacctgccacgtgtggcagcagatcgtgtaccagggcaacagcagaacccagatcagcgacaccaacgtggtgtgcctggagaccaccgcccagagaggcagcggcgacgaccagaagaccgagagctggcactgcctgccccaggagatggacagcagccagaccctggacaccagccagaccagattcaacgtgagaaccgaggacaccgaggtgaccgacttccccagcctggaggagggcatcctgacccagagcgagaaccaggtgaaggagcccaacagagacctgttctgcagccccctgctggtgatccaggacagcttcgccagccccgacctgcccctgctgacctgcctgacccaggaccaggagttcgcccccgacagcctgttccaccagagcgagctgagcttcgcccccctgagaggcatccccgacaagagcgaggacaccgagtggagcagcagacccagcgaggtgagcgaggccctgttccaggccaccgccgaggtggccagcgacctggccagcagcagattcagcgtgagccagcaccccctgatcggcagcaccgccgtgggcagccagtgccccttcctgcccagcgagcagggcaacaacgaggagaccatcagcagcgtggacgagctgaagatccccaaggactgcgacagatacgacgacctgtgcagctacatgagctggaagaccagaaaggacacccagtggcccgagaacaacctggccgacaaggaccaggtgagcgtggccaccagcttcgacatcaccgacgagaacatcgccaccaagagaagcgaccacttcgacgccgccagaagctacggccagtactggacccaggaggacagcagcaagcaggccgagacctacctgaccaagggcctgcagggcaaggtggagagcgacgtgatcaccctggacggcctgaacgagaacgccgtggtgtgcagcgagagagtggccgagctgcagagaaagcccaccagagagagcgagtaccacagcagcgacctgagaatgctgagaatgagccccgacaccgtgcccaaggcccccaagcacctgaaggccggcgacaccagcaagggcggcatcgccaaggtgacccagagcaacctgaagagcggcatcaccaccacccccgtggacagcgacatcggcagccacctgagcctgagcctggaggacctgagccagctggccgtgagcagcctggagaccaccaccggccagcacaccgacaccctgaaccagaagaccctggccgacacccacctgaccgaggagaccctgaaggtgaccgccatccccgagcccgccgaccagaagaccgccacccccaccgtgctgagcagcagccacagccacagaggcaagcccagcatcttctaccagcagggcctgcccgacagccacctgaccgaggaggccctgaaggtgagcgccgcccccggcctggccgaccagaccaccggcatgagcaccctgaccagcaccagctacagccacagagagaagcccggcaccttctaccagcaggagctgcccgagagcaacctgaccgaggagcccctggaggtgagcgccgcccccggccccgtggagcagaagaccggcatccccaccgtgagcagcaccagccacagccacgtggaggacctgctgttcttctacagacagaccctgcccgacggccacctgaccgaccaggccctgaaggtgagcgccgtgagcggccccgccgaccagaagaccggcaccgccaccgtgctgagcaccccccacagccacagagagaagcccggcatcttctaccagcaggagttcgccgacagccaccagaccgaggagaccctgaccaaggtgagcgccacccccggccccgccgaccagaagaccgagatccccgccgtgcagagcagcagctacagccagagagagaagcccagcatcctgtacccccaggacctggccgacagccacctgcccgaggagggcctgaaggtgagcgccgtggccggccccgccgaccagaagaccggcctgcccaccgtgcccagcagcgcctacagccacagagagaagctgctggtgttctaccagcaggccctgctggacagccacctgcccgaggaggccctgaaggtgagcgccgtgagcggccccgccgacggcaagaccggcacccccgccgtgaccagcaccagcagcgccagcagcagcctgggcgagaagcccagcgccttctaccagcagaccctgcccaacagccacctgaccgaggaggccctgaaggtgagcatcgtgcccggccccggcgaccagaagaccggcatccccagcgcccccagcagcttctacagccacagagagaagcccatcatcttcagccagcagaccctgcccgacttcctgttccccgaggaggccctgaaggtgagcgccgtgagcgtgctggccgcccagaagaccggcacccccaccgtgagcagcaacagccacagccacagcgagaagagcagcgtgttctaccagcaggagctgcccgacagcgacctgcccagagagagcctgaagatgagcgccatccccggcctgaccgaccagaagaccgtgcccacccccaccgtgcccagcggcagcttcagccacagagagaagcccagcatcttctaccagcaggagtggcccgacagctacgccaccgagaaggccctgaaggtgagcaccggccccggccccgccgaccagaagaccgagatccccgccgtgcagagcagcagctacccccagagagagaagcccagcgtgctgtacccccaggtgctgagcgacagccacctgcccgaggagagcctgaaggtgagcgccttccccggccccgccgaccagatgaccgacacccccgccgtgcccagcaccttctacagccagagagagaagcccggcatcttctaccagcagaccctgcccgagagccacctgcccaaggaggccctgaagatcagcgtggcccccggcctggccgaccagaagaccggcacccccaccgtgaccagcaccagctacagccagcacagagagaagcccagcatcttccaccagcaggccctgcccggcacccacatccccgaggaggcccagaaggtgagcgccgtgaccggccccggcaaccagaagacctggatccccagagtgctgagcaccttctacagccagagagagaagcccggcatcttctaccagcagaccctgcccggcagccacatccccgaggaggcccagaaggtgagccccgtgctgggccccgccgaccagaagaccggcacccccacccccaccagcgccagctacagccacaccgagaagcccggcatcttctaccagcaggtgctgcccgacaaccaccccaccgaggaggccctgaagatcagcgtggccagcgagcccgtggaccagaccaccggcacccccgccgtgaccagcaccagctacagccagtacagagagaagcccagcatcttctaccagcagagcctgcccagcagccacctgaccgaggaggccaagaacgtgagcgccgtgcccggccccgccgaccagaagaccgtgatccccatcctgcccagcaccttctacagccacaccgagaagcccggcgtgttctaccagcaggtgctgccccacagccaccccaccgaggaggccctgaagatcagcgtggccagcgagcccgtggaccagaccaccggcacccccaccgtgaccagcaccagctacagccagcacaccgagaagcccagcatcttctaccagcagagcctgcccggcagccacctgaccgaggaggccaagaacgtgagcgccgtgcccggccccggcgacagaaagaccggcatccccaccctgcccagcaccttctacagccacaccgagaagcccggcagcttctaccagcaggtgctgccccacagccacctgcccgaggaggccctggaggtgagcgtggcccccggccccgtggaccagaccatcggcacccccaccgtgaccagccccagcagcagcttcggcgagaagcccatcgtgatctacaagcaggccttccccgagggccacctgcccgaggagagcctgaaggtgagcgtggcccccggccccgtgggccagaccaccggcgcccccaccatcaccagccccagctacagccagcacagagccaagagcggcagcttctaccagctggccctgctgggcagccagatccccgaggaggccctgagagtgagcagcgcccccggccccgccgaccagaccaccggcatccccaccatcaccagcaccagctacagcttcggcgagaagcccatcgtgaactacaagcaggccttccccgacggccacctgcccgaggaggccctgaaggtgagcatcgtgagcggccccaccgagaagaagaccgacatccccgccggccccctgggcagcagcgccctgggcgagaagcccatcaccttctacagacaggccctgctggacagccccctgaacaaggaggtggtgaaggtgagcgccgcccccggccccgccgaccagaagaccgagaccctgcccgtgcacagcaccagctacagcaacagaggcaagcccgtgatcttctaccagcagaccctgagcgacagccacctgcccgaggaggccctgaaggtgccccccgtgcccggccccgacgcccagaagaccgagacccccagcgtgagcagcagcctgtacagctacagagagaagcccatcgtgttctaccagcaggccctgcccgacagcgagctgacccaggaggccctgaaggtgagcgccgtgccccagcccgccgaccagaagaccggcctgagcaccgtgaccagcagcttctacagccacaccgagaagcccaacatcagctaccagcaggagctgcccgacagccacctgaccgaggaggccctgaaggtgagcaacgtgcccggccccgccgaccagaagaccggcgtgagcaccgtgaccagcaccagctacagccacagagagaagcccatcgtgagctaccagagagagctgccccacttcaccgaggccggcctgaagatcctgagagtgcccggccccgccgaccagaagaccggcatcaacatcctgcccagcaacagctacccccagagagagcacagcgtgatcagctacgagcaggagctgcccgacctgaccgaggtgaccctgaaggccatcggcgtgcccggccccgccgaccagaagaccggcatccagatcgccagcagcagcagctacagcaacagagagaaggccagcatcttccaccagcaggagctgcccgacgtgaccgaggaggccctgaacgtgttcgtggtgcccggccagggcgacagaaagaccgagatccccaccgtgcccctgagctactacagcagaagagagaagcccagcgtgatcagccagcaggagctgcccgacagccacctgaccgaggaggccctgaaggtgagccccgtgagcatccccgccgagcagaagaccggcatccccatcggcctgagcagcagctacagccacagccacaaggagaagctgaagatcagcaccgtgcacatccccgacgaccagaagaccgagttccccgccgccaccctgagcagctacagccagatcgagaagcccaagatcagcaccgtgatcggccccaacgaccagaagacccccagccagaccgccttccacagcagctacagccagaccgtgaagcccaacatcctgttccagcagcagctgcccgacagagaccagagcaagggcatcctgaagatcagcgccgtgcccgagctgaccgacgtgaacaccggcaagcccgtgagcctgagcagcagctacttccacagagagaagagcaacatcttcagcccccaggagctgcccggcagccacgtgaccgaggacgtgctgaaggtgagcaccatccccggccccgccggccagaagaccgtgctgcccaccgccctgcccagcagcttcagccacagagagaagcccgacatcttctaccagaaggacctgcccgacagacacctgaccgaggacgccctgaagatcagcagcgccctgggccaggccgaccagatcaccggcctgcagaccgtgcccagcggcacctacagccacggcgagaaccacaagctggtgagcgagcacgtgcagagactgatcgacaacctgaacagcagcgacagcagcgtgagcagcaacaacgtgctgctgaacagccaggccgacgacagagtggtgatcaacaagcccgagagcgccggcttcagagacgtgggcagcgaggagatccaggacgccgagaacagcgccaagaccctgaaggagatcagaaccctgctgatggaggccgagaacatggccctgaagagatgcaacttccccgcccccctggccagattcagagacatcagcgacatcagcttcatccagagcaagaaggtggtgtgcttcaaggagcccagcagcaccggcgtgagcaacggcgacctgctgcacagacagcccttcaccgaggagagccccagcagcagatgcatccagaaggacatcggcacccagaccaacctgaagtgcagaagaggcatcgagaactgggagttcatcagcagcaccaccgtgagaagccccctgcaggaggccgagagcaaggtgagcatggccctggaggagaccctgagacagtaccaggccgccaagagcgtgatgagaagcgagcccgagggctgcagcggcaccatcggcaacaagatcatcatccccatgatgaccgtgatcaagagcgacagcagcagcgacgccagcgacggcaacggcagctgcagctgggacagcaacctgcccgagagcctggagagcgtgagcgacgtgctgctgaacttcttcccctacgtgagccccaagaccagcatcaccgacagcagagaggaggagggcgtgagcgagagcgaggacggcggcggcagcagcgtggacagcctggccgcccacgtgaagaacctgctgcagtgcgagagcagcctgaaccacgccaaggagatcctgagaaacgccgaggaggaggagagcagagtgagagcccacgcctggaacatgaagttcaacctggcccacgactgcggctacagcatcagcgagctgaacgaggacgacagaagaaaggtggaggagatcaaggccgagctgttcggccacggcagaaccaccgacctgagcaagggcctgcagagctag

SEQ ID NO: 184533 - protein, 889 aa, Artificial Sequence
  derived and/or modified sequence
MSYFGEHFWGEKNHGFEVLYHSVKQGPISTKELADFIRERATIEETYSKAMAKLSKLASNGTPMGTFAPLWEVFRVSSDKLALCHLELTRKLQDLIKDVLRYGEEQLKTHKKCKEEVVSTLDAVQVLSGVSQLLPKSRENYLNRCMDQERLRRESTSQKEMDKAETKTKKAAESLRRSVEKYNSARADFEQKMLDSALRFQAMEETHLRHMKALLGSYAHSVEDTHVQIGQVHEEFKQNIENVSVEMLLRKFAESKGTGREKPGPLDFEAYSAAALQEAMKRLRGAKAFRLPGLSRREREPEPPAAVDFLEPDSGTCPEVDEEGFTVRPDVTQNSTAEPSRFSSSDSDFDDEEPRKFYVHIKPAPARAPACSPEAAAAQLRATAGSLILPPGPGGTMKRHSSRDAAGKPQRPRSAPRTSSCAERLQSEEQVSKNLFGPPLESAFDHEDFTGSSSLGFTSSPSPFSSSSPENVEDSGLDSPSHAAPGPSPDSWVPRPGTPQSPPSCRAPPPEARGIRAPPLPDSPQPLASSPGPWGLEALAGGDLMPAPADPTAREGLAAPPRRLRSRKVSCPLTRSNGDLSRSLSPSPLGSSAASTALERPSFLSQTGHGVSRGPSPVVLGSQDALPIATAFTEYVHAYFRGHSPSCLARVTGELTMTFPAGIVRVFSGTPPPPVLSFRLVHTTAIEHFQPNADLLFSDPSQSDPETKDFWLNMAALTEALQRQAEQNPTASYYNVVLLRYQFSRPGPQSVPLQLSAHWQCGATLTQVSVEYGYRPGATAVPTPLTNVQILLPVGEPVTNVRLQPAATWNLEEKRLTWRLPDVSEAGGSGRLSASWEPLSGPSTPSPVAAQFTSEGTTLSGVDLELVGSGYRMSLVKRRFATGMYLVSC

SEQ ID NO: 184534 - protein, 839 aa, Artificial Sequence
  derived and/or modified sequence
MAKLSKLASNGTPMGTFAPLWEVFRVSSDKLALCHLELTRKLQDLIKDVLRYGEEQLKTHKKCKEEVVSTLDAVQVLSGVSQLLPKSRENYLNRCMDQERLRRESTSQKEMDKAETKTKKAAESLRRSVEKYNSARADFEQKMLDSALRFQAMEETHLRHMKALLGSYAHSVEDTHVQIGQVHEEFKQNIENVSVEMLLRKFAESKGTGREKPGPLDFEAYSAAALQEAMKRLRGAKAFRLPGLSRREREPEPPAAVDFLEPDSGTCPEVDEEGFTVRPDVTQNSTAEPSRFSSSDSDFDDEEPRKFYVHIKPAPARAPACSPEAAAAQLRATAGSLILPPGPGGTMKRHSSRDAAGKPQRPRSAPRTSSCAERLQSEEQVSKNLFGPPLESAFDHEDFTGSSSLGFTSSPSPFSSSSPENVEDSGLDSPSHAAPGPSPDSWVPRPGTPQSPPSCRAPPPEARGIRAPPLPDSPQPLASSPGPWGLEALAGGDLMPAPADPTAREGLAAPPRRLRSRKVSCPLTRSNGDLSRSLSPSPLGSSAASTALERPSFLSQTGHGVSRGPSPVVLGSQDALPIATAFTEYVHAYFRGHSPSCLARVTGELTMTFPAGIVRVFSGTPPPPVLSFRLVHTTAIEHFQPNADLLFSDPSQSDPETKDFWLNMAALTEALQRQAEQNPTASYYNVVLLRYQFSRPGPQSVPLQLSAHWQCGATLTQVSVEYGYRPGATAVPTPLTNVQILLPVGEPVTNVRLQPAATWNLEEKRLTWRLPDVSEAGGSGRLSASWEPLSGPSTPSPVAAQFTSEGTTLSGVDLELVGSGYRMSLVKRRFATGMYLVSC

SEQ ID NO: 184535 - DNA, 3118 bp, Artificial Sequence
  derived and/or modified sequence
cgcgccgcagccgcggagggaggggcggggcgggctccggtgtcagcgaccaagccgcaggtggcggcgagcgcggggctcggcccgagctcaggagactggcaatgactctgtagctcaaacttgcctctctcttcagacaggcactggacggggcctgcaggggtctccacagagaccatcaggatgtcgtattttggggagcatttttggggcgagaaaaatcatggctttgaggtcctgtaccacagcgtgaagcaggggcccatctccaccaaggagctggcggacttcatccgggagagggccaccatcgaggagacctactcgaaggcgatggcgaaactctccaagctggccagcaacgggacccccatggggaccttcgccccgctctgggaggtcttccgcgtctcctcggacaagctggcgctgtgccacctggaactgacacggaagttacaggatctcatcaaggacgttctccgctacggcgaggaacagctcaagacccacaagaagtgcaaggaggaagtggtgagcaccttggatgctgtgcaggtactctcgggcgtcagccagctcctgcccaagtcccgcgagaactacctgaaccgttgcatggaccaggagcggctgcggagggagagtaccagccagaaggagatggacaaggcggagactaaaaccaagaaggcggcagagagcctgcggcgctcagtggaaaaatacaactcagcccgagctgactttgagcagaagatgctggactcagccctgcgcttccaagccatggaggagacacacctgaggcacatgaaggcactgctgggctcatatgctcactcggtggaggacacgcacgtgcagattgggcaggtgcatgaggaatttaagcagaacatcgagaacgtcagcgtggagatgctactcaggaagtttgcagagagtaagggcacaggccgggagaagcctggacctctggacttcgaggcatacagtgcggctgccctgcaggaagcgatgaaacgtttgcggggagccaaggcctttcgccttccaggactaagccggcgggagcgggagccagagccacctgcagctgtagatttcctggagcccgattcagggacatgtccagaggtggatgaagaaggtttcactgtccggcctgatgtgacccagaacagcacggccgagccctcccgtttctcgtccagcgactccgacttcgacgatgaagagccccgcaagttctatgtgcacatcaagcctgccccggcccgggctccagcctgcagccccgaggcagcagcggcacagctcagggccaccgcgggcagcctcatccttcctcctggcccagggggcaccatgaaacgccattcttcacgggacgctgctgggaaaccccagagacctcggtctgcccccagaaccagcagctgtgcagagagattgcagtcagaggagcaggtgtccaagaacctctttgggccgcccctggagtcagcctttgaccacgaagattttacaggctctagcagcctgggcttcacctccagcccctcccctttctcctcctcgtcgcccgaaaacgtggaggattccggcctggactctccgtcccacgcggcacctggcccctccccagattcctgggtcccccgcccaggcaccccgcagagcccgcccagctgtagggcgccacccccagaggccaggggtatccgggcaccgcctctgccagactcgccgcagcccctcgcctcgtctccaggcccctgggggctggaggccttggccggaggagacctgatgcctgcacctgctgaccccacagccagggagggcctggcagccccacccaggagacttcgctctaggaaggtgtcctgccctctcacacgtagcaatggggacctgtctcgttccctgagcccctccccactgggctcttcagccgccagcactgccttggaacggcccagcttcttatcccagacaggacacggagtctcccggggtccgagccctgtggtcctgggctcccaggatgccctgcccatagccacagccttcacagagtatgtccacgcctacttccgtggccacagccccagctgcctggctcgagtaactggggagctgaccatgaccttccctgctggcatcgtgcgtgtgttcagcgggaccccaccaccacctgtcctcagcttccggcttgtacacacaaccgctattgagcacttccagcccaacgccgatctgctgttcagtgacccctcccagagtgaccctgagaccaaagacttctggctcaacatggcagctctgaccgaagccctgcagcgccaggcagagcagaaccccactgcctcctactacaacgtggtgctgctgcgataccagttctcccgcccgggtccccagtctgtgcctctgcagctcagtgcccactggcagtgtggagccaccctcacccaggtctcagtggagtacggctaccggcccggtgccacggctgtgcccacaccactcacgaacgtccagatcctgctgcctgtgggggagcctgtgaccaacgtccgcttgcagccggctgccacctggaacctggaggagaagcggctcacttggaggcttccagatgtgtccgaggcaggcggttctggccgcctctctgccagctgggagccgctctcagggcccagcacacccagccccgtggctgcacagttcaccagcgaggggaccactctgtcgggcgtggacttggaactggtgggcagcggttaccgcatgtcgctggtgaagaggaggtttgccacagggatgtacctggtgagctgctgaacccgcaaatgctgctgccccagctctacactgcgccctggtgctggctgaccaccccctgccctcctgccggaccctggggcctcccaccccagcctccctgaggcccatactccacggagaggagccccatgcccagcctggctgagcccgagattcgctcctccccctcatgccaaccccacacaggtcccggccttttaatgttctttgaataaacactttattttctaataaaataaaaaaggaaaccttttcctgc

SEQ ID NO: 184536 - DNA, 3118 bp, Artificial Sequence
  derived and/or modified sequence
cgcgccgcagccgcggagggaggggcggggcgggctccggtgtcagcgaccaagccgcaggtggcggcgagcgcggggctcggcccgagctcaggaggtgagtaatgactctgtagctcaaacttgcctctctcttcagacaggcactggacggggcctgcaggggtctccacagagaccatcaggatgtcgtattttggggagcatttttggggcgagaaaaatcatggctttgaggtcctgtaccacagcgtgaagcaggggcccatctccaccaaggagctggcggacttcatccgggagagggccaccatcgaggagacctactcgaaggcgatggcgaaactctccaagctggccagcaacgggacccccatggggaccttcgccccgctctgggaggtcttccgcgtctcctcggacaagctggcgctgtgccacctggaactgacacggaagttacaggatctcatcaaggacgttctccgctacggcgaggaacagctcaagacccacaagaagtgcaaggaggaagtggtgagcaccttggatgctgtgcaggtactctcgggcgtcagccagctcctgcccaagtcccgcgagaactacctgaaccgttgcatggaccaggagcggctgcggagggagagtaccagccagaaggagatggacaaggcggagactaaaaccaagaaggcggcagagagcctgcggcgctcagtggaaaaatacaactcagcccgagctgactttgagcagaagatgctggactcagccctgcgcttccaagccatggaggagacacacctgaggcacatgaaggcactgctgggctcatatgctcactcggtggaggacacgcacgtgcagattgggcaggtgcatgaggaatttaagcagaacatcgagaacgtcagcgtggagatgctactcaggaagtttgcagagagtaagggcacaggccgggagaagcctggacctctggacttcgaggcatacagtgcggctgccctgcaggaagcgatgaaacgtttgcggggagccaaggcctttcgccttccaggactaagccggcgggagcgggagccagagccacctgcagctgtagatttcctggagcccgattcagggacatgtccagaggtggatgaagaaggtttcactgtccggcctgatgtgacccagaacagcacggccgagccctcccgtttctcgtccagcgactccgacttcgacgatgaagagccccgcaagttctatgtgcacatcaagcctgccccggcccgggctccagcctgcagccccgaggcagcagcggcacagctcagggccaccgcgggcagcctcatccttcctcctggcccagggggcaccatgaaacgccattcttcacgggacgctgctgggaaaccccagagacctcggtctgcccccagaaccagcagctgtgcagagagattgcagtcagaggagcaggtgtccaagaacctctttgggccgcccctggagtcagcctttgaccacgaagattttacaggctctagcagcctgggcttcacctccagcccctcccctttctcctcctcgtcgcccgaaaacgtggaggattccggcctggactctccgtcccacgcggcacctggcccctccccagattcctgggtcccccgcccaggcaccccgcagagcccgcccagctgtagggcgccacccccagaggccaggggtatccgggcaccgcctctgccagactcgccgcagcccctcgcctcgtctccaggcccctgggggctggaggccttggccggaggagacctgatgcctgcacctgctgaccccacagccagggagggcctggcagccccacccaggagacttcgctctaggaaggtgtcctgccctctcacacgtagcaatggggacctgtctcgttccctgagcccctccccactgggctcttcagccgccagcactgccttggaacggcccagcttcttatcccagacaggacacggagtctcccggggtccgagccctgtggtcctgggctcccaggatgccctgcccatagccacagccttcacagagtatgtccacgcctacttccgtggccacagccccagctgcctggctcgagtaactggggagctgaccatgaccttccctgctggcatcgtgcgtgtgttcagcgggaccccaccaccacctgtcctcagcttccggcttgtacacacaaccgctattgagcacttccagcccaacgccgatctgctgttcagtgacccctcccagagtgaccctgagaccaaagacttctggctcaacatggcagctctgaccgaagccctgcagcgccaggcagagcagaaccccactgcctcctactacaacgtggtgctgctgcgataccagttctcccgcccgggtccccagtctgtgcctctgcagctcagtgcccactggcagtgtggagccaccctcacccaggtctcagtggagtacggctaccggcccggtgccacggctgtgcccacaccactcacgaacgtccagatcctgctgcctgtgggggagcctgtgaccaacgtccgcttgcagccggctgccacctggaacctggaggagaagcggctcacttggaggcttccagatgtgtccgaggcaggcggttctggccgcctctctgccagctgggagccgctctcagggcccagcacacccagccccgtggctgcacagttcaccagcgaggggaccactctgtcgggcgtggacttggaactggtgggcagcggttaccgcatgtcgctggtgaagaggaggtttgccacagggatgtacctggtgagctgctgaacccgcaaatgctgctgccccagctctacactgcgccctggtgctggctgaccaccccctgccctcctgccggaccctggggcctcccaccccagcctccctgaggcccatactccacggagaggagccccatgcccagcctggctgagcccgagattcgctcctccccctcatgccaaccccacacaggtcccggccttttaatgttctttgaataaacactttattttctaataaaataaaaaaggaaaccttttcctgc

SEQ ID NO: 184537 - DNA, 3117 bp, Artificial Sequence
  derived and/or modified sequence
cagatggggaaactgaggcacggagctggacagtgactcagacaccaggagctgcctggagtggagctgagagctcaggtctgggctcagccagtccagagtgcaaatctactgtcccttcctagctgtgtgatcttgacaggcactggacggggcctgcaggggtctccacagagaccatcaggatgtcgtattttggggagcatttttggggcgagaaaaatcatggctttgaggtcctgtaccacagcgtgaagcaggggcccatctccaccaaggagctggcggacttcatccgggagagggccaccatcgaggagacctactcgaaggcgatggcgaaactctccaagctggccagcaacgggacccccatggggaccttcgccccgctctgggaggtcttccgcgtctcctcggacaagctggcgctgtgccacctggaactgacacggaagttacaggatctcatcaaggacgttctccgctacggcgaggaacagctcaagacccacaagaagtgcaaggaggaagtggtgagcaccttggatgctgtgcaggtactctcgggcgtcagccagctcctgcccaagtcccgcgagaactacctgaaccgttgcatggaccaggagcggctgcggagggagagtaccagccagaaggagatggacaaggcggagactaaaaccaagaaggcggcagagagcctgcggcgctcagtggaaaaatacaactcagcccgagctgactttgagcagaagatgctggactcagccctgcgcttccaagccatggaggagacacacctgaggcacatgaaggcactgctgggctcatatgctcactcggtggaggacacgcacgtgcagattgggcaggtgcatgaggaatttaagcagaacatcgagaacgtcagcgtggagatgctactcaggaagtttgcagagagtaagggcacaggccgggagaagcctggacctctggacttcgaggcatacagtgcggctgccctgcaggaagcgatgaaacgtttgcggggagccaaggcctttcgccttccaggactaagccggcgggagcgggagccagagccacctgcagctgtagatttcctggagcccgattcagggacatgtccagaggtggatgaagaaggtttcactgtccggcctgatgtgacccagaacagcacggccgagccctcccgtttctcgtccagcgactccgacttcgacgatgaagagccccgcaagttctatgtgcacatcaagcctgccccggcccgggctccagcctgcagccccgaggcagcagcggcacagctcagggccaccgcgggcagcctcatccttcctcctggcccagggggcaccatgaaacgccattcttcacgggacgctgctgggaaaccccagagacctcggtctgcccccagaaccagcagctgtgcagagagattgcagtcagaggagcaggtgtccaagaacctctttgggccgcccctggagtcagcctttgaccacgaagattttacaggctctagcagcctgggcttcacctccagcccctcccctttctcctcctcgtcgcccgaaaacgtggaggattccggcctggactctccgtcccacgcggcacctggcccctccccagattcctgggtcccccgcccaggcaccccgcagagcccgcccagctgtagggcgccacccccagaggccaggggtatccgggcaccgcctctgccagactcgccgcagcccctcgcctcgtctccaggcccctgggggctggaggccttggccggaggagacctgatgcctgcacctgctgaccccacagccagggagggcctggcagccccacccaggagacttcgctctaggaaggtgtcctgccctctcacacgtagcaatggggacctgtctcgttccctgagcccctccccactgggctcttcagccgccagcactgccttggaacggcccagcttcttatcccagacaggacacggagtctcccggggtccgagccctgtggtcctgggctcccaggatgccctgcccatagccacagccttcacagagtatgtccacgcctacttccgtggccacagccccagctgcctggctcgagtaactggggagctgaccatgaccttccctgctggcatcgtgcgtgtgttcagcgggaccccaccaccacctgtcctcagcttccggcttgtacacacaaccgctattgagcacttccagcccaacgccgatctgctgttcagtgacccctcccagagtgaccctgagaccaaagacttctggctcaacatggcagctctgaccgaagccctgcagcgccaggcagagcagaaccccactgcctcctactacaacgtggtgctgctgcgataccagttctcccgcccgggtccccagtctgtgcctctgcagctcagtgcccactggcagtgtggagccaccctcacccaggtctcagtggagtacggctaccggcccggtgccacggctgtgcccacaccactcacgaacgtccagatcctgctgcctgtgggggagcctgtgaccaacgtccgcttgcagccggctgccacctggaacctggaggagaagcggctcacttggaggcttccagatgtgtccgaggcaggcggttctggccgcctctctgccagctgggagccgctctcagggcccagcacacccagccccgtggctgcacagttcaccagcgaggggaccactctgtcgggcgtggacttggaactggtgggcagcggttaccgcatgtcgctggtgaagaggaggtttgccacagggatgtacctggtgagctgctgaacccgcaaatgctgctgccccagctctacactgcgccctggtgctggctgaccaccccctgccctcctgccggaccctggggcctcccaccccagcctccctgaggcccatactccacggagaggagccccatgcccagcctggctgagcccgagattcgctcctccccctcatgccaaccccacacaggtcccggccttttaatgttctttgaataaacactttattttctaataaaataaaaaaggaaaccttttcctgc

SEQ ID NO: 184538 - DNA, 2907 bp, Artificial Sequence
  derived and/or modified sequence
agtggcctcgtggctgtctcctggcgcctgccccgtcagacaggggccccatcccactcgctaccctgtccgatggggaaactgaggcacggagctggacagtgactcagacaccagggcgagaaaaatcatggctttgaggtcctgtaccacagcgtgaagcaggggcccatctccaccaaggagctggcggacttcatccgggagagggccaccatcgaggagacctactcgaaggcgatggcgaaactctccaagctggccagcaacgggacccccatggggaccttcgccccgctctgggaggtcttccgcgtctcctcggacaagctggcgctgtgccacctggaactgacacggaagttacaggatctcatcaaggacgttctccgctacggcgaggaacagctcaagacccacaagaagtgcaaggaggaagtggtgagcaccttggatgctgtgcaggtactctcgggcgtcagccagctcctgcccaagtcccgcgagaactacctgaaccgttgcatggaccaggagcggctgcggagggagagtaccagccagaaggagatggacaaggcggagactaaaaccaagaaggcggcagagagcctgcggcgctcagtggaaaaatacaactcagcccgagctgactttgagcagaagatgctggactcagccctgcgcttccaagccatggaggagacacacctgaggcacatgaaggcactgctgggctcatatgctcactcggtggaggacacgcacgtgcagattgggcaggtgcatgaggaatttaagcagaacatcgagaacgtcagcgtggagatgctactcaggaagtttgcagagagtaagggcacaggccgggagaagcctggacctctggacttcgaggcatacagtgcggctgccctgcaggaagcgatgaaacgtttgcggggagccaaggcctttcgccttccaggactaagccggcgggagcgggagccagagccacctgcagctgtagatttcctggagcccgattcagggacatgtccagaggtggatgaagaaggtttcactgtccggcctgatgtgacccagaacagcacggccgagccctcccgtttctcgtccagcgactccgacttcgacgatgaagagccccgcaagttctatgtgcacatcaagcctgccccggcccgggctccagcctgcagccccgaggcagcagcggcacagctcagggccaccgcgggcagcctcatccttcctcctggcccagggggcaccatgaaacgccattcttcacgggacgctgctgggaaaccccagagacctcggtctgcccccagaaccagcagctgtgcagagagattgcagtcagaggagcaggtgtccaagaacctctttgggccgcccctggagtcagcctttgaccacgaagattttacaggctctagcagcctgggcttcacctccagcccctcccctttctcctcctcgtcgcccgaaaacgtggaggattccggcctggactctccgtcccacgcggcacctggcccctccccagattcctgggtcccccgcccaggcaccccgcagagcccgcccagctgtagggcgccacccccagaggccaggggtatccgggcaccgcctctgccagactcgccgcagcccctcgcctcgtctccaggcccctgggggctggaggccttggccggaggagacctgatgcctgcacctgctgaccccacagccagggagggcctggcagccccacccaggagacttcgctctaggaaggtgtcctgccctctcacacgtagcaatggggacctgtctcgttccctgagcccctccccactgggctcttcagccgccagcactgccttggaacggcccagcttcttatcccagacaggacacggagtctcccggggtccgagccctgtggtcctgggctcccaggatgccctgcccatagccacagccttcacagagtatgtccacgcctacttccgtggccacagccccagctgcctggctcgagtaactggggagctgaccatgaccttccctgctggcatcgtgcgtgtgttcagcgggaccccaccaccacctgtcctcagcttccggcttgtacacacaaccgctattgagcacttccagcccaacgccgatctgctgttcagtgacccctcccagagtgaccctgagaccaaagacttctggctcaacatggcagctctgaccgaagccctgcagcgccaggcagagcagaaccccactgcctcctactacaacgtggtgctgctgcgataccagttctcccgcccgggtccccagtctgtgcctctgcagctcagtgcccactggcagtgtggagccaccctcacccaggtctcagtggagtacggctaccggcccggtgccacggctgtgcccacaccactcacgaacgtccagatcctgctgcctgtgggggagcctgtgaccaacgtccgcttgcagccggctgccacctggaacctggaggagaagcggctcacttggaggcttccagatgtgtccgaggcaggcggttctggccgcctctctgccagctgggagccgctctcagggcccagcacacccagccccgtggctgcacagttcaccagcgaggggaccactctgtcgggcgtggacttggaactggtgggcagcggttaccgcatgtcgctggtgaagaggaggtttgccacagggatgtacctggtgagctgctgaacccgcaaatgctgctgccccagctctacactgcgccctggtgctggctgaccaccccctgccctcctgccggaccctggggcctcccaccccagcctccctgaggcccatactccacggagaggagccccatgcccagcctggctg

SEQ ID NO: 184539 - DNA, 3204 bp, Artificial Sequence
  derived and/or modified sequence
acacaagcctccaacttggtgctgacggaagtggcctcgtggctgtctcctggcgcctgccccgtcagacaggggccccatcccactcgctaccctgtccgatggggaaactgaggcacggagctggacagtgactcagacaccaggagctgcctggagtggagctgagagctcaggtctgggctcagccagtccagagtgcaaatctactgtcccttcctagctgtgtgatcttggcaagcactggacggggcctgcaggggtctccacagagaccatcaggatgtcgtattttggggagcatttttggggcgagaaaaatcatggctttgaggtcctgtaccacagcgtgaagcaggggcccatctccaccaaggagctggcggacttcatccgggagagggccaccatcgaggagacctactcgaaggcgatggcgaaactctccaagctggccagcaacgggacccccatggggaccttcgccccgctctgggaggtcttccgcgtctcctcggacaagctggcgctgtgccacctggaactgacacggaagttacaggatctcatcaaggacgttctccgctacggcgaggaacagctcaagacccacaagaagtgcaaggaggaagtggtgagcaccttggatgctgtgcaggtactctcgggcgtcagccagctcctgcccaagtcccgcgagaactacctgaaccgttgcatggaccaggagcggctgcggagggagagtaccagccagaaggagatggacaaggcggagactaaaaccaagaaggcggcagagagcctgcggcgctcagtggaaaaatacaactcagcccgagctgactttgagcagaagatgctggactcagccctgcgcttccaagccatggaggagacacacctgaggcacatgaaggcactgctgggctcatatgctcactcggtggaggacacgcacgtgcagattgggcaggtgcatgaggaatttaagcagaacatcgagaacgtcagcgtggagatgctactcaggaagtttgcagagagtaagggcacaggccgggagaagcctggacctctggacttcgaggcatacagtgcggctgccctgcaggaagcgatgaaacgtttgcggggagccaaggcctttcgccttccaggactaagccggcgggagcgggagccagagccacctgcagctgtagatttcctggagcccgattcagggacatgtccagaggtggatgaagaaggtttcactgtccggcctgatgtgacccagaacagcacggccgagccctcccgtttctcgtccagcgactccgacttcgacgatgaagagccccgcaagttctatgtgcacatcaagcctgccccggcccgggctccagcctgcagccccgaggcagcagcggcacagctcagggccaccgcgggcagcctcatccttcctcctggcccagggggcaccatgaaacgccattcttcacgggacgctgctgggaaaccccagagacctcggtctgcccccagaaccagcagctgtgcagagagattgcagtcagaggagcaggtgtccaagaacctctttgggccgcccctggagtcagcctttgaccacgaagattttacaggctctagcagcctgggcttcacctccagcccctcccctttctcctcctcgtcgcccgaaaacgtggaggattccggcctggactctccgtcccacgcggcacctggcccctccccagattcctgggtcccccgcccaggcaccccgcagagcccgcccagctgtagggcgccacccccagaggccaggggtatccgggcaccgcctctgccagactcgccgcagcccctcgcctcgtctccaggcccctgggggctggaggccttggccggaggagacctgatgcctgcacctgctgaccccacagccagggagggcctggcagccccacccaggagacttcgctctaggaaggtgtcctgccctctcacacgtagcaatggggacctgtctcgttccctgagcccctccccactgggctcttcagccgccagcactgccttggaacggcccagcttcttatcccagacaggacacggagtctcccggggtccgagccctgtggtcctgggctcccaggatgccctgcccatagccacagccttcacagagtatgtccacgcctacttccgtggccacagccccagctgcctggctcgagtaactggggagctgaccatgaccttccctgctggcatcgtgcgtgtgttcagcgggaccccaccaccacctgtcctcagcttccggcttgtacacacaaccgctattgagcacttccagcccaacgccgatctgctgttcagtgacccctcccagagtgaccctgagaccaaagacttctggctcaacatggcagctctgaccgaagccctgcagcgccaggcagagcagaaccccactgcctcctactacaacgtggtgctgctgcgataccagttctcccgcccgggtccccagtctgtgcctctgcagctcagtgcccactggcagtgtggagccaccctcacccaggtctcagtggagtacggctaccggcccggtgccacggctgtgcccacaccactcacgaacgtccagatcctgctgcctgtgggggagcctgtgaccaacgtccgcttgcagccggctgccacctggaacctggaggagaagcggctcacttggaggcttccagatgtgtccgaggcaggcggttctggccgcctctctgccagctgggagccgctctcagggcccagcacacccagccccgtggctgcacagttcaccagcgaggggaccactctgtcgggcgtggacttggaactggtgggcagcggttaccgcatgtcgctggtgaagaggaggtttgccacagggatgtacctggtgagctgctgaacccgcaaatgctgctgccccagctctacactgcgccctggtgctggctgaccaccccctgccctcctgccggaccctggggcctcccaccccagcctccctgaggcccatactccacggagaggagccccatgcccagcctggctgagcccgagattcgctcctccccctcatgccaaccccacacaggtcccggccttttaatgttctttgaataaacactttattttctaataaaataaaaaaggaaa

SEQ ID NO: 184540 - DNA, 3094 bp, Artificial Sequence
  derived and/or modified sequence
gggcgggctccggtgtcagcgaccaagccgcaggtggcggcgagcgcggggctcggcccgagctcaggagatggggaaactgaggcacggagctggacagtgactcagacaccagacaggcactggacggggcctgcaggggtctccacagagaccatcaggatgtcgtattttggggagcatttttggggcgagaaaaatcatggctttgaggtcctgtaccacagcgtgaagcaggggcccatctccaccaaggagctggcggacttcatccgggagagggccaccatcgaggagacctactcgaaggcgatggcgaaactctccaagctggccagcaacgggacccccatggggaccttcgccccgctctgggaggtcttccgcgtctcctcggacaagctggcgctgtgccacctggaactgacacggaagttacaggatctcatcaaggacgttctccgctacggcgaggaacagctcaagacccacaagaagtgcaaggaggaagtggtgagcaccttggatgctgtgcaggtactctcgggcgtcagccagctcctgcccaagtcccgcgagaactacctgaaccgttgcatggaccaggagcggctgcggagggagagtaccagccagaaggagatggacaaggcggagactaaaaccaagaaggcggcagagagcctgcggcgctcagtggaaaaatacaactcagcccgagctgactttgagcagaagatgctggactcagccctgcgcttccaagccatggaggagacacacctgaggcacatgaaggcactgctgggctcatatgctcactcggtggaggacacgcacgtgcagattgggcaggtgcatgaggaatttaagcagaacatcgagaacgtcagcgtggagatgctactcaggaagtttgcagagagtaagggcacaggccgggagaagcctggacctctggacttcgaggcatacagtgcggctgccctgcaggaagcgatgaaacgtttgcggggagccaaggcctttcgccttccaggactaagccggcgggagcgggagccagagccacctgcagctgtagatttcctggagcccgattcagggacatgtccagaggtggatgaagaaggtttcactgtccggcctgatgtgacccagaacagcacggccgagccctcccgtttctcgtccagcgactccgacttcgacgatgaagagccccgcaagttctatgtgcacatcaagcctgccccggcccgggctccagcctgcagccccgaggcagcagcggcacagctcagggccaccgcgggcagcctcatccttcctcctggcccagggggcaccatgaaacgccattcttcacgggacgctgctgggaaaccccagagacctcggtctgcccccagaaccagcagctgtgcagagagattgcagtcagaggagcaggtgtccaagaacctctttgggccgcccctggagtcagcctttgaccacgaagattttacaggctctagcagcctgggcttcacctccagcccctcccctttctcctcctcgtcgcccgaaaacgtggaggattccggcctggactctccgtcccacgcggcacctggcccctccccagattcctgggtcccccgcccaggcaccccgcagagcccgcccagctgtagggcgccacccccagaggccaggggtatccgggcaccgcctctgccagactcgccgcagcccctcgcctcgtctccaggcccctgggggctggaggccttggccggaggagacctgatgcctgcacctgctgaccccacagccagggagggcctggcagccccacccaggagacttcgctctaggaaggtgtcctgccctctcacacgtagcaatggggacctgtctcgttccctgagcccctccccactgggctcttcagccgccagcactgccttggaacggcccagcttcttatcccagacaggacacggagtctcccggggtccgagccctgtggtcctgggctcccaggatgccctgcccatagccacagccttcacagagtatgtccacgcctacttccgtggccacagccccagctgcctggctcgagtaactggggagctgaccatgaccttccctgctggcatcgtgcgtgtgttcagcgggaccccaccaccacctgtcctcagcttccggcttgtacacacaaccgctattgagcacttccagcccaacgccgatctgctgttcagtgacccctcccagagtgaccctgagaccaaagacttctggctcaacatggcagctctgaccgaagccctgcagcgccaggcagagcagaaccccactgcctcctactacaacgtggtgctgctgcgataccagttctcccgcccgggtccccagtctgtgcctctgcagctcagtgcccactggcagtgtggagccaccctcacccaggtctcagtggagtacggctaccggcccggtgccacggctgtgcccacaccactcacgaacgtccagatcctgctgcctgtgggggagcctgtgaccaacgtccgcttgcagccggctgccacctggaacctggaggagaagcggctcacttggaggcttccagatgtgtccgaggcaggcggttctggccgcctctctgccagctgggagccgctctcagggcccagcacacccagccccgtggctgcacagttcaccagcgaggggaccactctgtcgggcgtggacttggaactggtgggcagcggttaccgcatgtcgctggtgaagaggaggtttgccacagggatgtacctggtgagctgctgaacccgcaaatgctgctgccccagctctacactgcgccctggtgctggctgaccaccccctgccctcctgccggaccctggggcctcccaccccagcctccctgaggcccatactccacggagaggagccccatgcccagcctggctgagcccgagattcgctcctccccctcatgccaaccccacacaggtcccggccttttaatgttctttgaataaacactttattttctaataaaataaaaaaggaaaccttttcctgc

SEQ ID NO: 184541 - DNA, 2670 bp, Artificial Sequence
  derived and/or modified sequence
atgagctatttcggtgaacacttttggggcgagaaaaatcacggctttgaggttctctaccactccgtgaaacagggaccaatcagtactaaagagttggcggatttcatccgcgagcgggcaactatagaggagacatacagtaaggctatggctaaactctcaaaactggcttccaatgggaccccgatgggtacgttcgctcctctgtgggaggtgtttagggtgtcctccgataaactagctctctgtcacctggagctgacaaggaagttacaggatctgatcaaggacgtactgaggtatggtgaagaacagctgaaaacacataagaaatgtaaagaagaagtggtgagtacactggacgctgtgcaggtgctaagcggcgtttcacagctgctgcccaagtcaagagagaactacttgaaccggtgcatggaccaagagcggctcaggcgcgaaagtacctcccaaaaagaaatggacaaggccgagactaaaacaaagaaggccgcagaaagtctccgccgttctgtggaaaagtacaactctgcacgggccgactttgaacaaaagatgctagattccgctctcaggtttcaagctatggaagaaacacatctcagacacatgaaagccctcctgggatcatacgcacactctgttgaggatacacacgtgcagattggccaggttcacgaagagtttaagcagaatatcgagaacgtctctgttgaaatgctgctcagaaaattcgcagagagcaagggtaccgggagagaaaaacccggtcctcttgactttgaggcctacagcgcggcagccctgcaagaggcaatgaagcgtctgagaggagcgaaagcctttagactgccggggttgtctaggagggaaagggaacccgagccccccgcggctgtggacttccttgaacctgacagcggcacctgtccagaggtggacgaagaagggtttactgtcagacctgacgtgacccagaatagtacagccgaaccatcccgattcagttcgtccgactctgacttcgacgacgaggaaccgcgcaagttctatgtgcacattaaacctgctcccgcgagggcccccgcatgtagtccagaagctgctgctgctcagctcagagcgacagctgggagcctcattctgccccccggccctgggggcaccatgaagagacactcctctagggatgccgcaggaaagccacagagaccacgctccgccccgcggacatcttcttgcgcagaacggctgcagagcgaagaacaggtgtctaagaatctgtttggaccgcccttggagtccgcgtttgaccacgaggacttcacaggatcaagctcccttggattcacttcaagcccatctccgtttagtagtagctctccagaaaatgtggaggactccggtctggacagccccagccacgcggccccaggccccagtccagattcatgggtccctagaccaggcactccgcagagtccgccatcatgccgcgccccccctccggaagcccgcggcattagggcgcctccacttcctgatagcccccagcctctcgcaagttcccctgggccctggggattggaggctctggcagggggtgacctgatgcccgcacccgcagatccaacggcaagggaaggacttgcagcgccgccgcgccgcctcaggtccaggaaggtgtcttgtcctctgacgcgctccaatggcgatttgtcccgtagtctgtcaccttccccccttgggagtagtgcagccagcactgcactagaacggccttcattcctgtcccagactggccacggtgtgagtcggggaccttcgcctgtggtcctgggcagtcaggatgctctgccaatagcaacagcattcactgaatatgttcatgcctactttcgcggccacagcccaagctgccttgctagagttactggtgaattgaccatgaccttccccgccgggattgtgcgcgtgtttagcggaacaccaccacctcctgtcctttcctttaggctggttcatacaacagccattgaacacttccagcccaacgcagatctcctgtttagtgatcctagccagtccgatccagagaccaaagatttttggctcaacatggccgcactcacagaagccctgcagagacaagccgagcaaaatcccaccgcctcatattacaatgtggtccttttgcggtatcagttctctcgccccggcccacagtctgtccccctacagctcagcgcgcactggcaatgtggtgccacccttactcaggttagtgtggagtatgggtatcgaccaggagcaactgccgtgcccacccccctgacaaacgtacaaattcttttacccgtgggggaacctgtaacgaacgttagactccagccagcagctacatggaacctggaggagaagaggctgacatggaggctcccggacgtttcagaagccggaggttcagggaggctgtctgcgagttgggagccactctccgggccctccaccccctctcccgtggcggctcagtttacatctgagggaaccacacttagcggagtggacctggagctggttggatcaggctatagaatgtccttggtaaagaggcgcttcgctacaggcatgtacctggtatcttgctag

SEQ ID NO: 184542 - DNA, 2670 bp, Artificial Sequence
  derived and/or modified sequence
atgtcctactttggcgagcacttttggggggagaaaaatcatggtttcgaggtcttgtaccacagcgttaagcagggacccatttcaaccaaggaacttgcggacttcatccgtgagagggccacaattgaagaaacttatagcaaggctatggctaaactcagcaaactggcttccaacggtactcctatgggaactttcgctccactgtgggaagtctttcgagtgtcttctgataaactggctttatgccaccttgagctaaccagaaaactccaggaccttataaaagacgttttgcgctatggagaggagcagctgaagacccataaaaagtgtaaggaagaagtggtgagcactctcgacgctgtgcaggttttaagtggggtctctcaactgttgcctaaaagtagggaaaactacttgaaccgctgtatggaccaagaacgcttacggagggaatctacctcacagaaagaaatggataaggccgagacaaaaactaaaaaagccgccgagtccctcagacgctccgtcgagaagtacaacagcgcacgagctgactttgaacaaaaaatgctggacagcgccctaagatttcaggccatggaggagacccacctacggcatatgaaggcactcctgggctcttatgcccacagcgtagaggacacccatgtccagatcggacaagtccacgaggaatttaagcagaatattgaaaacgtcagtgttgagatgctgctgcggaagtttgccgagagtaaaggaacagggagagagaaacctggcccactcgattttgaggcatatagtgccgccgcgcttcaagaggcgatgaagcgactgcgcggcgcaaaggcattccgcctaccaggcttgagccgccgagaaagagaaccagaacctcctgccgccgtggacttcctcgagcccgactcaggcacatgccctgaggtagacgaagagggtttcacggtgaggccagatgtgacacaaaattctactgctgagccttccagattttcttcatccgactccgattttgacgacgaggaaccacgcaagttctatgtgcacatcaagccagctcccgcccgggcaccagcgtgctcccctgaagcagccgccgcgcagctgcgggctacagccggcagtctgatcctgcctccgggacccggcggtaccatgaaacggcatagttctcgcgatgccgcagggaagccccagcgacccaggagcgccccgcgcacctcttcttgcgccgaacgcctccagtcagaggagcaggtgtctaagaacctcttcggcccccccctcgagtccgctttcgaccacgaggattttaccggctcctcttccctgggtttcacgagttcaccatcaccattttccagctcaagtccagagaacgtagaggactcggggttggactccccctcccatgccgcccctggcccatcccccgattcttgggtgccacgacccggtacgccacagtcgcctcccagttgccgagcgcctccacccgaggcgagagggatcagggcccctccgctgcccgactccccccagcccctggccagtagccccggaccatggggccttgaggccctcgccggaggtgatctgatgcccgcacccgccgaccccacagcccgagagggccttgccgcgccaccgcgaaggctgcggagtcggaaggttagctgtccattgaccaggagcaacggcgacctgagcaggtcccttagcccttcacccctcgggtcaagcgccgcatccactgccttggaacgtccgagcttcctctcacagactgggcacggagttagtcgaggtccgagcccagtcgtcttgggctctcaggacgcgctgcccattgcaacggcttttactgaatatgttcacgcatatttccggggacactctccatcttgcctggcaagggtgaccggggaactgactatgacgttccctgccggcatcgtgagggttttctctggcactcccccacctcccgtcctatcatttcggctggttcataccactgcaatcgagcacttccaacccaacgctgatctgctattcagcgacccctcacagtcggaccctgaaaccaaagacttctggctgaacatggctgctttgaccgaggcacttcagcgccaggcggagcaaaacccgacagcaagctactacaacgtcgttctccttcgataccaattcagccggcctggaccacagtccgtgccgttgcagctcagtgctcattggcaatgtggagctactctgacccaggtgagtgtggagtatgggtaccgacccggcgccaccgccgtccccactcctttgacaaacgtgcagattttactgccagtgggggagcccgtgactaacgtgcgtcttcagcctgccgccacatggaatctcgaagagaaacgacttacctggcgccttcccgacgttagtgaagctggcggtagtgggcggttaagcgcctcctgggaacctctctcggggccctctacacctagccctgtcgccgcccagtttacatcagaggggaccactctgagcggggtggatctggaacttgtcggatcaggttacaggatgagcctagtcaagcgcagattcgctaccgggatgtaccttgtcagttgctag

SEQ ID NO: 184543 - DNA, 2670 bp, Artificial Sequence
  derived and/or modified sequence
atgtcctattttggcgagcacttctggggcgaaaagaatcatggcttcgaggtgctgtatcactccgtaaaacagggccccattagcaccaaggagctggccgattttattagggaacgcgctacaatagaagagacatattccaaggccatggctaagctcagtaaactggcatccaacggtaccccgatggggacttttgccccactttgggaggtctttagagtcagctccgacaagcttgcactgtgccatctggagctgacccgtaagcttcaggatttaattaaggatgtcctccgctacggggaagagcagctcaagactcacaaaaagtgcaaagaggaggtggtttcaacactggacgccgtacaagtacttagcggggtgagccaacttttgcctaagagcagggaaaactacctgaatcggtgtatggaccaggaacgacttcggcgtgaaagcacatcccaaaaagagatggacaaggccgagaccaaaaccaaaaaagccgcagagagtctgaggaggtcggtcgagaagtataacagtgctagagcagattttgagcagaaaatgctcgactcagcactacgatttcaggcgatggaggagactcatctccgccacatgaaggcactgttgggatcatacgcgcactctgtggaggacacccatgtccagattggacaagtccacgaagaattcaagcaaaatatagagaatgtgtctgtggagatgttactaagaaaattcgctgagagcaaaggcacaggtcgggagaagccaggccccctcgatttcgaggcctacagcgcagccgcattacaagaagccatgaagcggctgcgcggcgccaaggccttccgcctccccgggctctcccgaagagaaagggaaccagagccgcccgctgccgtcgactttcttgagcccgacagcgggacatgtcccgaggtggacgaagagggtttcaccgttaggcccgatgttactcagaactccaccgctgaaccctcccggttcagttcctccgacagcgactttgatgacgaagaaccccgaaagttctatgttcatatcaagccagcccccgctcgcgcgccagcatgcagtccggaggcagcagcggcccagttgcgggccaccgccggaagtttgatattgccgcctggcccaggcgggaccatgaaaaggcattcttcgcgggatgcagcagggaaacctcagcgtccaaggagcgctcctcggactagcagttgtgcagagagactgcagagtgaggagcaagtgtctaagaatctgtttggtcccccactggagtctgccttcgaccacgaagactttaccggctctagcagtttagggtttacgagttccccttcccctttttcttccagcagccctgaaaatgtggaggactcaggcttagattcccccagtcatgcagctcctggaccgtcgcccgactcatgggtgcccaggccagggacaccgcagagcccgccttcttgtcgcgcccctcccccagaggctcgagggatccgagcaccgcccctgcccgacagccctcagccactcgcaagctcccccggcccatggggactggaggcactggctggcggggacttgatgcctgctcccgccgaccccacggccagggagggccttgcagctccaccacgtaggttgcgctcgcgtaaggtgtcctgtccacttaccagatctaacggggacctctctagatcactctctccctctcccttgggtagctcagccgcgagtaccgccctcgaaagaccttcgtttctttcccagacgggacatggcgtgagtcggggtccttcccccgtggtgctaggcagccaggatgcccttccaatagctacagccttcacagagtatgtgcatgcatacttcaggggccatagcccttcctgcctcgccagggttacaggcgaactgacgatgaccttcccagcaggcatcgtccgggtcttttcaggtacaccacccccccccgtgctgtctttccggctggttcacactactgcgattgagcattttcagcctaatgccgacctcctgtttagcgaccctagtcagtcagatcccgagaccaaagacttctggctaaatatggctgcgctcactgaagcgctgcaaaggcaggccgaacagaaccctaccgcgtcttattataacgttgttctgttgcgttatcaattcagccggcctggtcctcagtccgtgcccttacagctgtctgcacattggcagtgcggagcaacattaacacaagtaagtgtggagtacggataccggccaggtgctacagccgtgcccacgcctcttacaaacgtgcagatactcctgcccgttggagagccagtgaccaacgtaaggctgcagcctgcagcaacctggaatctcgaagagaaaagactgacttggaggctgccagacgtcagtgaggcaggagggagtggccgcctaagcgctagctgggaaccgctctcgggcccaagtacacccagcccagtggccgctcagttcacaagcgagggcaccacactcagcggagtggacttggagttagtcggatcaggttatcggatgtctctggtgaagaggcgcttcgcgacagggatgtacctggtgagctgttag

SEQ ID NO: 184544 - DNA, 2520 bp, Artificial Sequence
  derived and/or modified sequence
atggcaaaactctctaagctcgcatccaacgggacacctatggggacttttgcccccctgtgggaagtcttcagggtgtcaagcgacaaacttgctctgtgccacctcgaactgacacgcaaattgcaggacctgataaaggacgtgcttagatacggcgaggagcagctgaagacccataaaaaatgcaaggaagaggtggtctccacgctagatgccgtccaggtgctcagcggagtctctcaattactacccaaatcgcgggaaaactacctgaacaggtgtatggaccaggagcgtttgcggcgtgaaagcacaagccagaaggagatggataaggccgaaacaaagacgaaaaaagccgcggaaagtctgcgaaggagcgtggagaaatacaattccgctagagccgacttcgaacagaaaatgctggattctgctcttaggttccaggctatggaagagacacatctcagacacatgaaagctctgctgggctcttacgctcactccgttgaagacacacatgttcaaatcgggcaggtgcacgaggagtttaaacaaaacatcgagaatgtaagtgttgagatgctccttagaaagtttgcagaatctaagggtactgggcgagaaaagcccgggccccttgactttgaagcttattctgccgctgcactccaggaagccatgaagaggctgcgcggagcgaaagctttcagacttcctggcctgtctcgcagggaaagagagccagagcctccggctgcagtcgactttctggagccggatagtggaacttgcccagaggtagatgaagagggattcaccgttcgccccgacgtgacccagaatagtacggccgagccatctcggtttagtagttcagattctgacttcgacgatgaggagcccagaaagttttacgtgcatataaagccagcccccgcccgggcccccgcgtgttctcccgaagctgctgccgcgcagctgagagctaccgccgggtccctgatcctgcctcctggtcccggcggcacaatgaagaggcatagctcaagagacgcagcggggaaaccccagaggccccggtccgcacctaggacgtcctcttgtgctgagcggctgcagtcagaagaacaggtttcaaagaatctttttgggccacccctggagagcgccttcgaccatgaggacttcacagggagtagttctcttggtttcactagctccccctcccccttctcttcctcctctcccgaaaatgttgaggacagtggcctggatagcccttcccacgccgcccccggtccctcaccggattcctgggtaccaagacccgggacaccacagtctccgccgtcttgccgggctcctccgcccgaggcacgcggaattagggctcccccactaccggatagtcctcagcccttagcctccagcccaggcccttgggggttggaggctctggccggcggggaccttatgccagcccccgctgatccgacagccagggaaggtctggctgctcctcctcgacgtctgagaagcaggaaggtctcttgtcctttgacccgttctaatggggatctgtctcgaagcttgagtccctcgcccctcgggtctagcgcggcttctactgctttggagagaccctcctttcttagtcagacggggcatggggtgtcccgcggaccatctccagtggtgttggggtcccaggacgccctgccaatcgctactgcattcaccgagtacgtccacgcctacttccgcggccacagcccaagctgtttagcccgagtaacaggggagttgacgatgaccttccccgccggaatcgttagggtcttctccggaacccctccacccccagttctctcctttagactggtgcatactaccgctattgaacatttccagccaaacgccgacctgctcttttcggatccttcccagagcgaccctgagaccaaggacttttggctgaacatggccgctctgaccgaagcgcttcagcggcaggcagaacagaaccccacagcaagctactacaacgtggttctgctgagatatcagttctcccggcccggccctcagagtgttcccttgcaactgagcgcccattggcagtgcggagccaccctgacccaagtttcagtcgagtatggatacagaccaggggcgacagccgtcccaacaccactgactaacgtccagattctactacctgtcggggagccagtcacgaatgtgaggttacagccagccgctacctggaacctggaggagaagagactcacctggaggctgccggacgtctcggaggccggaggttctgggcggctgtccgcttcttgggaaccattgagtggaccaagcactccgagtcccgtcgctgcacaattcacgagtgaggggacaacgctatctggcgtggacttggagctcgtgggatccgggtatcgtatgtcactggtaaagcgccgcttcgcaaccggtatgtacctggtaagctgttag

SEQ ID NO: 184545 - DNA, 2670 bp, Artificial Sequence
  derived and/or modified sequence
atgtcctattttggcgaacatttttggggggaaaagaatcatggcttcgaagtgctgtaccattccgtgaagcaaggacctattagtacaaaagaattagccgactttattcgagagcgcgccacgatagaagaaacgtatagtaaagccatggcaaagctcagcaaactggcctccaacggaacaccaatgggtactttcgccccattatgggaggtctttagggttagctctgacaaattagccctttgccacctggaactcacacgcaagctgcaggatctgataaaagatgtgctcagatacggagaggaacagctgaagactcataagaaatgcaaagaggaagtcgtaagcaccctagatgctgtccaggttctatccggcgttagccagttgcttcctaagagtcgcgagaactacctcaatagatgcatggatcaagaacggctgagaagggagagcaccagccagaaagaaatggacaaagcggagactaaaaccaaaaaggccgcagaaagcttgcggagatcagtggaaaaatacaattccgctagagcagatttcgagcaaaaaatgttagattccgcactgcgcttccaggccatggaagagactcacctgaggcacatgaaggctctgctcggaagctatgcccacagcgtcgaagacacccacgtgcagatagggcaggtgcacgaggaatttaaacagaatattgaaaatgtctccgtggagatgctgctgaggaaatttgctgagtcaaagggcactggcagagagaagcctggcccgctggatttcgaggcttacagcgccgccgccctgcaggaggccatgaagcgcctcaggggcgccaaagcctttaggttgccaggcttgtcacgaagagaaagggaacccgagccgccggcggcagtcgacttcttggagcccgattccggcacatgtcccgaagtggacgaggaagggttcacggtccggccggacgttacccagaacagcaccgcagagccatcaagattttcaagttctgacagtgactttgacgacgaagagccccgcaaattttatgtccacataaaaccagcacccgctcgagccccggcctgtagccctgaagccgccgcagctcagctgagagccacagcaggctccctgattctgcctcccgggcctggcggtactatgaaacgacactcatctagggacgcagccggtaagccccagagaccccgtagcgcccctcgtacctcaagctgcgcagagcggctgcagtctgaggagcaggtttcgaagaacctcttcggtccgccattggaaagtgcattcgaccatgaggactttactggatcctcttctctcgggttcacaagttccccttcgccatttagcagttcttcacccgaaaatgtggaggacagcggattggacagccctagccacgcggcgccagggccatcccctgactcatgggtcccacggcccgggacaccccagtcaccgccttcttgccgggcacctccgccagaggctcgcggcatcagagccccccccctgccagactctccacagccattggcaagcagccccggcccctggggcctcgaggctcttgcaggaggcgatttgatgcctgctcctgccgaccctacagcccgtgaggggctggccgcccctccaagacggctgaggtctagaaaggtgagttgcccactgacaaggagtaacggtgacctgagccgaagtttgagcccttcacctctgggctccagtgccgcatcaacagcgctcgagcggccatcgttcctctcgcaaacaggacatggcgtctcacgtggaccttccccagtagtcctgggctcacaggatgccctgcccatcgcgactgcctttacagagtatgtccacgcgtacttccgagggcactcacccagctgtctggctcgagtaaccggggaacttactatgacctttccggccggcattgtgcgcgtgttcagcggcacacctccgcccccagtgctctctttccgattggtgcacacaaccgccatcgagcattttcagcctaatgccgatttgctgttttcagatccctcacaaagcgatcccgagaccaaggatttctggttgaacatggctgcactgaccgaagccctgcagaggcaggccgagcagaacccaactgctagttactataacgtggttctgctcagataccagttctcccgcccaggccctcagtctgtgcccttgcaactgtctgcccactggcagtgcggggcaacccttactcaggttagcgtggaatatgggtaccggccaggcgcgactgccgtgcccacgcccttgacaaatgttcagatattactccctgttggggagcccgtgacaaatgtcaggcttcaacccgctgccacgtggaacctggaggaaaaacgccttacttggcgtctgccagatgtctcagaagccggcggttctggccgactgtccgcgtcttgggaacccctgtctgggccgtctacaccttcccctgtggccgcccagttcaccagcgaaggcaccactctctccggagttgacctggaactagtcggatcagggtatcgtatgagtctcgtgaagcgacgctttgctactggcatgtaccttgtctcctgctag

SEQ ID NO: 184546 - DNA, 2670 bp, Artificial Sequence
  derived and/or modified sequence
atgagctactttggggagcacttctggggggagaagaatcacggatttgaggtgctatatcatagtgttaaacaaggtcctatcagcaccaaagagcttgctgattttattagagagagagcaactatcgaggaaacatacagcaaggccatggccaaactgtccaagcttgctagtaacggcacacctatgggtacatttgctcctctttgggaggtatttcgggtgtcttcagataagctggcactctgccacttggagctcacccggaaactgcaggacctgattaaggatgtactacgctatggggaagagcaattgaaaacccacaaaaagtgtaaggaggaggtagtgagtactctggatgccgtccaagttctgtctggagtttcccagctgttgccaaagagccgtgagaactacctgaaccggtgcatggaccaagagagactgagacgcgagagcaccagccaaaaggaaatggataaggcagagaccaaaactaagaaagctgctgaaagtcttcggcgctccgtagaaaaatacaactccgcccgagctgactttgagcagaagatgctcgactctgcactacgtttccaggctatggaagagacgcacttacgacatatgaaagctctactggggagctacgcacacagtgtggaggacacccacgtgcagataggccaggtccatgaggagtttaagcagaacatagaaaacgtgagcgtcgagatgcttcttcgtaaattcgcagagtctaaggggacgggaagggaaaagcctggtcctctggacttcgaggcttactccgcagccgctctccaggaagctatgaaaagattaaggggagcaaaggcctttcggttaccaggtctgagtcggagggaaagagagcccgagcctcctgctgcagtggactttctcgagccagattccggaacatgcccggaggtcgatgaggaagggttcaccgtccggcctgacgtgacccagaactcaacggctgagccgagccgattctcctcttcagattctgatttcgatgacgaagaaccccggaagttttacgttcacattaaaccagccccagcacgcgcccctgcatgcagccccgaagccgccgctgcacagctgcgggcaaccgccgggtccttgattcttccgcccggcccgggaggcaccatgaaaagacattcttctcgggacgccgcagggaaaccccagagacctcggtcagccccacggacctcaagttgcgctgaacgcttacagtcagaggaacaagtaagtaaaaacctgttcggcccaccccttgaaagcgctttcgaccacgaagattttactggctcgagcagtctgggcttcacatcttccccctccccatttagctcttctagcccagagaatgtggaggatagtgggctggatagtccaagtcacgccgcacccgggccttccccagacagctgggtccctcgtccggggactccgcagtcacctccaagctgtcgggcccctccccccgaggctagaggtatacgagccccccctctgccagactcccctcaacccctagcctcctcaccggggccctggggactggaggccttagccgggggggacctcatgccagcaccagccgatccaacggccagagagggcctagctgccccgcctagacgcctacgctcccgcaaggtctcttgcccactgacccgaagcaatggcgacttgtcaaggagtctcagcccaagccctctcggctcaagcgctgcttccaccgcccttgaaagacccagctttctatcccagaccggccatggggtgtctcgagggccttcccctgtcgtcttggggtcgcaggacgccttgccaatcgccaccgcctttacagagtacgtgcatgcatactttcgcggtcattctccctcctgccttgcccgggtgaccggagaactcaccatgacctttccagcggggatcgtgagagtgtttagcggcactccccctcctccagtcctcagtttccggctcgtgcacactaccgcaatcgagcacttccagccgaacgcagacctgcttttttcagacccttcccagtccgatcccgagactaaagatttttggcttaacatggcagctctcactgaagccctgcagcgacaagctgaacagaaccctacagccagctactacaacgttgtcctgttacgctaccagttttcacgacccggtccccagtctgtaccgctccagctctctgcccattggcagtgtggtgcgactttgactcaggtgagtgtcgagtacggctatcgaccaggcgctactgcagttcctacaccacttacaaatgtgcagattctgctccctgtgggagaacctgtgacgaacgttcggttgcagccggcagctacttggaacctggaggaaaagaggttaacctggaggctgccggatgtcagcgaggcgggaggttctggaagattaagcgctagctgggaacctctgtctggcccttctaccccgtcccctgtggcggcccagtttacaagtgagggaacaacgctcagcggagttgatctagagctcgtcggctctggctaccgaatgtctctggtgaagcgccgctttgcaacagggatgtacctcgtttcctgctag

SEQ ID NO: 184547 - DNA, 2670 bp, Artificial Sequence
  derived and/or modified sequence
atgagctactttggagagcacttctggggcgagaagaaccacggctttgaggtgctgtaccacagcgtgaagcagggccccatcagcaccaaggagctggccgacttcatccgggagcgggccaccatcgaggagacctacagcaaggccatggccaagctgagcaagctggccagcaatggcacccccatgggcacctttgcccccctgtgggaggtgttccgggtgtccagtgacaagctggccctgtgccacctggagctgaccaggaagctgcaggacctgatcaaggatgtgctgcgctacggggaggagcagctgaagacccacaagaagtgcaaggaggaggtggtgtccaccctggatgctgtgcaggtgctgagcggcgtgtcccagctgctgcccaagagccgggagaactacctgaaccgctgcatggaccaggagcggctgcggcgggagagcaccagccagaaggagatggacaaggccgagaccaagaccaagaaggctgctgagagcctgcggcgctctgtggagaagtacaacagcgcccgggctgactttgagcagaagatgctggacagcgccctgcgcttccaggccatggaggagacccacctgcggcacatgaaggccctgctgggcagctatgcccacagcgtggaggacacccacgtgcagatcggccaggtgcatgaggagttcaagcagaacattgaaaatgtgtctgtggagatgctgctgaggaagtttgctgagagcaagggcaccggccgggagaagccaggccccctggactttgaggcctacagcgctgctgccctgcaggaggccatgaagaggctgcggggggccaaggccttccggctgcccggcctgagccggcgggagcgggagcctgagcccccagctgctgtggacttcctggagccagacagcggcacctgcccagaggtggatgaggagggcttcaccgtgcggccagatgtgacccagaacagcacagctgagcccagccgcttcagcagcagtgacagcgactttgatgatgaggagcccaggaagttctacgtgcacatcaagccagccccagcccgggccccagcctgcagccctgaggccgctgctgcccagctgcgggccacagctggcagcctcatcctgcccccaggccctgggggcaccatgaagaggcacagcagcagagatgctgctgggaagccccagaggcccaggtctgcccccaggaccagcagctgtgccgagcggctgcagagcgaggagcaggtgtccaagaacctgtttggcccccccctggagagcgcctttgaccacgaggacttcaccggcagcagcagcctgggcttcaccagcagccccagccccttcagcagcagcagcccagaaaatgtggaggacagcggcctggacagccccagccatgctgcccctggccccagcccagacagctgggtgccccggcccggcaccccccagagcccccccagctgccgggcccctcctcctgaggcccggggcatccgggccccacccctgcctgacagcccccagcccctggccagcagccctggcccctggggcctggaggccctggccggcggggacctgatgcctgccccagctgaccccacagcccgggagggcctggccgccccaccccggcggctgcggagcaggaaggtgtcctgccccctgaccaggagcaatggagacctgagccgcagcctgagccccagccccctgggcagcagcgctgccagcacagccctggagcggcccagcttcctgagccagacaggccatggagtgtcccggggccccagccctgtggtgctgggcagccaggatgccctgcccatcgccacagccttcacagaatatgtgcacgcctacttccggggccacagccccagctgcctggcccgggtgactggagagctgaccatgaccttccctgctggcatcgtgcgggtcttcagcggcaccccacctcctcctgtgctgtccttccggctggtgcacaccacagccatcgagcacttccagcccaatgctgacctgctcttcagtgaccccagccagagcgaccctgagaccaaggacttctggctgaacatggccgccctgacagaggccctgcagaggcaggccgagcagaaccccacagccagctactacaacgtggtgctgctgcgctaccagttcagccggcccggcccccagagcgtgcccctgcagctgagcgcccactggcagtgtggggccaccctgacccaggtgtctgtggagtatggctacagacctggggccacagctgtgcccacccccctgaccaacgtgcagatcctgctgcctgtgggggagcctgtgaccaacgtgcggctgcagcctgctgccacctggaacctggaggagaagaggctgacctggaggctgcctgatgtgtctgaggccggcggcagcggccgcctgagcgcctcctgggagcccctgagcggccccagcacccccagccctgtggccgcccagttcaccagcgagggcaccaccctgagcggcgtggacctggagctggtgggcagcggctacaggatgagcctggtgaagagaagatttgccaccggcatgtacctggtgtcctgctag

SEQ ID NO: 184548 - DNA, 2520 bp, Artificial Sequence
  derived and/or modified sequence
atggccaagctgagcaagctggccagcaatggcacccccatgggcacctttgcccccctgtgggaggtgttccgggtgtccagtgacaagctggccctgtgccacctggagctgaccaggaagctgcaggacctgatcaaggatgtgctgcgctacggggaggagcagctgaagacccacaagaagtgcaaggaggaggtggtgtccaccctggatgctgtgcaggtgctgagcggcgtgtcccagctgctgcccaagagccgggagaactacctgaaccgctgcatggaccaggagcggctgcggcgggagagcaccagccagaaggagatggacaaggccgagaccaagaccaagaaggctgctgagagcctgcggcgctctgtggagaagtacaacagcgcccgggctgactttgagcagaagatgctggacagcgccctgcgcttccaggccatggaggagacccacctgcggcacatgaaggccctgctgggcagctatgcccacagcgtggaggacacccacgtgcagatcggccaggtgcatgaggagttcaagcagaacattgaaaatgtgtctgtggagatgctgctgaggaagtttgctgagagcaagggcaccggccgggagaagccaggccccctggactttgaggcctacagcgctgctgccctgcaggaggccatgaagaggctgcggggggccaaggccttccggctgcccggcctgagccggcgggagcgggagcctgagcccccagctgctgtggacttcctggagccagacagcggcacctgcccagaggtggatgaggagggcttcaccgtgcggccagatgtgacccagaacagcacagctgagcccagccgcttcagcagcagtgacagcgactttgatgatgaggagcccaggaagttctacgtgcacatcaagccagccccagcccgggccccagcctgcagccctgaggccgctgctgcccagctgcgggccacagctggcagcctcatcctgcccccaggccctgggggcaccatgaagaggcacagcagcagagatgctgctgggaagccccagaggcccaggtctgcccccaggaccagcagctgtgccgagcggctgcagagcgaggagcaggtgtccaagaacctgtttggcccccccctggagagcgcctttgaccacgaggacttcaccggcagcagcagcctgggcttcaccagcagccccagccccttcagcagcagcagcccagaaaatgtggaggacagcggcctggacagccccagccatgctgcccctggccccagcccagacagctgggtgccccggcccggcaccccccagagcccccccagctgccgggcccctcctcctgaggcccggggcatccgggccccacccctgcctgacagcccccagcccctggccagcagccctggcccctggggcctggaggccctggccggcggggacctgatgcctgccccagctgaccccacagcccgggagggcctggccgccccaccccggcggctgcggagcaggaaggtgtcctgccccctgaccaggagcaatggagacctgagccgcagcctgagccccagccccctgggcagcagcgctgccagcacagccctggagcggcccagcttcctgagccagacaggccatggagtgtcccggggccccagccctgtggtgctgggcagccaggatgccctgcccatcgccacagccttcacagaatatgtgcacgcctacttccggggccacagccccagctgcctggcccgggtgactggagagctgaccatgaccttccctgctggcatcgtgcgggtcttcagcggcaccccacctcctcctgtgctgtccttccggctggtgcacaccacagccatcgagcacttccagcccaatgctgacctgctcttcagtgaccccagccagagcgaccctgagaccaaggacttctggctgaacatggccgccctgacagaggccctgcagaggcaggccgagcagaaccccacagccagctactacaacgtggtgctgctgcgctaccagttcagccggcccggcccccagagcgtgcccctgcagctgagcgcccactggcagtgtggggccaccctgacccaggtgtctgtggagtatggctacagacctggggccacagctgtgcccacccccctgaccaacgtgcagatcctgctgcctgtgggggagcctgtgaccaacgtgcggctgcagcctgctgccacctggaacctggaggagaagaggctgacctggaggctgcctgatgtgtctgaggccggcggcagcggccgcctgagcgcctcctgggagcccctgagcggccccagcacccccagccctgtggccgcccagttcaccagcgagggcaccaccctgagcggcgtggacctggagctggtgggcagcggctacaggatgagcctggtgaagagaagatttgccaccggcatgtacctggtgtcctgctag

SEQ ID NO: 184549 - DNA, 2670 bp, Artificial Sequence
  derived and/or modified sequence
atgagctacttcggcgagcacttctggggcgagaagaaccacggctttgaagtgctctatcacagtgtcaaacaagggcccatctctacgaaggaactggcagattttattcgtgagagagccacaattgaggagacttacagcaaggcaatggctaaactctctaagctagcgagcaacgggacaccaatgggaaccttcgctccgctctgggaggtgttccgagtatcctcagataaactggcactgtgtcacctcgagttgaccagaaagcttcaggacctgataaaagacgttctgaggtatggagaggaacagcttaaaacccataagaagtgtaaagaggaagtggtgtccacactggatgccgtgcaggtgctgagcggggtgagccagctgctgcccaagtccagagagaactacttgaaccgctgtatggaccaggaaaggttacggcgtgagtccacgagccagaaggagatggacaaagccgagaccaagacaaagaaagctgcagagtctttgcggcgcagtgtcgagaaatacaactccgcgcgggcggactttgagcaaaaaatgctggacagcgcattgaggtttcaggcaatggaggagacacatttgagacacatgaaagccctcctgggcagctacgctcactcagtcgaagacactcatgtacagatcggccaggtccatgaagaattcaaacagaacattgaaaatgtctccgtcgaaatgttactgcggaagtttgcggagtccaaggggacgggcagagaaaaacccggcccccttgattttgaggcttattcagcggccgcactccaagaagccatgaaacgcctgcggggcgcaaaggcatttaggctgccaggtctcagtagacgtgagagggagcccgaacccccagctgccgtggactttctcgaacccgactctggaacttgccctgaagtggatgaagagggcttcacagttcgtcccgacgtaacccagaactctacagctgagccttccaggttctcctcaagtgacagtgacttcgacgacgaagaaccgagaaagttttacgtccatattaagcctgctcccgcaagagccccagcttgttcccctgaggccgccgccgctcagttaagggctaccgccggcagcctgatcttgccccccggtccaggtgggaccatgaagcggcactcaagcagagacgccgccggcaagccccaacgaccccgaagcgctccacgaacatcatcctgcgcagaacggctgcaaagcgaggaacaggttagcaagaacctttttggccctccactggagtctgcgttcgaccacgaagactttaccgggagtagtagtctgggattcacatcttcgccctcacccttttcaagttccagcccagagaatgtcgaggatagcggtctggacagtccgtcgcacgctgcaccaggcccaagccccgatagctgggtccctcggcctggaaccccccagtcaccgccgtcctgtagggctcccccccctgaagctagggggatacgtgctccacccttaccggactctccacagcccctggctagcagtcccgggccctggggcctggaagccctggcaggcggggatctgatgccagccccagccgaccccaccgcccgcgaaggtttagccgcccccccccggcggttacgttcgaggaaggtttcttgcccacttaccagatctaatggcgatttgtcacggtctttaagtccgtcaccccttggttcaagtgcggctagcactgcactggagaggccatcattcctgagccaaactgggcacggtgtcagtagaggaccatcccctgtagtattaggaagccaagacgctctgccgatcgctaccgcatttaccgagtacgttcacgcatactttcgcggccactccccttcctgcctcgcccgcgtcactggcgaactgacgatgacgtttccagcaggaatagttcgggtattcagcggcacacccccccctcccgtcctcagctttaggcttgtccatacaacagctatcgagcatttccagccgaacgctgatttgttattcagtgatccatctcagtcagacccagagacaaaagatttttggcttaatatggccgccctgactgaggccttgcagcggcaggccgagcagaaccccacagcgtcatattacaatgtagtgttactgcggtaccagtttagtcgcccaggcccccagtcagttcctttgcaactcagcgcacactggcagtgcggagctacacttacacaggtctccgtggaatacgggtaccgtcccggcgctacagcagtgccaacgcctctaaccaatgtacagatcctgttgcctgtcggggaacccgtcacaaacgtacgtctgcagccagccgccacttggaatctggaagagaaacggctgacttggaggctgcctgacgtctccgaggcaggcgggtctgggagattgtccgcatcttgggagccgctaagtggaccatccaccccaagtcctgttgccgcacagtttacatcggaaggcacaactctcagtggcgtcgatctggagttagttggatcaggctacaggatgtccttagtgaagagaagattcgctacaggcatgtatttggtcagctgctag

SEQ ID NO: 184550 - DNA, 2670 bp, Artificial Sequence
  derived and/or modified sequence
atgagctacttcggcgagcacttctggggcgagaagaaccacggcttcgaggttctgtaccatagtgtgaaacaagggcccatcagtactaaagaacttgccgactttataagggagagagccacaatcgaggagacatattcaaaagctatggccaagctctccaaactggccagcaacggaaccccaatgggtacatttgcgccgttgtgggaggtcttcagagttagcagcgacaagcttgccctgtgtcacttagagctcacccggaagctgcaggacctgattaaggacgtcctgaggtatggtgaggagcagttaaaaacacacaagaaatgcaaagaggaggtggtctccaccctggatgccgttcaggttcttagcggggtgagccagctgttacccaaatcacgcgagaactatctgaaccgatgtatggatcaggagaggctccgccgcgaaagcacttctcagaaggagatggataaagccgagacgaagactaaaaaggcggcagagtctctgcgacggagcgtcgaaaagtacaacagtgccagggctgacttcgagcagaaaatgctcgattctgccctgaggttccaagcgatggaagagacccacttgcggcacatgaaggctttgctgggtagctacgctcattcggtggaagatacacacgttcagatcggccaagtccacgaagaatttaagcaaaatatcgaaaacgtatccgtggaaatgttattaagaaagttcgcggagagcaaggggaccggtagagaaaaaccgggcccgctggattttgaagcctattctgcggctgccctgcaggaagccatgaaaagacttcgtggagcaaaggcatttcgactaccaggcctgagtcgtagagagagggaaccggagccccctgccgccgtggatttcctagaaccagattctgggacttgccctgaggtcgacgaggaagggttcacagtgagacccgatgtgacccagaattcgacagcggaaccctcaaggttctctagcagtgattctgacttcgatgacgaagaacccagaaagttttatgtccacattaagcccgctccagccagggctcccgcctgcagtcccgaagccgcggcagctcaacttagagccaccgcgggatccctgatcctgccaccagggcctgggggcactatgaaacggcactctagcagagacgccgccggaaagccccagagacctagatcagctcctagaacctcaagctgcgccgaacgcctgcaatccgaagagcaagttagcaagaatctgtttggacctcctctggagagtgcatttgaccacgaagatttcaccgggtcaagttctctgggttttacaagctcgcctagtccattctcctcttcctcccccgaaaatgtcgaggacagcggccttgacagccccagtcacgcggcaccagggccatcacctgactcgtgggtgccccggccaggtacgcctcagtctccccctagctgtcgcgcccctcctccagaagcacgaggcatcagagcgcctcctttgccagactccccgcagcctctcgccagttctccgggcccctggggtttggaggccctggccggcggagatctgatgccagcacccgcagaccctaccgcccgcgaaggactggctgccccccctagacgattgaggtcaagaaaagtctcttgtccgttgaccaggagcaacggtgatctatcacgttctttgagtcccagtccgctgggctccagcgctgcctccaccgccctcgaaaggccaagctttctgagccaaacagggcacggtgtaagcaggggcccctcccctgttgtcttgggatcccaggatgctctgcccattgccaccgctttcacagagtacgtgcatgcatactttaggggccacagcccctcatgtctggcgagggtcacgggggaactaaccatgacattccctgccggcatcgtgagggtgtttagtggaacaccccccccgcctgtgctgagcttcagactcgtccataccacagctatcgaacacttccaaccgaatgcagatctcctgtttagtgacccatcgcaaagcgaccctgagaccaaggatttttggctgaacatggccgccctgaccgaggctctccagcgacaggcagaacaaaatcccactgccagttactataatgtcgtcctgctccgctaccaattttctcggcccggcccccagagcgtccctttgcaactgtccgctcattggcagtgcggtgcgactctcacccaggtttcagtggagtacggctatcgacccggcgctactgcggtacctacacctctcaccaacgtgcagattctcctgccagtaggggagcctgtcacaaacgtccgtctgcagcccgcagctacgtggaatctcgaggagaaacggttgacttggaggcttcctgacgtgtcggaggccgggggctctggccgcctgagcgcatcttgggagcctctgagcggcccatcaactccatcgcccgtggccgctcagttcacttcagaggggacaacactgagtggcgtagatttagagctggtcggaagcgggtaccggatgtccctggtcaagcggcgattcgctacggggatgtaccttgtgtcttgttag

SEQ ID NO: 184551 - DNA, 2670 bp, Artificial Sequence
  derived and/or modified sequence
atgagctacttcggcgagcacttctggggcgagaagaaccacggcttcgaggtgctttaccacagcgtgaagcagggaccaatctctacaaaagagctcgctgactttatccgcgaaagggccacaatagaggaaacatacagcaaagctatggccaagctctccaagctcgcaagcaatggcacgccaatgggcacgtttgccccactatgggaagtgtttcgtgtgtcatccgacaagctagcgttatgtcacctcgagctcacaagaaagctccaggacttgatcaaagacgtccttaggtacggagaagagcagttaaaaacacacaagaagtgcaaagaggaagtggtgagcaccctagatgcagtgcaagtgctgtcaggggtcagccagcttctgcctaaatccagagagaattatctgaatcgctgtatggatcaagaaaggctgcggagggagagcacatcacagaaggagatggataaggccgagaccaaaactaaaaaggcggcagagtccttacgccgttctgtggaaaaatacaatagcgcacgggccgactttgagcagaaaatgcttgattccgccctgaggttccaggctatggaggaaacgcatttacgccacatgaaggccctgctcggatcatatgcacattcggtggaggatacacacgtccagataggccaggttcacgaggaattcaagcaaaacattgaaaatgtatcagtcgagatgttgttacgtaaatttgccgaatctaagggtaccggtagggaaaaacccggtccgctagatttcgaagcctacagtgcagccgctctccaggaagctatgaagcggttgcggggagccaaagcctttcgattgcccggactgtctcgacgcgaacgagagccagaacctcctgcagctgtcgacttcctggagccggacagcggcacctgccccgaagtcgacgaagagggctttacggtgcggccggacgtgacccaaaattccaccgctgagccaagccgtttctctagtagcgattctgacttcgacgacgaggagccaaggaaattctacgtccacattaaaccagcccctgcacgggcgcccgcctgcagtcccgaagccgccgccgcacagctcagagcgactgccggttctctgatcctgcctccgggccccggggggaccatgaagcgacactctagccgtgatgccgcaggcaaaccccagagaccgcgttctgccccacgcacgagctcatgcgctgagcgcctccagtccgaggagcaggtatctaagaatctgtttggtcccccacttgaatcagcattcgaccacgaagattttactgggtcctcctcacttgggttcacgagtagtccaagccccttctccagcagctccccagagaatgtggaggattccggtctcgatagtcccagccatgcagcgcctggcccgtccccagatagctgggtcccccgacctggcaccccccagtctcctccctcgtgtcgggctccaccaccagaggctcgcggcattcgtgcgcccccactgccggactcacctcagcccctggcgtcctctccaggaccctggggactggaagccctggccggaggggacctgatgccggcgcctgctgaccccaccgctagggaggggctggctgcccccccacggcggttgcggagtcggaaagtgtcttgccctctgaccagaagcaacggtgacctttcgcgctcactgagcccctccccactggggagttctgcagctagcacagctctggagcgaccttccttcttatcccagaccggccacggcgtcagccgcggaccctctccggttgtcctcggttcccaggatgcactgccaattgctactgccttcacagaatatgtccacgcttactttcgaggccacagcccatcttgcctagccagagtgaccggggaactcactatgacgttccccgcaggaatcgtgcgagtgtttagcggcacgccccctccccctgtgctcagctttcgcctagtgcatacgactgcaatcgaacactttcagcctaacgccgacctgctgttcagtgatcctagccagtccgacccagaaacaaaagatttctggctgaacatggctgccctgaccgaagcgctgcagcgccaggccgagcagaatcctacagcttcgtactacaacgtggttctcttgcgatatcagttcagccgtcctggacctcagtctgttccgctgcaattatctgcgcattggcagtgcggcgccacattgacccaggtgtccgtggaatatggctaccgccccggtgctaccgctgtgcccacccctctgacaaatgtccagatactgttgccagttggggaaccagtaaccaacgtgagattgcagccagccgccacttggaacctcgaggaaaaaaggctgacatggcggctgcccgatgtgtccgaggcaggtggtagcggcagactcagtgctagttgggaacctctatctggaccatctaccccctcaccggtcgcagcacagttcaccagcgaggggacaactctcagcggcgttgatctcgaactcgtgggctcgggctacaggatgtcactggtaaagcgccgattcgcaaccggaatgtacctcgtcagttgctag

SEQ ID NO: 184552 - DNA, 2520 bp, Artificial Sequence
  derived and/or modified sequence
atggccaagctgagcaagctggccagcaacggcacccccatgggcacattcgccccactgtgggaggttttccgcgtgtctagtgacaaacttgcactttgccatttagagctgactagaaaacttcaagatctgatcaaagacgtactgcgatacggagaggagcagctcaagacccacaaaaagtgtaaggaggaggtggtatctacactcgatgccgtgcaggttctcagtggagtgagccaactgttgcccaagagcagggaaaactatctgaacaggtgtatggatcaggagcgacttaggagagaaagtacatcccaaaaagagatggataaagcagagactaagacaaaaaaggctgctgagtcactgcgtcggtccgtcgaaaagtacaatagtgcaagagccgactttgaacaaaagatgcttgattccgctttgcggttccaggcgatggaagaaacccaccttaggcacatgaaagccctgctgggctcttatgcacatagcgtggaggacactcacgtgcaaattggccaggttcacgaggaattcaaacagaacattgaaaatgtgagcgtagagatgttgctgagaaagtttgccgagagcaaagggacaggacgcgagaagccgggacctctggacttcgaggcatattcagcggctgccttgcaggaggccatgaagcggctgcgtggtgctaaggcctttaggctgcctggcttgtctcggcgggaacgcgagccagagcctcctgccgcagtggatttcctcgagcctgacagcggcacctgccccgaagtagatgaggagggattcacagtcaggccggacgtaactcagaacagcactgccgagccctcacgcttcagctcaagcgacagtgattttgacgatgaggagccgcggaagttctatgtgcatataaagccggcaccggctcgtgctcccgcctgttctcctgaagcggccgcggcccagctgagagcaaccgcaggctccctgatcctgccccctggccctggcggtactatgaagcgccactcctcccgcgatgccgcaggcaaaccgcagagacctcgctccgcccctcgcacgagcagctgcgctgaaaggttacagtcagaggagcaggttagtaaaaacctatttggcccacctctggagagcgcttttgaccatgaggattttactggttcttccagcctcggctttaccagttctccttctcccttttcttcctcaagtcccgagaatgtggaagactcaggccttgatagtccttcacacgctgctcctggaccgagccctgatagctgggtgcctaggcccggtacgccacagtcacctccttcctgtcgcgccccaccacctgaagctcgtgggatccgcgcccctcccctgcccgactctcctcagccactggcgtcttcccccggcccttggggcctggaagcactggcaggaggtgacttaatgcccgccccggcagacccgactgctcgcgagggcctggccgcccctcctagacgcctgcgcagccgcaaagtgtcgtgtccattaacgagaagcaatggcgacctcagccgcagcctcagtccaagccccttgggcagctcagcggcatccactgccttagagcgaccctcatttctgagccagaccgggcacggggtcagccgcggccccagtcctgtagtccttgggtctcaggacgcactccccattgccactgcattcactgaatatgtacatgcctatttccgcggacatagtccttcctgcttagccagggttacaggagagcttacaatgaccttcccagctggaatagtaagggtcttctctgggactcctccaccccctgtcctgagttttcgactggttcatactacggctatcgagcattttcagcccaacgccgatttgctgttcagtgacccgtctcagtccgaccccgagactaaagatttctggcttaacatggccgctttaaccgaagccctacagaggcaggccgaacagaatccaaccgcttcttattataatgtggtactacttagatatcagttttctaggccgggcccacagtctgtgcccctacaactgtcagcacattggcaatgtggagcaactctgacgcaggtcagtgtggaatatggatatagaccaggagctaccgcagtaccaacaccgctgacgaatgtgcaaatcctcctgccggtgggcgagcctgtcacaaacgtccgcctacaacccgctgccacctggaacctcgaagaaaagcgactgacatggagactgcctgacgtttctgaggctggtggcagcggacgtctgtctgcttcatgggagcctctgagtggaccgagcacaccatcacccgttgctgcacagtttacaagtgagggcacgaccctctcaggcgtagatttagaactcgtcggctcaggatacaggatgagtttggtcaagcgaaggttcgccacagggatgtacctggtgtcctgctag

SEQ ID NO: 184553 - DNA, 2670 bp, Artificial Sequence
  derived and/or modified sequence
atgagctacttcggcgagcacttctggggcgagaagaaccacggctttgaagtgctttaccattctgtcaaacaaggtcctatcagcacaaaggagcttgcagactttattagggagcgggccactatcgaggaaacctactccaaagccatggccaagctttctaagcttgcttctaatgggacacctatgggcacctttgctcccctatgggaagtgttccgggtgtccagtgacaagcttgccctgtgccatctcgagctcactagaaaactccaggatctgattaaggatgtgctcagatatggggaagaacagctcaagacacacaagaagtgcaaagaggaggtcgtttccaccctggatgctgtgcaagtcctgagtggggtctctcagttgttgcccaagagtagagaaaattacctgaacaggtgtatggatcaggagagactgagacgtgaatcaactagtcagaaggagatggacaaggccgagactaagactaagaaggctgctgaaagcctgaggagaagcgtggagaagtataattccgcgagagccgacttcgagcagaaaatgttggactccgccctgcggttccaggcaatggaagagactcacttacggcacatgaaggcactcctgggcagttacgcacactcagtggaagatacccacgtgcagattggtcaggtgcacgaagaatttaagcagaacatagagaacgtctctgtggaaatgctcctgaggaaatttgccgaaagtaagggaactggaagggagaaacccgggcccttggactttgaagcctattctgcagctgcattgcaggaagcgatgaaaagactgcggggagcgaaagcattccgattacccggactctctaggagagagagagaaccagagccaccagctgctgtggatttcttagagccagacagcggcacttgccccgaggtggacgaggaaggctttacagttcggccagatgtgacccagaattctactgcagagcccagcaggtttagtagcagtgactctgactttgatgatgaagaaccgcgcaagttttatgtgcatattaagcctgctcccgctcgcgctccagcttgcagccccgaagccgccgccgcccagctcagagctacagccggcagtcttatactcccacctggcccaggtgggaccatgaagcgccattcttctagggacgccgcagggaagccgcagcggccccgcagcgctcctcgtacaagttcttgcgccgaaagactacagtcggaggaacaggtgtctaaaaacctgttcggcccacctctcgaatctgccttcgatcatgaggactttacgggttctagtagtctgggatttacgagcagcccatcacccttttctagctccagtcctgaaaacgttgaagatagtggactggatagcccttcccacgcggcgcccggtccatcgccggactcttgggttcctaggccgggaactccgcagtctcccccctcttgtagagcgcccccccctgaagctagagggatccgggccccccctttgcccgactcgcctcaacctctagcttcctcaccaggaccttgggggctggaggcacttgctggcggggacctgatgcctgcccctgccgacccaacagctcgagagggcctggccgctcctcccaggcgtctccgaagtcggaaggtgtcctgcccattgacacgatctaacggggacctcagcaggagccttagcccttccccacttggtagcagtgccgctagcaccgcgctcgagcggccttcattcttgagccaaactgggcacggcgtatcccggggaccctcccctgtggtcttggggtctcaggatgccttgcccatcgccaccgccttcacagaatatgtccacgcatacttccgtgggcacagcccctcttgtctggctagagtaactggtgaacttaccatgacattcccggccggcatagtccgcgtgttctctggcacccctcccccacccgttctgtcctttaggctcgttcatactaccgccatcgagcactttcaaccaaacgctgacctcttgttttccgatcctagccagagcgacccagagactaaggacttttggttgaatatggctgcgctgaccgaggctctccaacgtcaggccgaacaaaatccaacagcctcctattataatgtggtgcttctgcgatatcagttttctagacccgggccgcagtcggtgcccctccagctgtcagcacattggcagtgcggcgcaacattgacgcaggtgagtgtagaatatggatatagacccggagctactgctgtccctaccccgttaacaaatgtccagattttgctgcccgtgggagagccagtcaccaacgtgaggctgcagcccgccgcaacttggaacctggaagagaagagacttacatggcgtctgcctgacgtttctgaggccggagggagtgggcggctgtctgcatcctgggagccactttccggaccaagtacaccatcacccgtagctgcacagtttacatccgaagggaccactctcagcggggtcgacctggaactggtcgggtctggctatcgcatgtccctcgtcaagagaaggttcgcaacaggcatgtacctcgtctcctgttag

SEQ ID NO: 184554 - DNA, 2670 bp, Artificial Sequence
  derived and/or modified sequence
atgagctacttcggcgagcacttctggggcgagaagaaccacggcttcgaggtcttataccattccgtgaaacagggaccaatttctacaaaggagctggccgactttattagggaacgcgccacgatagaggaaacatacagcaaagccatggccaaactctccaagctggcctccaacggtacccctatgggcacatttgctccactgtgggaggtgtttcgcgtcagttctgataaactggccctgtgtcacttagagctcactaggaagctacaggacttgattaaggacgtactcaggtatggggaagagcagctaaaaacacacaagaagtgtaaggaagaagtggtttccaccctcgacgcagtacaggtgctctccggggtttcacagctgctgcccaaatcacgagaaaactacctcaaccgctgcatggatcaagaaaggttgcgacgtgagagtaccagtcaaaaagagatggataaggcagaaacgaagacaaaaaaagcggcagagtccctacggcgctcagttgagaagtacaattcagctcgcgctgactttgaacagaaaatgctggattccgctttgaggtttcaagcgatggaggagactcacttacgccatatgaaagcactgctggggtcatatgcccactccgttgaggatacccatgtgcagatcggtcaggtgcacgaggagttcaaacagaacattgaaaatgtgagtgttgaaatgctactgcgaaaattcgcagagtccaagggcacagggagggagaaaccaggccctctcgatttcgaggcttattccgcggctgctctgcaggaggcaatgaagagactgcgcggcgctaaggcctttcggttgccagggcttagccgcagggagcgagaaccagagccgccagctgccgtggatttcctggaacccgacagtggcacctgtcccgaggtcgatgaggagggctttacagttcgacccgacgttacgcagaattccaccgcagagcctagtaggttctccagttctgattccgattttgacgacgaggaaccacgaaaattctacgtgcatataaagccagcccccgcccgagcaccggcctgttccccagaagctgccgcggcgcagcttcgggccactgccggcagcctgatactgccacccggccctggagggaccatgaaacgccatagctcccgggacgcggcagggaaaccccagaggccgcgatccgcccctaggacgagttcatgcgcggaacggctccaatcagaggagcaagtgagcaagaacctatttggccccccactggaaagcgcatttgaccacgaggacttcaccggatcctcatccctcggatttacctccagcccttccccctttagcagttctagccccgagaatgtggaggactccggccttgacagccctagccatgccgcccctggtccttctcctgatagctgggtgcctcgcccaggcaccccacagtctcctcccagttgcagggctccacccccagaagctaggggcatcagagcccccccgctgcccgatagtcctcaaccactcgctagtagccctggaccatggggcctggaggctttggctggtggagaccttatgcccgcaccggcagaccccacggcaagggagggactcgccgcacctccgcggaggttacgctccaggaaggtgagttgtcccctgaccagaagcaatggggaccttagtcggagcctctcaccaagccctctcggtagtagtgcagcctctactgcactggaacgcccgtcatttcttagtcagactggccacggagtatcccgcggaccctcaccagtggtgctcgggtcacaagacgccctgcccatcgctaccgccttcacagaatatgtgcatgcatatttccggggacactctccatcatgcctggctagggtgacaggcgaactcaccatgacatttccagctggcatcgtccgcgtgttctcaggaactcctcctcctccagtgcttagttttagactagtgcacacgaccgctatagaacacttccagcccaatgcggatctgttgttctctgatccctcccagtccgaccctgagaccaaggacttctggttaaacatggccgctttaactgaagctctccagcgtcaggccgagcagaacccgactgccagttactacaatgttgtgttactccggtaccagttcagcaggccaggaccccagtcggttccactccaactgtcggcccattggcagtgtggcgctacacttactcaggttagcgtcgagtatgggtatagacccggggcgactgccgtccctaccccactcaccaacgtacagatcctcctgcccgtgggcgagccggttaccaacgtacgcctacaacctgcagcaacctggaatctggaggaaaagcgtttaacctggcgactgcctgacgtgagtgaggctggcggctcaggtcgcctgtccgccagttgggaacccctttccggcccctcaactccatcaccagtggcggcccagttcacttccgagggaaccaccctctccggggtggaccttgaactcgttgggagcggataccgtatgtccttggtcaaacgcaggtttgcaaccggcatgtacttggtgagctgctag

SEQ ID NO: 184555 - DNA, 2670 bp, Artificial Sequence
  derived and/or modified sequence
atgtcatactttggagagcatttctggggagagaagaaccacggtttcgaggtgctgtatcatagtgtgaaacaggggccaatcagcaccaaagagctggctgactttatcagggagcgggcaaccattgaggaaacatattcgaaggccatggcaaaactgtctaaattggccagtaatggcacccctatgggtactttcgctcctctgtgggaagttttccgcgtgtctagtgacaaactggccttgtgtcatctggagctcaccagaaagttgcaggacctcatcaaggacgttctacggtacggagaggagcagctgaaaactcacaaaaaatgtaaagaagaggtggtgagtacactggacgcggtgcaggtgctttccggcgtgagtcagctactgcctaaatctcgagaaaattacctcaatcgctgcatggaccaggagcgtctacggcgagagagtacctcccagaaagagatggacaaggcagagactaaaaccaagaaagcggcagaatctctgcgtcgcagtgtcgagaagtataactcagccagagcagacttcgagcagaaaatgctggattctgccttgaggtttcaggccatggaagagacgcacctgagacacatgaaagctttgttagggagttatgcgcacagcgttgaagacacacacgtgcagattgggcaggtccacgaagagttcaaacaaaacatcgaaaacgtgtctgttgagatgctgcttcgaaaattcgcagaatccaaggggacaggacgggagaagcccggaccactggattttgaggcctattcagctgccgctctgcaggaagctatgaagagattgcgaggggctaaggctttccgactgcctggactgtcccgacgggaaagggagcccgaaccccctgcggcagtcgactttttggagccagactcagggacctgccccgaggtggacgaggaggggtttaccgtgcgccctgatgtcacccaaaattcaaccgccgagccttccaggttctcttcctcagatagcgattttgatgatgaggagccgaggaaattctacgtgcatattaagcccgctcctgcaagagctcccgcttgttccccagaggccgcagctgctcagctgcgagctaccgctggcagtctcatccttccgcctggaccagggggaacaatgaagaggcactcatccagagatgccgcaggcaagccccagcgccctcgtagcgcacccaggacttccagttgcgcagagcgtcttcaaagcgaggaacaggttagcaagaatctgtttgggccacctttggaaagcgccttcgatcacgaagacttcacaggctcctcttccctggggtttacctctagccctagtccattttcttcgtcttcgccagagaatgtggaagacagcggtctggactctccctcacacgccgcacccggaccttcccctgattcgtgggtgcccaggcccggtaccccacagtcgccaccttcttgtcgagctccacctcctgaagccagaggaatacgcgctcctccactgcctgactcaccacagccgttagcttcctctcccggaccttgggggttggaggccctggctggtggcgacttgatgcccgctcctgcagatccaacagctagagaaggtctggccgcacccccacggagacttaggagcagaaaggtgtcctgcccgcttacacgttccaatggagacctatcccgtagcctcagcccatctcctctgggtagctcggccgcatcaacagcccttgagcggccatccttcttgtctcaaaccgggcatggcgtgtctcggggaccttcccctgtcgttttgggcagtcaggatgcccttcctattgcaaccgcctttactgaatatgttcatgcctatttcaggggacattcaccttcttgtctggccagagttactggcgaactgactatgacctttcccgcaggaatcgttcgagtgttcagcggcacccctccaccacccgtgctgtcctttcgcctggtgcacacaactgcgatagaacattttcagcctaatgccgatttactattttcagatccttctcagtctgatccggagacaaaggacttctggcttaatatggccgcactgaccgaggcattgcagcggcaggccgagcagaacccgacggcatcctattacaatgtggtgcttctgcggtatcagttcagccgtcctggtccacagtccgtgcccctgcagttgtcagcacattggcagtgcggggctacactgacgcaagtgtctgttgaatatggttaccgccctggagctacagccgtgcccaccccacttacaaatgtccagattctgttgcccgtcggcgaaccagttaccaacgtgcgactccagcctgctgccacctggaatctagaggaaaaaaggctgacttggagacttcctgatgtgagtgaagctggagggtctggacgtctcagcgcctcgtgggaaccactaagcggcccaagcacaccttctcctgttgccgctcagtttacctctgagggtacaacactgagcggggtggacctggaattagtgggcagcggctacaggatgtcgctggtaaagaggcgctttgcaactggtatgtatctggtctcctgctag

SEQ ID NO: 184556 - DNA, 2670 bp, Artificial Sequence
  derived and/or modified sequence
atgtcatactttggagagcacttctggggtgagaagaaccatggcttcgaggtgctctaccactccgtgaagcaggggccaatatctacaaaagagctagccgacttcatacgcgagagggctacaattgaggaaacttatagtaaagcgatggctaagctatctaagctcgcctcaaacggtacacctatggggactttcgctcccctctgggaggtttttcgcgtttcatccgacaagctggctctctgtcacctagagcttacacggaaactccaggatttaattaaggatgttcttcgttatggggaagaacagctgaaaacccacaagaaatgtaaagaagaagtggtgtccaccctggatgccgtgcaagttttgtccggcgtatcccagctcctgcccaagtctcgggaaaactatcttaatcggtgcatggatcaggagcggttgcgccgagagagcacctctcagaaggagatggataaggccgagacaaagactaagaaggctgccgaatcattgaggcgcagcgtggagaaatacaatagcgcaagagcagatttcgaacagaagatgttagatagcgcactccgattccaggcaatggaagaaacccaccttcgccacatgaaggccctgttaggctcctacgcccattctgtcgaggatacacatgtgcaaattggccaagtgcacgaggaattcaagcagaatattgaaaacgtgtccgtggagatgcttcttcgaaagttcgctgagagcaaaggtacaggtcgcgagaaacctggccctctcgacttcgaagcctacagcgcagcggcattacaggaggccatgaaacgacttcgcggagccaaggcctttcggctgccaggactttcacggagggagagggagccagagcccccagctgccgttgatttcctggaacccgacagcggtacttgccctgaggtagacgaggaggggttcacagtgcggcctgatgtgactcaaaacagtaccgcagagccgagcaggttttcctcgtccgactctgatttcgatgatgaggagccgcgtaaattttacgtgcacatcaagccggctccagccagagccccagcatgttcccccgaagccgctgctgcccagctgcgggcaactgcagggagcctgattctgcctcctggacccggtggcaccatgaagcggcacagtagccgcgatgctgcagggaaaccacagagaccacggtctgccccacggacatctagctgcgctgagaggctgcagtccgaagaacaggtatccaagaacctgtttggtccaccactcgaatcagctttcgatcacgaggactttactggcagctcctctttaggatttacaagcagcccttcgccattcagcagctccagcccagagaacgtggaagattcaggcctggatagcccttctcatgcagctcccggaccttctcccgacagctgggtgccacggcctggaactccacagagcccaccctcctgccgcgctcctcctcctgaggctcggggtatccgtgcacctcctctgccagactctccccagcccttggcctcatctcctggtccatgggggctcgaagccctggccggaggcgacctgatgcctgctcctgctgaccctaccgcgagagaaggactcgcagcgccacctcgtaggcttagaagccgaaaggtgtcctgccctctgacccgctccaacggtgatctgagtaggtccttgagcccatctccgctcggatcgtccgcagcaagcaccgcactagaacgcccaagtttcctgtctcaaaccggccacggagtgtctagagggcctagccctgtggttttgggctcgcaggacgctttgccgatagctaccgcttttactgagtacgtgcatgcctactttcgcggacattctccatcgtgtctagcgcgtgtgaccggagagctcactatgacatttcccgctggtattgtaagagtcttttcaggtacaccacccccaccggtactctcctttagactggtgcacaccacggccattgagcactttcagcccaacgcagatttattattctccgaccccagccagagcgatccagagaccaaagacttctggctcaacatggcggctctaacagaggctttgcagagacaagccgagcagaatcccacagcaagctattacaacgtagtgctccttcgttatcagttcagtcgaccaggcccacaaagtgtccctctccagttgagtgcccactggcaatgcggggcaactctgacccaggtctctgtcgagtatggatacagaccaggggctacggcagtccccactcctctcaccaacgtgcagattttgttaccggttggcgagcctgtgacaaacgttaggctccagcccgctgctacttggaatctcgaggagaaaaggctgacttggcgactgccagatgtgtctgaagcaggaggctctggacgcctgagcgcctcctgggaacctttgagcggcccatctactccttctcctgtggctgctcaatttacctcagaaggaacaaccctgtccggagttgacttagagttagtgggatctggctaccggatgagtctggttaagcgtcgctttgccacaggcatgtatttggtcagttgttag

SEQ ID NO: 184557 - DNA, 2670 bp, Artificial Sequence
  derived and/or modified sequence
atgagctactttggggagcacttttggggggagaaaaatcacggatttgaggtactgtatcattctgtcaaacaagggccaatctctacgaaggagcttgcagattttattagggagcgcgcaacaatcgaggagacctactcgaaagcaatggccaagctgtccaagctggccagcaatggtacacccatgggcacatttgctcctttgtgggaagtcttccgggtttcttccgacaagctggccctgtgtcacctcgaactaacacgtaagttacaagacttaattaaggatgttttaagatacggggaggagcagctgaagacacacaaaaagtgcaaagaggaagtggtcagcacacttgatgccgttcaggtgctgagtggcgtctcccagctactgccgaagtccagagagaactatctcaacaggtgcatggatcaagagagactgcggagagagagcacttctcagaaggagatggataaggctgaaaccaagacgaagaaggcagccgagagcctgcgaagaagcgtggagaaatataatagtgcacgcgctgactttgagcagaagatgttggactccgccctgaggttccaggccatggaggagacacacctcaggcacatgaaggctctgctgggatcgtatgctcacagcgtcgaagacacacacgtgcaaattggacaagtgcacgaggagttcaaacaaaatatcgagaacgtctccgtcgagatgctgcttagaaaattcgccgaatccaaaggcaccggtcgggagaagcccggtccacttgatttcgaggcatacagcgccgctgctctgcaggaggctatgaagcgactgaggggggcaaaagccttccgtctgcctggactgtcgagaagggagcgggagccagagccacccgctgctgtcgactttttggaacccgacagcggcacctgcccagaagtggacgaggagggcttcactgtccgcccagacgtgacacagaacagcaccgctgaacccagcaggttctcgtcgtccgactccgatttcgatgatgaagaaccgaggaagttttacgtccacatcaagcctgctccagccagggcaccagcatgtagtccggaggccgctgcagctcagcttcgagccacggcaggctcactgattctgccacctgggccaggcggaaccatgaagcgccactcctctagggacgctgccggtaaaccacaaaggccacgaagtgcccctcgcaccagctcctgcgctgagcggctgcagtccgaggagcaagtttccaaaaacctattcgggccacccttagagagtgcctttgaccacgaagatttcacaggcagctcatccttaggctttaccagctctcccagtccgttctctagcagcagccctgagaacgtggaagattctggcttagactccccctcacacgctgcaccgggaccttcaccagatagctgggtgccacggcctggcaccccacaatcgcccccatcgtgtcgggctcctccccctgaagccagaggaatccgggcacccccactgcctgattctccgcaaccactcgccagttcaccaggaccctggggccttgaagctctggctggtggcgatctgatgcccgctcctgctgaccctacggcgagagagggtctggccgctccaccgagaagactccggagtcgaaaggtctcatgtcccctaacacgcagtaacggggacctgtctcgctccttatccccttctccgctgggatcctccgcggcttcaacagcactagaaagaccgagctttctgtcacagacaggccacggtgtgtccagaggcccttctcccgtggtcctgggctcgcaagatgctcttcccattgcgacagctttcactgagtacgtgcacgcctactttcgaggccacagtccatcttgtttggccagagtgaccggcgagctgaccatgaccttccccgctgggatcgtgcgcgttttcagtggcacaccgcctccaccagtactgtcatttcgccttgtccacacgactgctattgaacattttcagcctaatgcggacttattgttcagcgacccttcacagtccgatcccgaaacaaaggacttttggctaaacatggcagccttgacggaggcactccagagacaagcggagcaaaacccaacagccagttactacaatgttgtgctcctgcgatatcagttttcacggcctgggccacagtccgtcccccttcagctgtcagcccattggcagtgcggggctaccctcacacaagtctccgttgaatatgggtataggccgggagccacagccgtcccaactcccctgactaacgtccagatcctcttaccagtaggtgagcctgtgacgaacgtgaggcttcagcccgcagctacatggaatctggaggaaaaaagactcacctggaggcttccagatgtcagcgaagccggagggtccggtaggctgagcgcctcttgggagccgctgtctggcccatccaccccctcccctgtcgcagcccagtttacatccgagggaactaccctgtcgggagtagatcttgagttggttggcagcggctaccggatgagtcttgtaaaacggagattcgccactggtatgtatctggtgtcctgttag

SEQ ID NO: 184558 - DNA, 2520 bp, Artificial Sequence
  derived and/or modified sequence
atggcaaagctgagtaaacttgctagcaatggtacccccatgggcacttttgcacccctgtgggaagtgttcagggtctctagtgacaaattagccctgtgtcacctcgaactcactaggaagctccaggatctaattaaggacgtgctccgttacggcgaggagcagctgaagacccacaaaaagtgtaaagaagaggttgtgagtaccctagacgcagtacaggtgctgtcgggagtcagccagctactgccgaaatccagggaaaactacttgaaccggtgtatggaccaagagagactccgacgggaatcaactagccagaaagaaatggacaaggcagagaccaagacaaaaaaagccgctgagtcgctgagaaggagtgtagaaaagtataactccgccagagcagactttgaacagaagatgctcgacagtgccctgcgattccaggccatggaggaaactcatctcagacatatgaaggcgctcctcggcagctacgcacacagcgtcgaggacacacacgtgcagatcgggcaggtgcacgaagagttcaagcagaacatcgaaaacgtctccgtcgaaatgctgctgagaaaatttgctgagagcaaaggcacaggacgggagaagcctgggcctctagacttcgaggcctactcggccgctgctctccaggaagcaatgaaacgactccgcggagccaaggcattcagattgcctggccttagcagacgggagagagagcccgagcctcctgccgctgtggactttctggaacctgacagtggaacttgtccggaagtggacgaggaggggtttacagttcgccctgatgtgacgcagaatagtacggcagaaccgagcaggttctctagctccgactccgattttgatgacgaagaaccaaggaagttttacgttcacattaagccagctccagcacgcgcacctgcgtgctcgccggaggctgccgcagctcagttgagagctactgccggttctctcattctgccaccgggtccaggaggaaccatgaagcggcactcatctagggacgctgcaggaaagccacagcggccacgatcagccccacgtacctcctcatgtgcagaacgactccaatcggaagaacaagttagtaagaatctctttggaccgcctctggagagtgcatttgatcacgaagactttaccggatcttctagccttgggtttacttctagcccttcaccattttctagctcctctcctgagaacgtggaggattctggactggactcgccaagccatgctgctcccggtcctagtccggatagctgggtgcctcgccctggaactccccagtctccaccaagttgcagggcccctcccccagaagcgcgaggtatccgtgccccaccactgcctgatagccctcagcctctggcgtcatcccccggaccctggggcctggaggcactggccggtggtgatctgatgcccgcacccgcagatcccacagcacgcgagggactggccgcaccacccagacgtttgaggtcaagaaaagtatcatgcccactgactagatcaaatggtgacctttcccggtcactgagtccgtcccccctggggagctctgccgcttcaacggccttggagcgaccctccttcctgagccagaccggacacggcgtgagccgcggaccaagcccagtcgtccttggctctcaggacgccctgcctatcgccacagccttcactgagtatgttcatgcctattttagaggccattctccatcctgtctggcacgtgttactggagagctgacaatgacttttcccgctggtatcgtgcgggtttttagcggtacacctccacccccagtgttgagttttcgactggtccataccacagccattgaacacttccaaccgaacgctgatttgttgtttagtgaccccagccagagcgacccggagaccaaagacttttggttaaacatggccgctttgactgaggcactccagaggcaggccgaacagaaccccactgcaagttactacaatgtcgtgctgctgagatatcagtttagtcggcctggccctcagagtgttcctttacagctgagcgcacattggcagtgcggcgcaaccctgactcaggtcagcgtggagtatgggtatcgccctggcgctacagctgtacccaccccattgaccaacgtgcagatcctcctgcccgtgggagaacctgtaacgaacgtccgcctgcaaccagctgctacctggaacctagaggaaaagaggttgacttggcgcctacccgacgtgtccgaagccggaggctccgggcgactctccgcttcatgggaaccgctaagtggaccctccacaccaagtcccgttgctgctcagttcacgagcgagggcactactctgagcggtgtggatttggagctggtggggtccggatatcgcatgtccctcgtgaagcgtcgttttgctacgggaatgtatctggtgtcttgctag

SEQ ID NO: 184559 - DNA, 2670 bp, Artificial Sequence
  derived and/or modified sequence
atgtcctacttcggtgaacacttttggggagagaaaaaccatggattcgaagtgctgtaccattctgtgaagcaggggcctatctcaaccaaagagctagccgattttataagagaacgggctaccatcgaggagacttatagtaaagctatggccaaactgagcaagctggctagtaatggaacacccatgggcaccttcgccccactgtgggaagtttttagagtgtcttcagacaagctggccctatgccacctggaactgacccgcaagctgcaggacttgataaaggatgttttaaggtacggagaagaacagctcaaaactcacaagaagtgcaaggaggaagttgttagtacgttagatgctgtacaggtcttgagtggagtgtctcaactcttgccaaagtccagggagaattacctcaaccggtgcatggaccaggagcggctcaggcgggagtcaacgagccaaaaggagatggacaaagcagaaacgaaaaccaagaaggccgctgaaagcctgcgtcggtctgtggaaaagtataactccgccagagccgatttcgagcaaaagatgcttgacagtgccctgcggttccaagccatggaggaaacacacttgcgccacatgaaggccctgctgggatcctacgcccattcagtagaagacacccacgtccagatcggccaggtacacgaggagtttaaacagaacatcgaaaatgtttccgtcgaaatgttgctgcgcaaatttgccgagtctaagggaaccggcagggaaaagccagggccactcgatttcgaggcctattctgcagctgcccttcaggaggctatgaaaagactgaggggggcaaaggccttccgactcccagggttaagtcgacgcgaacgggagcccgagccccctgccgctgtggactttctagagccggactccggcacttgccccgaggtggatgaggaaggatttactgtgcgaccagacgtgactcaaaattcaaccgcagaaccgtctaggttctcaagctctgattcggatttcgatgatgaggagcctcggaagttttacgtccacattaaacctgctcctgcccgagccccagcatgctcacccgaggccgctgctgctcagctgcgggctaccgccggatctctcatactgccccctggacctggcggtacgatgaagcggcacagttccagggacgctgccggtaagccacaacgccctcgttccgccccacgaacctcatcctgtgccgagcgcctgcagagcgaggaacaggtaagcaaaaatttgttcggtccccctctggagagcgccttcgaccacgaagatttcactggcagctcctctcttgggttcactagctcccctagtcccttttcctcttccagtccagaaaacgtcgaggattccgggcttgactccccctctcatgccgctccagggccatctccagactcatgggttccaagacccggaacccctcagtccccaccctcttgtcgcgctccaccccctgaggccagaggtatacgcgctcccccactgcctgattccccacagccacttgcgtcctcacctgggccttgggggttagaggctctggccggaggtgacttgatgcccgctccagctgacccaaccgcacgcgagggtttggccgctccaccacgacgcttgcgcagcaggaaagtcagctgccctctgacccgttccaatggtgatcttagccggtccttgtccccttctcctctcggctccagcgcggcaagtaccgccttggagcgaccctcttttctaagtcagacagggcacggcgtgtcacgagggccttctcccgtagtcttgggttcccaagacgcactccccatcgcaacggcgtttacagagtacgtccacgcctactttcggggacacagccccagctgtctcgcacgggtcactggagagctcacaatgactttcccggctgggattgttcgcgtgttcagcggcacgccccctcccccagtgctgtcattcaggctcgtacacaccaccgctatcgaacacttccaacccaatgccgacctgctgtttagtgacccatcacaatctgatcccgagaccaaagacttctggttgaacatggctgcattgaccgaggccctgcaacgacaggccgagcagaaccccacggcttcctactacaatgtggtccttctgaggtatcagtttagcagaccgggaccacagtccgtgcctcttcagcttagcgcacactggcaatgtggagccaccttgacacaggtgtctgttgaatatggctatcgtcccggagcgactgcagttcctacgccactgactaatgtgcagattctgctgcctgtcggcgagcccgttacgaacgtgaggctccagccagcagcgacctggaatctagaagagaagcgactgacatggagactgccggatgtgtcagaagccggaggctccggccgactgtcggcctcttgggagccactaagcggaccttctacacccagccccgtggcggctcaattcacctctgagggaacgaccctctccggcgtggacctggagctggttgggtctgggtaccgtatgtcactcgtgaagagaagattcgccacagggatgtacctggtgtcttgttag

SEQ ID NO: 184560 - DNA, 2670 bp, Artificial Sequence
  derived and/or modified sequence
atgtcctacttcggggagcacttctggggagagaagaatcacgggttcgaggtactctaccatagcgttaagcaggggccaatcagtaccaaggaactcgcggattttataagggagcgcgctacaatcgaggagacgtattccaaagcaatggcaaagcttagcaaactcgcatctaacggaaccccgatgggaacttttgctcctctgtgggaggttttcagggtgtcctcagataagttggccctctgccacttggaattaacgagaaaactgcaggacctgattaaggacgtgttacgttatggtgaggagcagcttaaaactcacaaaaagtgcaaggaagaggtcgtctccacactggacgctgtgcaagttctgtctggggtgtcacagctcttacctaaatctcgggagaattatctgaatagatgcatggatcaggagagactgagaagggaatctacatcacaaaaggagatggataaagccgaaaccaagaccaagaaggctgccgagtcacttagaagatcggtggagaagtataattctgccagggccgatttcgagcagaagatgctcgacagcgccctacggtttcaggcgatggaagagacacacctacggcatatgaaggcactgttgggcagctacgctcacagcgtggaagatacccacgttcagattggtcaggtacacgaggagtttaagcagaacatagagaatgtatccgtcgagatgctgctgcggaaatttgcagaatccaagggcacaggcagagaaaaacccggaccactcgacttcgaggcttactctgctgccgctctccaagaggctatgaagagactacgtggggctaaagctttccggctgcctgggctctcccggcgagaaagggagcctgaaccgccagcggcagtggactttctggagcccgactcagggacatgtcccgaagtagacgaggaagggttcaccgtacgtcctgacgtcacacagaattcgaccgccgagccatccaggttttccagtagcgatagcgattttgacgatgaagaaccccgtaagttttatgtacacattaaaccagcaccagcgagagcaccagcttgttcccctgaagcagccgcagctcagctgagggctactgcaggatccctcatactgccacctggcccaggcggaacgatgaagagacatagtagccgagacgccgctgggaaaccccagcgcccacgcagcgcacctcgcacaagttcctgcgcagagagactccagtctgaagaacaggtgtccaaaaacctgtttggcccacccctggagagcgccttcgatcacgaagatttcacagggagctcttctctggggttcacttccagcccaagcccattctccagcagcagccccgagaatgtggaggactctggtttagacagccctagtcacgctgccccaggcccttcccccgattcctgggtgccccgtcctggtacaccccagagcccccctagttgcagggcacctcctccagaagccagaggcatccgggctccacccctgcccgattctcctcaaccactggccagttccccagggccatggggactcgaagcgttggccggaggagaccttatgcccgcaccagccgaccccacagcgagagagggactggcggctcccccaagacgcctgagatcccggaaggttagctgccctttaacccggtctaacggtgatcttagtagatcactgtcccccagtccgttgggtagttcagccgctagtaccgcactggagcgacctagttttttgagtcagaccggacacggcgtttcacgaggcccttctcctgttgtcctgggcagccaggatgccctgcctatcgctacggcctttacggaatacgttcatgcgtacttccgaggtcatagccccagctgcctcgctagggtgactggggagctaactatgacattccccgcaggaatcgtccgggtgttcagtggaacaccacctccccctgtgctcagcttccgactggtgcacactacagctattgaacatttccagccgaatgccgaccttcttttctctgacccaagccagagcgacccagagaccaaggacttttggctcaacatggctgctctaaccgaggcattacagcgccaggcagagcagaatcccaccgcctcgtattataacgtggtgctgctgcggtatcaattctcaaggccgggaccccagagcgtgccgttgcagctatccgctcactggcaatgcggcgcaacacttacacaagtcagtgtagagtacgggtatagacccggtgccactgcagtcccaaccccactgaccaatgttcaaattctgctgccagttggagaaccggtaactaacgtaagactccagcccgctgcgacatggaacttggaagagaaacggctgacatggaggttgccagatgtgtccgaagctggtggaagtggaagactttctgcctcatgggagcccttaagcggcccatctacaccgagtccagttgccgctcagtttacaagcgaaggcactacactcagcggagtggatctggaactagtgggctcgggctacagaatgtctctggttaaaagaagatttgctaccgggatgtacctagtcagctgctag

SEQ ID NO: 184561 - DNA, 2670 bp, Artificial Sequence
  derived and/or modified sequence
atgagctacttcggcgagcacttctggggcgagaagaaccacggcttcgaggtgctgtaccacagcgtgaagcagggccccatcagcaccaaggagctggccgacttcatcagagagagagccaccatcgaggagacctacagcaaggccatggccaagctgagcaagctggccagcaacggcacccccatgggcaccttcgcccccctgtgggaggtgttcagagtgagcagcgacaagctggccctgtgccacctggagctgaccagaaagctgcaggacctgatcaaggacgtgctgagatacggcgaggagcagctgaagacccacaagaagtgcaaggaggaggtggtgagcaccctggacgccgtgcaggtgctgagcggcgtgagccagctgctgcccaagagcagagagaactacctgaacagatgcatggaccaggagagactgagaagagagagcaccagccagaaggagatggacaaggccgagaccaagaccaagaaggccgccgagagcctgagaagaagcgtggagaagtacaacagcgccagagccgacttcgagcagaagatgctggacagcgccctgagattccaggccatggaggagacccacctgagacacatgaaggccctgctgggcagctacgcccacagcgtggaggacacccacgtgcagatcggccaggtgcacgaggagttcaagcagaacatcgagaacgtgagcgtggagatgctgctgagaaagttcgccgagagcaagggcaccggcagagagaagcccggccccctggacttcgaggcctacagcgccgccgccctgcaggaggccatgaagagactgagaggcgccaaggccttcagactgcccggcctgagcagaagagagagagagcccgagccccccgccgccgtggacttcctggagcccgacagcggcacctgccccgaggtggacgaggagggcttcaccgtgagacccgacgtgacccagaacagcaccgccgagcccagcagattcagcagcagcgacagcgacttcgacgacgaggagcccagaaagttctacgtgcacatcaagcccgcccccgccagagcccccgcctgcagccccgaggccgccgccgcccagctgagagccaccgccggcagcctgatcctgccccccggccccggcggcaccatgaagagacacagcagcagagacgccgccggcaagccccagagacccagaagcgcccccagaaccagcagctgcgccgagagactgcagagcgaggagcaggtgagcaagaacctgttcggcccccccctggagagcgccttcgaccacgaggacttcaccggcagcagcagcctgggcttcaccagcagccccagccccttcagcagcagcagccccgagaacgtggaggacagcggcctggacagccccagccacgccgcccccggccccagccccgacagctgggtgcccagacccggcaccccccagagcccccccagctgcagagcccccccccccgaggccagaggcatcagagccccccccctgcccgacagcccccagcccctggccagcagccccggcccctggggcctggaggccctggccggcggcgacctgatgcccgcccccgccgaccccaccgccagagagggcctggccgccccccccagaagactgagaagcagaaaggtgagctgccccctgaccagaagcaacggcgacctgagcagaagcctgagccccagccccctgggcagcagcgccgccagcaccgccctggagagacccagcttcctgagccagaccggccacggcgtgagcagaggccccagccccgtggtgctgggcagccaggacgccctgcccatcgccaccgccttcaccgagtacgtgcacgcctacttcagaggccacagccccagctgcctggccagagtgaccggcgagctgaccatgaccttccccgccggcatcgtgagagtgttcagcggcaccccccccccccccgtgctgagcttcagactggtgcacaccaccgccatcgagcacttccagcccaacgccgacctgctgttcagcgaccccagccagagcgaccccgagaccaaggacttctggctgaacatggccgccctgaccgaggccctgcagagacaggccgagcagaaccccaccgccagctactacaacgtggtgctgctgagataccagttcagcagacccggcccccagagcgtgcccctgcagctgagcgcccactggcagtgcggcgccaccctgacccaggtgagcgtggagtacggctacagacccggcgccaccgccgtgcccacccccctgaccaacgtgcagatcctgctgcccgtgggcgagcccgtgaccaacgtgagactgcagcccgccgccacctggaacctggaggagaagagactgacctggagactgcccgacgtgagcgaggccggcggcagcggcagactgagcgccagctgggagcccctgagcggccccagcacccccagccccgtggccgcccagttcaccagcgagggcaccaccctgagcggcgtggacctggagctggtgggcagcggctacagaatgagcctggtgaagagaagattcgccaccggcatgtacctggtgagctgctag

SEQ ID NO: 184562 - DNA, 2520 bp, Artificial Sequence
  derived and/or modified sequence
atggccaagctgagcaagctggccagcaacggcacccccatgggcaccttcgcccccctgtgggaggtgttcagagtgagcagcgacaagctggccctgtgccacctggagctgaccagaaagctgcaggacctgatcaaggacgtgctgagatacggcgaggagcagctgaagacccacaagaagtgcaaggaggaggtggtgagcaccctggacgccgtgcaggtgctgagcggcgtgagccagctgctgcccaagagcagagagaactacctgaacagatgcatggaccaggagagactgagaagagagagcaccagccagaaggagatggacaaggccgagaccaagaccaagaaggccgccgagagcctgagaagaagcgtggagaagtacaacagcgccagagccgacttcgagcagaagatgctggacagcgccctgagattccaggccatggaggagacccacctgagacacatgaaggccctgctgggcagctacgcccacagcgtggaggacacccacgtgcagatcggccaggtgcacgaggagttcaagcagaacatcgagaacgtgagcgtggagatgctgctgagaaagttcgccgagagcaagggcaccggcagagagaagcccggccccctggacttcgaggcctacagcgccgccgccctgcaggaggccatgaagagactgagaggcgccaaggccttcagactgcccggcctgagcagaagagagagagagcccgagccccccgccgccgtggacttcctggagcccgacagcggcacctgccccgaggtggacgaggagggcttcaccgtgagacccgacgtgacccagaacagcaccgccgagcccagcagattcagcagcagcgacagcgacttcgacgacgaggagcccagaaagttctacgtgcacatcaagcccgcccccgccagagcccccgcctgcagccccgaggccgccgccgcccagctgagagccaccgccggcagcctgatcctgccccccggccccggcggcaccatgaagagacacagcagcagagacgccgccggcaagccccagagacccagaagcgcccccagaaccagcagctgcgccgagagactgcagagcgaggagcaggtgagcaagaacctgttcggcccccccctggagagcgccttcgaccacgaggacttcaccggcagcagcagcctgggcttcaccagcagccccagccccttcagcagcagcagccccgagaacgtggaggacagcggcctggacagccccagccacgccgcccccggccccagccccgacagctgggtgcccagacccggcaccccccagagcccccccagctgcagagcccccccccccgaggccagaggcatcagagccccccccctgcccgacagcccccagcccctggccagcagccccggcccctggggcctggaggccctggccggcggcgacctgatgcccgcccccgccgaccccaccgccagagagggcctggccgccccccccagaagactgagaagcagaaaggtgagctgccccctgaccagaagcaacggcgacctgagcagaagcctgagccccagccccctgggcagcagcgccgccagcaccgccctggagagacccagcttcctgagccagaccggccacggcgtgagcagaggccccagccccgtggtgctgggcagccaggacgccctgcccatcgccaccgccttcaccgagtacgtgcacgcctacttcagaggccacagccccagctgcctggccagagtgaccggcgagctgaccatgaccttccccgccggcatcgtgagagtgttcagcggcaccccccccccccccgtgctgagcttcagactggtgcacaccaccgccatcgagcacttccagcccaacgccgacctgctgttcagcgaccccagccagagcgaccccgagaccaaggacttctggctgaacatggccgccctgaccgaggccctgcagagacaggccgagcagaaccccaccgccagctactacaacgtggtgctgctgagataccagttcagcagacccggcccccagagcgtgcccctgcagctgagcgcccactggcagtgcggcgccaccctgacccaggtgagcgtggagtacggctacagacccggcgccaccgccgtgcccacccccctgaccaacgtgcagatcctgctgcccgtgggcgagcccgtgaccaacgtgagactgcagcccgccgccacctggaacctggaggagaagagactgacctggagactgcccgacgtgagcgaggccggcggcagcggcagactgagcgccagctgggagcccctgagcggccccagcacccccagccccgtggccgcccagttcaccagcgagggcaccaccctgagcggcgtggacctggagctggtgggcagcggctacagaatgagcctggtgaagagaagattcgccaccggcatgtacctggtgagctgctag

SEQ ID NO: 184563 - protein, 1034 aa, Artificial Sequence
  derived and/or modified sequence
MASVFMCGVEDLLFSGSRFVWNLTVSTLRRWYTERLRACHQVLRTWCGLQDVYQMTEGRHCQVHLLDDRRLELLVQPKLLARELLDLVASHFNLKEKEYFGITFIDDTGQQNWLQLDHRVLDHDLPKKPGPTILHFAVRFYIESISFLKDKTTVELFFLNAKACVHKGQIEVESETIFKLAAFILQEAKGDYTSDENARKDLKTLPAFPTKTLQEHPSLAYCEDRVIEHYLKIKGLTRGQAVVQYMKIVEALPTYGVHYYAVKDKQGLPWWLGISYKGIGQYDIQDKVKPRKLFQWKQLENLYFREKKFAVEVHDPRRISVSRRTFGQSGLFVQTWYANSSLIKSIWVMAISQHQFYLDRKQSKAKIPSARSLDEIAMDLTETGTQRASKLVTLETKSQFIMASNGSLISSGSQDSEVSEEQKREKILELKKKEKLLQEKLLKKVEELKKICLREAELTGKMPKEYPLNIGEKPPQVRRRVGTAFKLDDNLLPSEEDPALQELESNFLIQQKLVEAAKKLANEPDLCKTVKKKRKQDYTDAMKKLQEIENAINEYRIRCGKKPSQKATVLPEDIIPSESSSLSDTTTYDDPSDAFTFPGQRSSSVPHSPRILPPKSLGIERIHFRKSSINEQFVDTRQSREMLSTHSSPYKTLERRPQGGRSMPTTPVLTRNAYSSSHLEPESSSQHCRQRSGSLESQSHLLSEMDSDKPFFSLSKSQRSSSTEILDDGSSYTSQSSTEYYCVTPVTGPYYTTQTLDTRTRGRRRSKKQNVSTSNSGSMPNLAQKDSLRNGVYSKSQEPPSSSYYIAGYTPYAECDFYYSGGYVYENDTEGQYSVNPSYRSSAHYGYERQRDYSRSFHEDEVDRVPHNPYATLRLPRKAAAKSEHITKNIHKALVAEHLRGWYQRASGQKDQGHSPQTSFDSDRGSQRCLGFAGLQVPCSPSSRASSYSSVSSTNASGNWRTQLTIGLSDYETPAHSSYTSCYGNVYNPLPSPSRQYTEISQLDGTDGNQLEDNLESSEQRLFWHEDSKPGTLV

SEQ ID NO: 184564 - DNA, 3105 bp, Artificial Sequence
  derived and/or modified sequence
atggccagcgtgttcatgtgcggcgtggaggacctgctgttcagcggcagcagattcgtgtggaacctgaccgtgagcaccctgagaagatggtacaccgagagactgagagcctgccaccaggtgctgagaacctggtgcggcctgcaggacgtgtaccagatgaccgagggcagacactgccaggtgcacctgctggacgacagaagactggagctgctggtgcagcccaagctgctggccagagagctgctggacctggtggccagccacttcaacctgaaggagaaggagtacttcggcatcaccttcatcgacgacaccggccagcagaactggctgcagctggaccacagagtgctggaccacgacctgcccaagaagcccggccccaccatcctgcacttcgccgtgagattctacatcgagagcatcagcttcctgaaggacaagaccaccgtggagctgttcttcctgaacgccaaggcctgcgtgcacaagggccagatcgaggtggagagcgagaccatcttcaagctggccgccttcatcctgcaggaggccaagggcgactacaccagcgacgagaacgccagaaaggacctgaagaccctgcccgccttccccaccaagaccctgcaggagcaccccagcctggcctactgcgaggacagagtgatcgagcactacctgaagatcaagggcctgaccagaggccaggccgtggtgcagtacatgaagatcgtggaggccctgcccacctacggcgtgcactactacgccgtgaaggacaagcagggcctgccctggtggctgggcatcagctacaagggcatcggccagtacgacatccaggacaaggtgaagcccagaaagctgttccagtggaagcagctggagaacctgtacttcagagagaagaagttcgccgtggaggtgcacgaccccagaagaatcagcgtgagcagaagaaccttcggccagagcggcctgttcgtgcagacctggtacgccaacagcagcctgatcaagagcatctgggtgatggccatcagccagcaccagttctacctggacagaaagcagagcaaggccaagatccccagcgccagaagcctggacgagatcgccatggacctgaccgagaccggcacccagagagccagcaagctggtgaccctggagaccaagagccagttcatcatggccagcaacggcagcctgatcagcagcggcagccaggacagcgaggtgagcgaggagcagaagagagagaagatcctggagctgaagaagaaggagaagctgctgcaggagaagctgctgaagaaggtggaggagctgaagaagatctgcctgagagaggccgagctgaccggcaagatgcccaaggagtaccccctgaacatcggcgagaagcccccccaggtgagaagaagagtgggcaccgccttcaagctggacgacaacctgctgcccagcgaggaggaccccgccctgcaggagctggagagcaacttcctgatccagcagaagctggtggaggccgccaagaagctggccaacgagcccgacctgtgcaagaccgtgaagaagaagagaaagcaggactacaccgacgccatgaagaagctgcaggagatcgagaacgccatcaacgagtacagaatcagatgcggcaagaagcccagccagaaggccaccgtgctgcccgaggacatcatccccagcgagagcagcagcctgagcgacaccaccacctacgacgaccccagcgacgccttcaccttccccggccagagaagcagcagcgtgccccacagccccagaatcctgccccccaagagcctgggcatcgagagaatccacttcagaaagagcagcatcaacgagcagttcgtggacaccagacagagcagagagatgctgagcacccacagcagcccctacaagaccctggagagaagaccccagggcggcagaagcatgcccaccacccccgtgctgaccagaaacgcctacagcagcagccacctggagcccgagagcagcagccagcactgcagacagagaagcggcagcctggagagccagagccacctgctgagcgagatggacagcgacaagcccttcttcagcctgagcaagagccagagaagcagcagcaccgagatcctggacgacggcagcagctacaccagccagagcagcaccgagtactactgcgtgacccccgtgaccggcccctactacaccacccagaccctggacaccagaaccagaggcagaagaagaagcaagaagcagaacgtgagcaccagcaacagcggcagcatgcccaacctggcccagaaggacagcctgagaaacggcgtgtacagcaagagccaggagccccccagcagcagctactacatcgccggctacaccccctacgccgagtgcgacttctactacagcggcggctacgtgtacgagaacgacaccgagggccagtacagcgtgaaccccagctacagaagcagcgcccactacggctacgagagacagagagactacagcagaagcttccacgaggacgaggtggacagagtgccccacaacccctacgccaccctgagactgcccagaaaggccgccgccaagagcgagcacatcaccaagaacatccacaaggccctggtggccgagcacctgagaggctggtaccagagagccagcggccagaaggaccagggccacagcccccagaccagcttcgacagcgacagaggcagccagagatgcctgggcttcgccggcctgcaggtgccctgcagccccagcagcagagccagcagctacagcagcgtgagcagcaccaacgccagcggcaactggagaacccagctgaccatcggcctgagcgactacgagacccccgcccacagcagctacaccagctgctacggcaacgtgtacaaccccctgcccagccccagcagacagtacaccgagatcagccagctggacggcaccgacggcaaccagctggaggacaacctggagagcagcgagcagagactgttctggcacgaggacagcaagcccggcaccctggtgtag

SEQ ID NO: 184565 - DNA, 3105 bp, Artificial Sequence
  derived and/or modified sequence
atggcctcagtgtttatgtgtggagttgaggatctcttattcagcgggagtcgctttgtctggaacctcaccgtcagtactctacgacgctggtataccgagcgtcttcgtgcttgtcaccaagtactcaggacctggtgcggactgcaagacgtctaccagatgaccgagggacgccattgccaggtgcacctcctcgacgaccgtcgcttggagctgttggtacagcctaaactccttgcccgcgagctgctggatctggtcgcttctcatttcaatctgaaggagaaagagtactttggtatcacgtttatcgatgatacagggcagcaaaattggctacagctcgaccacagagtgctggatcacgatctccctaagaaacccggtccaacaatcctgcactttgcggtgcgcttttatatcgaaagcatctcattcctgaaagacaagaccactgtcgagctcttctttctgaacgctaaggcatgcgtgcataaaggccagattgaagtggaatccgagacaatttttaaattggccgccttcattctgcaggaggccaaaggagactatacgagcgatgagaacgcgcggaaggatctgaaaaccctgcctgcattcccaaccaagaccctccaggaacacccatcattggcttactgtgaagatagagtgatcgaacattacctgaagattaaagggttaactcgaggacaggccgtggtccagtacatgaagattgttgaggcactccctacttacggggtacattattacgctgttaaggacaagcaaggcctgccctggtggctcggtattagttataaaggcatcgggcagtacgacattcaggataaagtcaagcctcgcaagctatttcagtggaagcagcttgagaacctgtatttcagggagaagaagttcgccgtggaggtgcatgacccgcgacgcatatctgtttctcgccgaactttcggccagtccggcctgtttgtacagacctggtacgccaactcatcccttattaagagcatttgggtgatggccatcagccagcatcagttctacctcgaccgcaaacagtctaaggcaaagatccctagcgccaggtcattggatgagattgcaatggatctcaccgagacaggcacgcaaagagctagcaaactggtgactctcgagaccaagagtcagttcatcatggccagtaacgggtctttgattagttctggctcccaggatagtgaggtgagcgaagaacagaagcgcgagaagatactggagctaaagaagaaggagaagcttctgcaggaaaagcttctcaaaaaagttgaagaacttaagaagatctgtctccgagaagcggagttgaccgggaagatgcctaaagaatacccgctgaatatcggcgagaaaccaccacaggtgagacggcgggtgggaaccgccttcaagcttgatgacaacttgctaccaagcgaagaagaccccgctctccaagagttagagtccaattttcttattcaacagaaactcgtcgaggccgcaaaaaagctcgctaacgagccggatttatgcaagacagtgaagaaaaaacgcaaacaggattacactgacgcgatgaaaaagctgcaggagattgaaaatgctatcaacgaatacagaatacggtgcggcaaaaaaccttctcaaaaggccactgtactgcccgaggatatcattccgtctgagagtagcagtttatcagataccacaacatatgacgacccttcagacgcttttacttttcctggccagaggtcttcttctgttcctcattccccacgtatcctgccgcctaagtcactgggcatcgagcgcattcatttcaggaaatcctccattaatgagcagtttgtggacaccagacagtcaagagaaatgctatcgacccactctagtccctacaagactctggagagacgcccccagggaggccgttccatgcccactacgcccgtactgactaggaatgcctattccagcagccatctcgaacctgaatcctcttctcaacactgccgccagcgttctgggagcctagaatcccagtctcatctgttgagcgagatggacagtgacaagccattcttctcccttagcaaatcccaacggtcaagctccacagagatccttgacgacggcagttcgtatacatcacagtcttctacagaatattattgcgtgactcccgtcacaggcccttactataccactcagaccctggatacaaggactcgaggaagacggcggtcaaagaagcagaacgtgtcaacaagtaacagcggatctatgccaaacctcgcccagaaggacagccttaggaacggggtgtactcaaagtcccaggagcctccaagctctagttactacattgctggctatactccctatgccgaatgcgatttctattactcaggggggtatgtgtatgagaacgatactgagggacagtacagtgtcaacccctcatacagatcttcggctcactacgggtacgaaaggcaacgagactatagtagatcatttcacgaagacgaagttgaccgcgtgcctcacaacccctatgccacacttagattgccccgcaaagccgccgctaagtctgagcacatcaccaagaacatccataaggcccttgttgcagaacatctccgcggctggtaccaacgcgcttcagggcagaaagatcagggccacagcccacagaccagctttgattctgatagaggatcacaacgctgcctcggcttcgctggcctgcaggttccctgtagtcccagcagtcgggcatcttcgtattccagcgtatccagtactaacgcgtcggggaattggaggacacagttaaccatcggtctgtcggattatgagacgcctgcccatagttcctacacctcctgttatggcaacgtctataatcctctgccctctccctctcgacagtacactgaaatctcacagctggacggaaccgacggtaatcaactggaggataacctagaatctagcgagcagcggttattctggcacgaggattctaaacctggaactttggtgtag

SEQ ID NO: 184566 - DNA, 3105 bp, Artificial Sequence
  derived and/or modified sequence
atggcctctgtgttcatgtgtggggtggaggacctgctcttcagcggcagcagatttgtgtggaacctgactgtgtccaccctgcggcgctggtacacagagcggctgcgggcctgccaccaggtgctgcggacctggtgtggcctgcaggatgtgtaccagatgacagagggccgccactgccaggtgcacctgctggatgaccggcggctggagctgctggtgcagcccaagctgctggcccgggagctgctggacctggtggccagccacttcaacctgaaggagaaggagtacttcggcatcaccttcattgatgacaccggccagcagaactggctgcagctggaccaccgggtgctggaccatgacctgcccaagaagccaggccccaccatcctgcactttgctgtgcgcttctacatcgagagcatctccttcctgaaggacaagaccaccgtggagctgttcttcctgaatgccaaggcctgtgtgcacaagggccagatcgaggtggagagcgagaccatcttcaagctggccgccttcatcctgcaggaggccaagggggactacaccagtgatgaaaatgccaggaaggacctgaagaccctgcctgccttccccaccaagaccctgcaggagcaccccagcctggcctactgtgaagatagagtgattgagcactacctgaagatcaagggcctgacccggggccaggccgtggtgcagtacatgaagatcgtggaggccctgcccacctatggagtgcactactatgctgtgaaggacaagcagggcctgccctggtggctgggcatctcctacaagggcatcggccagtatgacatccaggacaaggtgaagcccaggaagctgttccagtggaagcagctggagaacctgtacttccgggagaagaagtttgctgtggaggtgcatgacccccggcgcatctctgtgtccaggaggaccttcggccagagcggcctgtttgtgcagacctggtacgccaacagcagcctcatcaagagcatctgggtgatggccatcagccagcaccagttctacctggacaggaagcagagcaaggccaagatccccagcgcccggagcctggatgagatcgccatggacctgacagaaacaggcacccagagggccagcaagctggtgaccctggagaccaagagccagttcatcatggccagcaatggcagcctcatcagcagcggcagccaggacagcgaggtgtctgaggagcagaagcgggagaagatcctggagctgaagaagaaggagaagctgctgcaggagaagctgctgaagaaggtggaggagctgaagaagatctgcctgcgggaggccgagctgaccgggaagatgcccaaggagtaccccctgaacatcggggagaagccaccccaggtgagaagaagagtgggcacagccttcaagctggatgacaacctgctgcccagcgaggaggaccctgccctgcaggagctggagagcaacttcctgatccagcagaagctggtggaggccgccaagaagctggccaatgaaccagacctgtgcaagacagtgaagaagaagaggaagcaggactacacagatgccatgaagaagctgcaggagattgaaaatgccatcaatgagtaccgcatccgctgtgggaagaagcccagccagaaggccaccgtgctgcctgaggacatcatccccagcgagagcagcagcctgagtgacaccaccacctatgatgaccccagtgatgccttcaccttccctggccagaggagcagctctgtgccccacagcccccgcatcctgccccccaagagcctgggcatcgagcgcatccacttcaggaagagcagcatcaatgagcagtttgtggacacccggcagagccgggagatgctgagcacccacagcagcccctacaagaccctggagcggcggccccagggcggccgctccatgcccaccacccctgtgctgaccagaaatgcctacagcagcagccacctggagcctgagagcagcagccagcactgccggcagaggagcggcagcctggagagccagagccacctgctgtctgagatggacagcgacaagcccttcttcagcctgagcaagagccagaggagcagcagcacagagatcctggatgatggcagcagctacaccagccagagcagcacagagtactactgtgtgacccctgtgacaggcccctactacaccacccagaccctggacaccaggacccggggcagaagaagaagcaagaagcagaatgtgtccaccagcaacagcggctccatgcccaacctggcccagaaggacagcctgagaaatggagtgtacagcaagagccaggagccccccagcagcagctactacatcgccggctacaccccctatgcagaatgtgacttctactacagcggcggctacgtgtatgaaaatgacacagagggccagtacagcgtgaaccccagctaccgcagcagcgcccactacggctatgagcggcagagggactacagccgctccttccatgaagatgaggtggacagagtgccccacaacccctatgccaccctgcggctgcccaggaaggccgccgccaagtctgagcacatcaccaagaacatccacaaggccctggtggccgagcacctgcggggctggtaccagagggccagcggccagaaggaccagggccacagcccccagaccagctttgacagcgaccggggcagccagcgctgcctgggctttgctggcctgcaggtgccctgcagccccagcagccgggccagcagctacagctctgtgagcagcaccaatgccagcggcaactggaggacccagctgaccatcggcctgagtgactatgagaccccagcccacagcagctacaccagctgctatggaaatgtgtacaaccccctgcccagccccagccggcagtacacagagatcagccagctggatggaacagatggcaaccagctggaggacaacctggagagcagcgagcagaggctcttctggcatgaggacagcaagccaggcaccctggtgtag

SEQ ID NO: 184567 - DNA, 3105 bp, Artificial Sequence
  derived and/or modified sequence
atggccagcgtgttcatgtgcggcgtggaggacctgctgttcagcggcagtcgctttgtttggaatctgaccgttagcacactgcgtagatggtacactgagcgtttacgggcttgccaccaggttctgcggacctggtgtggcctgcaggacgtgtatcagatgaccgagggacggcattgccaggtccacctgctggacgataggcggctggaactcctggtccagcccaaactcctcgcccgcgagttgctcgatcttgttgcctcccattttaacttaaaggaaaaagagtacttcggaattacattcatcgacgatacaggccaacagaactggctccagttagaccacagggtcctggatcatgatctgccgaaaaagcctggaccaaccatcctgcacttcgcagtccggttctatatcgaaagcataagttttctcaaagacaaaacaaccgtggagctgttctttctgaatgctaaggcctgtgtgcataaaggtcagattgaagtagagtctgagaccattttcaaacttgcagcttttatcctacaggaggccaagggggactatacctcagatgaaaatgcacggaaagacctcaaaaccctgcctgcattccctaccaagaccctgcaggaacatcctagtcttgcatactgtgaggaccgagtgatcgagcattatctcaagatcaaaggactgacgcgaggacaggccgttgtccagtacatgaagatcgtggaggcactgccaacgtatggagttcactattacgcagttaaagataaacagggtttgccgtggtggctcggaatcagctacaagggcatcggtcagtacgatatccaggacaaagttaagccgcgcaagctctttcaatggaagcagctcgagaatctgtactttcgcgagaagaaattcgcagttgaggtgcatgacccgcggagaattagcgtgtcacgcagaacttttggacagtccgggttgttcgttcaaacttggtatgcaaattcttcgcttatcaagagtatctgggtaatggccatatctcagcaccagttttacctcgatagaaaacagtccaaggctaagatacctagcgcccgttcactggatgaaatcgcgatggacctaacggagacgggcacccaacgcgcctcaaagctggtcaccctcgagactaaatcacagtttatcatggcctctaacggctcattgattagctctgggtcccaagattccgaagtgagtgaggagcaaaaaagggagaagatactagagctgaagaagaaggagaaactcctgcaggaaaaactattaaaaaaggttgaagagctgaagaagatctgcctgcgtgaggcagagctcacaggcaagatgcctaaagaatatcctttaaatattggggagaaacccccgcaagtgcgtagaagagtgggaacagcgtttaaacttgatgacaaccttctaccatccgaggaggatcctgctctccaagaactggagtcgaattttctcatccagcagaaattagtggaagctgcaaagaaacttgctaacgaaccggacctgtgtaaaactgttaaaaagaaaagaaaacaagactatacagacgcaatgaagaaacttcaagagatagaaaacgcaataaacgagtacaggatcagatgcggcaaaaaaccgtcgcagaaggccaccgttttgcctgaagatataattcctagtgagagcagtagcctgtccgacaccaccacgtatgatgatccatcggatgcctttaccttccccgggcagcgctcgtcgagtgtgccccattcacccagaatactgccccccaagtccctgggtatcgaaaggatccattttcggaagagtagtattaatgagcaattcgtggacacccgccagtcgagggaaatgctgtctactcactcgtcgccctacaagaccctagaacggcgtccccagggaggccgttccatgcctactacccccgtgttgactcgaaacgcctatagctcaagtcacttagagccggaaagcagtagtcagcattgtcggcagcgcagtggtagcctcgaatctcagtctcacctgttgtctgagatggattccgacaaacccttcttctctctctcaaaatctcaacgatcctcatcaacagagatcttagacgatggcagtagctacacaagtcaatccagtaccgagtattactgtgtgactcccgtgaccggaccctactacacaactcagacgcttgacactagaacccgcggtagacggagaagtaagaaacagaatgtctccacgtctaactctggctctatgcccaacctggcccagaaggattcgctgcgaaatggggtttacagtaagtcacaggaacctcccagcagttcatactatatcgctggttatacaccctacgctgaatgcgacttttactactccggaggatacgtatacgagaatgacaccgaaggccaatatagcgtgaatcctagctacagatcttccgcccactacggctacgagcggcagagggactactcgcgctcctttcatgaggacgaggtggatcgcgtcccgcacaacccgtatgccaccctgcggctgccgaggaaggccgctgctaagtcggaacacatcacaaaaaatattcacaaagctctggtggctgaacacctgagaggctggtatcaacgggcttctgggcagaaggaccagggccacagtccacagacttccttcgattctgacagaggtagccagcgctgtctgggattcgctggccttcaggtgccatgcagcccttctagtcgggcaagcagctattcttcagtgtcttctacgaacgccagtggaaactggcggactcagctcactatcggactatcggactacgagactcccgcccattctagctatacttcttgctacggtaatgtctataatccacttccttctccaagtcgccagtacacagagatctcccagctggacggcacagatggtaatcaattagaggacaatctcgagtcaagtgagcaaaggttgttttggcacgaggactccaagccagggacgctggtctag

SEQ ID NO: 184568 - DNA, 5060 bp, Artificial Sequence
  derived and/or modified sequence
cgggagcccaggcgggcaggccgctggggtcggggctgcacgtacgagagccgggacgcccgggttcagagcgaaggaggaggcatggcttcggtgttcatgtgtggcgtggaggacctgctgttcagcggcagccgcttcgtatggaacttgaccgtgtccacgctgcggagatggtacacggagaggctgcgggcttgccaccaggtgctgcggacgtggtgcgggctgcaggacgtgtaccagatgacagaaggcaggcactgccaggtgcacctcctggatgataggagactggagctgctggttcagcccaaacttctagcaagagagttgctggacctagtggcttcacatttcaacctgaaagaaaaggagtattttggaataacattcatagatgacacaggtcagcagaactggctgcagttagatcaccgagttcttgaccacgatttgcccaagaaaccaggcccaaccattttgcactttgctgtgaggttttacattgagagcatatcgtttttaaaggataaaaccaccgtggagctgtttttcctgaatgcaaaggcctgtgtgcacaaggggcaaatcgaagtagagagcgaaaccatcttcaagttagcagcgtttattttacaggaagccaagggagattataccagtgatgaaaatgccaggaaagatttaaagacattaccagcctttccaaccaaaactcttcaggagcatccatcccttgcctactgtgaggacagggtaattgagcattatttgaaaatcaaaggtctcactcgaggtcaagctgtggttcagtatatgaaaatagtagaagctctaccgacttacggtgtccattattatgcagtaaaggataagcaaggacttccttggtggcttggaataagctataagggaattggccaatatgatatacaagacaaggtgaagcctcggaagttattccaatggaaacagctggagaacttatatttccgtgagaaaaaatttgctgttgaagttcatgatccacgaaggatttcagtttcaagaagaacctttgggcaaagtggcttgtttgtgcaaacatggtatgctaactcttctctcatcaagtccatttgggtaatggcaattagtcagcatcagttttacttggaccggaagcaaagcaaagcaaaaattccttcagccaggagtttagatgagattgcaatggatttgacagagacaggaacacaaagggcctccaagctggtgacactggagacgaaaagtcagttcatcatggcaagtaatggcagtttaatctcctcaggttctcaagactcagaagttagtgaagagcaaaagagagaaaaaatccttgaactaaagaagaaggagaaactattacaagaaaaacttctgaaaaaagttgaggagcttaagaagatctgtctgcgggaggctgagctcacaggcaaaatgccaaaggagtatcccctgaacataggcgagaagcctcctcaggtcagaagacgtgtgggtactgcgttcaaattagatgacaacttgctgccgagtgaagaagatcctgctttgcaagaactggagagtaattttctaatacaacaaaagctggtggaagctgcaaagaaacttgccaatgagccagacctttgtaaaactgtgaagaaaaagcgaaagcaagattacacagatgcgatgaaaaagcttcaggagattgaaaatgcaataaacgaataccgaattaggtgtggaaagaaacccagccagaaagcaacagtgttaccagaagacataatcccctcagagagtagctctttgtctgacaccaccacctatgatgatcccagtgatgccttcacttttcctgggcagcgatcaagttcagtacctcattctccaagaattcttccccccaagtctcttggtattgagcgaatccatttcagaaagtcgtccatcaatgaacagtttgtggataccaggcagtccagagaaatgctgtccacacacagcagcccttacaaaactctggagaggcggccccagggaggacgaagcatgcccaccacgccagttcttacccgaaacgcctacagcagcagccacttggaacccgaatcttcatctcagcactgccgccagcggagtggaagcctggagtcccagtcccacctgctctccgagatggacagcgataagccatttttctccctctccaaatcccaaagaagcagcagcacagaaatcctcgatgacgggtcttcttatacaagccaatcaagcacagagtattactgtgtgacaccagttaccggcccctattacaccacccagaccctggacactcgcaccaggggtcggaggaggtcaaagaaacagaatgtttctacttcaaattcaggaagcatgcccaacctagcacaaaaggatagtttgaggaatggtgtttactcaaagagtcaggagccaccgtcttccagttactacattgccgggtacacaccctatgcagagtgtgacttttattacagtggtggttatgtctatgagaatgacaccgagggacagtatagtgtcaacccttcctaccggtcctcagcccactatggatatgagcgccagagggactacagcagatcctttcacgaagatgaggtcgaccgggtaccccataacccatatgcaactctccggctgccaaggaaggctgctgcaaaatcggagcacatcaccaaaaacatccacaaggccttagttgccgagcacttgcgtggctggtaccagcgggcctctgggcagaaggatcagggacacagcccgcagaccagctttgactcagacaggggatcacagagatgcctggggtttgcggggctgcaagtaccttgttctccaagcagtcgtgcatcctcgtactcttcagtgtcttctacaaatgcttctgggaactggaggacccagttaaccatagggctgtcggattacgagactccagcacattcttcttacaccagctgctatggcaatgtctataatcctttaccctctccaagcagacaatacacagaaatcagtcaactggatggtacagatggaaaccagctggaagacaacctggagagtagtgagcagagactcttttggcatgaagattcaaagcctggaacattagtctgaactgcagttggacctcctgaccaagcactgcgttctcacactagtgtgccttgcaaattgtatttgtcttccgagaggatgttcgttttagaaacctaaagacatcaaaggttgaagagaagacttagttgccctggaagtgaatcagtgaatcacacaccaagccccacaaagcccctaaaggaggatttggcctttcaaactctaggcactaacgtaactgtagggtctgcccacatgttgaagtattgccaagagaggactcagtgtgaagccttcatcaatagcaagcactttttaagggagtaaaagttgttaaaggcaaacctcaaaaacatgaaagggcattcaggatgtcccatggcaataagaacaggggaaatctcagagcacaattcagcaggatgagagaaggggaaccagaagctccggagtcattgctcacttcagagtttgaattcgtgagctgacaaagagtaacatgctctttctacacagacatggacaatttagacagtattggaaaattacttgaagctggattttcatgaagttctgaatgagtgtaaatgttttttaggatactataaagagtgatgtttttcataagcaccataaaatgggttctggaaaaactgattaccttagcatcctgtaatataacttatggtagcagattggggaaaatgaagcagcccactgaataattgacaaagtctgcttggagaacattctaaggtacaatatcatggagctcctttttcctttctccactaattgcgtgatgagctattgttctggctgttaattctccaactcggctgtcatttgaagtggcagacttaatatggaaagtttttataattatgagtttgaaaaagcattttaagatgatacagaaagtatccaaaacaacagaaaaaaaaagccacgtcattttagatgaattgcgtgccttaaaatggtgaacgttagaaaattaaacaagtctggattccacaagtagttccaagtcaccaagtgacaaaaacaaggttaacattaaaaaagaaaaacaacaacaacgacaaaaagctccaagctgcagtggatttaattatgaggctaaaactacctcatactttccttggaagaactaattagctatggtttattgtagggttttgtttgtttgttttttaaagcaaatgatttccatattccagattgatcttttttgtcatctttgcttcaaaattacataaaaggtgctcctttcccccttcttttatacaagtttcttgttcatattgtgaatagaaaagtttctgaacaacttttttggaacattttctatctatattccaaagcatgtaatatatacataaaaacgatttgttaaactggtccttagtcatttgtataattagaaatgaagtttgggaaaaaattttggaaaaaagacaagcaaaaaaaaataacttattccttttttgcatatttgtatagccttctagaatcagaaataacctttttgcatattcttttattgttctgacttttcaagacctattatttttttacataggtcaataaacaaaaggtgtgctactgaaaatgtttacgttttcttccatttatgtcaggggttcatgtgaagcaggtcgcagtgctctacttcaagtaatcatattgggcaaggcttcggatttttatttatagtattaccgtattttattaattccgggatgtacatttttaaatatttacattaaaaacatggttcatctttttattgatggcatattctacttgaattggcagttttttcttaatagtacattaaaaataatgctgtgtcttacaataaagttgccttagaattgatgaaa

SEQ ID NO: 184569 - DNA, 3105 bp, Artificial Sequence
  derived and/or modified sequence
atggcaagcgtttttatgtgcggggtggaggatctgctgttcagcgggagccgcttcgtgtggaacctgaccgtgagcacacttagacggtggtataccgagcggctcagagcatgtcaccaggtgctgagaacttggtgtggccttcaagatgtctatcaaatgactgaagggagacattgtcaggtgcacctgttggacgaccgtaggctcgaactgctcgtgcagcccaagctgttagctagggagctgctagatcttgtcgcgagtcactttaatctgaaggagaaggaatatttcggcatcactttcattgacgatacgggccagcagaattggttgcagctggaccaccgagtattggatcacgacctgccaaagaagcctggacccacgattttgcacttcgccgttcggttctatatcgaatccatcagtttcctgaaagacaaaactactgtggaactgttcttcctcaatgccaaggcatgcgtgcataagggccagatagaagtggaaagtgagactatcttcaagctcgccgctttcatactgcaagaggcgaaaggtgattacaccagcgatgaaaatgctcgtaaggacctgaagactctgcccgctttccctactaaaactcttcaggagcacccatctttagcttactgcgaagatcgagtgattgaacactatctcaagatcaaaggcctaacgcgcggtcaggccgttgtccagtatatgaagatcgtggaagcactgccaacttacggagtgcactactacgccgttaaagataaacagggtctaccctggtggctgggaatctcgtacaagggaatagggcagtacgacatccaagataaggtgaagcctaggaaactgtttcagtggaagcagttagagaatctctatttccgggagaaaaagtttgcagtggaggtgcacgatccacggaggatttccgtgtcacgaagaacttttgggcagagcggtctgtttgtccagacttggtatgctaatagcagcctgataaagagcatttgggtgatggccattagccagcatcaattctacctcgaccgaaagcagtctaaagctaagatccctagcgctcgatccctagacgaaatcgcaatggatctcacggaaacaggtactcagcgggcttcaaagctcgtgaccttagagacaaaatctcaatttatcatggcgtccaacggttcgctgatcagttccggctcccaggacagcgaagtgagcgaggagcagaagagggagaagattctcgaactgaagaagaaagaaaaattgctgcaggagaagctcctcaagaaagtggaagagcttaaaaagatctgtctgagggaggccgaactgactggtaagatgcctaaggaatatcctctgaatattggcgagaagcctcctcaggtgaggcgaagagtagggacagcctttaagctggacgacaatctgcttcccagcgaagaggatcccgctttgcaggaactcgaatccaactttctaatccagcagaagcttgtggaggctgcaaaaaagctggctaatgagccagatctctgtaaaactgtgaagaaaaagaggaaacaagattacaccgatgctatgaagaagctgcaggaaatagagaatgctataaacgaatatagaattcggtgcggaaaaaaaccctcacagaaggctacagtccttcctgaagacattatcccatctgagtctagttctttgagtgacacaacaacctatgacgatccttctgacgctttcacatttccagggcagagatcgtcttccgtgccccactccccgaggattctgcctcccaagagcctgggaatcgaacgcatccattttagaaaaagtagcataaatgagcagtttgttgatacacgacagtctcgtgaaatgctgagtactcatagctcaccctacaagacactggaaaggaggccacaaggcggtcgcagtatgccaacaaccccagtgctgacccgtaacgcctactctagcagtcatctggagccagaaagcagttctcagcattgtcgccagcgtagcggctctctcgagtcacagagccatttgctttctgaaatggacagcgataaaccgttcttcagcttgagcaaatcccagagaagctcttccaccgagatcctcgacgatgggtcctcttacacgtcccagtccagcaccgaatactattgtgtgactccagtcacaggcccttactacaccacacagactctggacacacgaacgcggggtagacgcagatccaagaagcagaacgtcagtacaagtaacagcggctctatgcccaatctggcacagaaagactccctgcgaaacggagtgtacagtaagtctcaagaacccccatcaagctcatattatatagccggttacactccgtacgcagaatgcgacttctattattccgggggatacgtgtacgaaaatgacactgaggggcagtacagcgtgaatccctcttacaggagcagcgcccactatggttatgaaagacagcgcgactattcccgctcttttcatgaagacgaagtggacagggtgccccacaacccctatgccacactccgcttgcccagaaaagccgcagccaagtctgagcacatcaccaaaaatatccataaagcactggtggcagaacatttgcggggatggtaccagcgtgcctcagggcagaaggatcagggccatagtccacagacctctttcgactctgaccgtggctcccagaggtgtctgggtttcgccggactgcaggtgccgtgctcccccagctcacgggcttcaagctactctagcgtttcatcgaccaacgcaagtgggaactggcggactcagctgacgattggactgtccgattatgagaccccagctcatagctcctatacatcctgctacggaaacgtgtacaacccactccctagtccaagcaggcaatacactgaaataagccagctcgacggcaccgacgggaaccagctggaagacaacctcgaaagttctgagcagagactgttctggcacgaggattccaaaccgggtactttggtctag

SEQ ID NO: 184570 - DNA, 5261 bp, Artificial Sequence
  derived and/or modified sequence
cgagggccagcttggtggagcttagcacagcttgctcggcgctgcgagcgggcgggggtggacactgggcttctgtgtgccagtcgcagccgttggctggcgggcacccaatcccagggcatgccgccggagcctggccaggacgcacggtgaaagacgagtttggtggcaggcttgaccccccggctgccagcagaagccggcgtcgggagcccaggcgggcaggccgctggggtcggggctgcacgtacgagagccgggacgcccgggttcagagcgaaggaggaggcatggcttcggtgttcatgtgtggcgtggaggacctgctgttcagcggcagccgcttcgtatggaacttgaccgtgtccacgctgcggagatggtacacggagaggctgcgggcttgccaccaggtgctgcggacgtggtgcgggctgcaggacgtgtaccagatgacagaaggcaggcactgccaggtgcacctcctggatgataggagactggagctgctggttcagcccaaacttctagcaagagagttgctggacctagtggcttcacatttcaacctgaaagaaaaggagtattttggaataacattcatagatgacacaggtcagcagaactggctgcagttagatcaccgagttcttgaccacgatttgcccaagaaaccaggcccaaccattttgcactttgctgtgaggttttacattgagagcatatcgtttttaaaggataaaaccaccgtggagctgtttttcctgaatgcaaaggcctgtgtgcacaaggggcaaatcgaagtagagagcgaaaccatcttcaagttagcagcgtttattttacagtctcccaaagtctcgcttacccatgatgaaaatgccaggaaagatttaaagacattaccagcctttccaaccaaaactcttcaggagcatccatcccttgcctactgtgaggacagggtaattgagcattatttgaaaatcaaaggtctcactcgaggtcaagctgtggttcagtatatgaaaatagtagaagctctaccgacttacggtgtccattattatgcagtaaaggataagcaaggacttccttggtggcttggaataagctataagggaattggccaatatgatatacaagacaaggtgaagcctcggaagttattccaatggaaacagctggagaacttatatttccgtgagaaaaaatttgctgttgaagttcatgatccacgaaggatttcagtttcaagaagaacctttgggcaaagtggcttgtttgtgcaaacatggtatgctaactcttctctcatcaagtccatttgggtaatggcaattagtcagcatcagttttacttggaccggaagcaaagcaaagcaaaaattccttcagccaggagtttagatgagattgcaatggatttgacagagacaggaacacaaagggcctccaagctggtgacactggagacgaaaagtcagttcatcatggcaagtaatggcagtttaatctcctcaggttctcaagactcagaagttagtgaagagcaaaagagagaaaaaatccttgaactaaagaagaaggagaaactattacaagaaaaacttctgaaaaaagttgaggagcttaagaagatctgtctgcgggaggctgagctcacaggcaaaatgccaaaggagtatcccctgaacataggcgagaagcctcctcaggtcagaagacgtgtgggtactgcgttcaaattagatgacaacttgctgccgagtgaagaagatcctgctttgcaagaactggagagtaattttctaatacaacaaaagctggtggaagctgcaaagaaacttgccaatgagccagacctttgtaaaactgtgaagaaaaagcgaaagcaagattacacagatgcgatgaaaaagcttcaggagattgaaaatgcaataaacgaataccgaattaggtgtggaaagaaacccagccagaaagcaacagtgttaccagaagacataatcccctcagagagtagctctttgtctgacaccaccacctatgatgatcccagtgatgccttcacttttcctgggcagcgatcaagttcagtacctcattctccaagaattcttccccccaagtctcttggtattgagcgaatccatttcagaaagtcgtccatcaatgaacagtttgtggataccaggcagtccagagaaatgctgtccacacacagcagcccttacaaaactctggagaggcggccccagggaggacgaagcatgcccaccacgccagttcttacccgaaacgcctacagcagcagccacttggaacccgaatcttcatctcagcactgccgccagcggagtggaagcctggagtcccagtcccacctgctctccgagatggacagcgataagccatttttctccctctccaaatcccaaagaagcagcagcacagaaatcctcgatgacgggtcttcttatacaagccaatcaagcacagagtattactgtgtgacaccagttaccggcccctattacaccacccagaccctggacactcgcaccaggggtcggaggaggtcaaagaaacagaatgtttctacttcaaattcaggaagcatgcccaacctagcacaaaaggatagtttgaggaatggtgtttactcaaagagtcaggagccaccgtcttccagttactacattgccgggtacacaccctatgcagagtgtgacttttattacagtggtggttatgtctatgagaatgacaccgagggacagtatagtgtcaacccttcctaccggtcctcagcccactatggatatgagcgccagagggactacagcagatcctttcacgaagatgaggtcgaccgggtaccccataacccatatgcaactctccggctgccaaggaaggctgctgcaaaatcggagcacatcaccaaaaacatccacaaggccttagttgccgagcacttgcgtggctggtaccagcgggcctctgggcagaaggatcagggacacagcccgcagaccagctttgactcagacaggggatcacagagatgcctggggtttgcggggctgcaagtaccttgttctccaagcagtcgtgcatcctcgtactcttcagtgtcttctacaaatgcttctgggaactggaggacccagttaaccatagggctgtcggattacgagactccagcacattcttcttacaccagctgctatggcaatgtctataatcctttaccctctccaagcagacaatacacagaaatcagtcaactggatggtacagatggaaaccagctggaagacaacctggagagtagtgagcagagactcttttggcatgaagattcaaagcctggaacattagtctgaactgcagttggacctcctgaccaagcactgcgttctcacactagtgtgccttgcaaattgtatttgtcttccgagaggatgttcgttttagaaacctaaagacatcaaaggttgaagagaagacttagttgccctggaagtgaatcagtgaatcacacaccaagccccacaaagcccctaaaggaggatttggcctttcaaactctaggcactaacgtaactgtagggtctgcccacatgttgaagtattgccaagagaggactcagtgtgaagccttcatcaatagcaagcactttttaagggagtaaaagttgttaaaggcaaacctcaaaaacatgaaagggcattcaggatgtcccatggcaataagaacaggggaaatctcagagcacaattcagcaggatgagagaaggggaaccagaagctccggagtcattgctcacttcagagtttgaattcgtgagctgacaaagagtaacatgctctttctacacagacatggacaatttagacagtattggaaaattacttgaagctggattttcatgaagttctgaatgagtgtaaatgttttttaggatactataaagagtgatgtttttcataagcaccataaaatgggttctggaaaaactgattaccttagcatcctgtaatataacttatggtagcagattggggaaaatgaagcagcccactgaataattgacaaagtctgcttggagaacattctaaggtacaatatcatggagctcctttttcctttctccactaattgcgtgatgagctattgttctggctgttaattctccaactcggctgtcatttgaagtggcagacttaatatggaaagtttttataattatgagtttgaaaaagcattttaagatgatacagaaagtatccaaaacaacagaaaaaaaaagccacgtcattttagatgaattgcgtgccttaaaatggtgaacgttagaaaattaaacaagtctggattccacaagtagttccaagtcaccaagtgacaaaaacaaggttaacattaaaaaagaaaaacaacaacaacgacaaaaagctccaagctgcagtggatttaattatgaggctaaaactacctcatactttccttggaagaactaattagctatggtttattgtagggttttgtttgtttgttttttaaagcaaatgatttccatattccagattgatcttttttgtcatctttgcttcaaaattacataaaaggtgctcctttcccccttcttttatacaagtttcttgttcatattgtgaatagaaaagtttctgaacaacttttttggaacattttctatctatattccaaagcatgtaatatatacataaaaacgatttgttaaactggtccttagtcatttgtataattagaaatgaagtttgggaaaaaattttggaaaaaagacaagcaaaaaaaaataacttattccttttttgcatatttgtatagccttctagaatcagaaataacctttttgcatattcttttattgttctgacttttcaagacctattatttttttacataggtcaataaacaaaaggtgtgctactgaaaatgtttacgttttcttccatttatgtcaggggttcatgtgaagcaggtcgcagtgctctacttcaagtaatcatattgggcaaggcttcggatttttatttatagtattaccgtattttattaattccgggatgtacatttttaaatatttacattaaaaacatggttcatctttttattgatggcatattctacttgaattggcagttttttcttaatagtacattaaaaataatgctgtgtcttacaataaagttgccttagaattga

SEQ ID NO: 184571 - DNA, 1737 bp, Artificial Sequence
  derived and/or modified sequence
atgctccgccgcctggacaaaatcaggtttaggggccacaagagagatgactttcttgatctggcggagagcccaaacgcctcggacaccgagtgctccgatgaaataccgcttaaagttccgcggacgtcacctcgcgacagcgaagaactaagggacccagccggaccgggcacattaataatggcaactggcgtccaggactttaatagaactgagttcgatcgtctgaacgagatcaaaggtcacttggaaatcgcgttactggaaaagcactttttacaggaggagctgcgaaaacttagagaagagacaaacgccgaaatgttacgccaggagctggacagagagcggcagcggagaatggagcttgagcagaaagtgcaggaggtgctgaaagcaagaacagaagaacaaatggcacagcagccacccaagggtcaggcccaggcttctaacggtgccgaacggcgatcccagggcttgtcttctcgccttcagaagtggttctacgaaaggttcggcgagtacgtggaggatttcagatttcagcccgaagagaacaccgtcgaaacagaagaaccactttcagcacggaggctgaccgagaatatgcgtaggctgaagcgaggtgcaaagccagtaacaaacttcgtgaagaacctgagcgcattgtccgattggtactccgtttatactagtgccattgcattcacagtctacatgaacgcagtttggcacggatgggccattccactgttcctgttcctggctatccttcggcttagcctcaattacctgatcgcgagaggttggcgcattcagtggagcatcgtccccgaggtgtctgagcctgttgagccacccaaggaggacctgacagtaagtgagaaattccaactggtgttggatgtcgcgcagaaagcccagaacctgtttgggaaaatggctgatatcctagagaaaatcaaaaacctttttatgtgggtgcagcccgagattacccagaaactgtatgtggccctgtgggccgccttccttgccagctgcttcttcccctataggttagttggccttgcagttgggttatatgccggcattaagttcttcctcatcgacttcatctttaaaaggtgcccacgcctccgcgcaaagtatgatactccatacatcatctggcgatcactccctactgacccccaactcaaagagagatcctccgcggccgtgtcccgccggctccagacaaccagctctcgatcctatgtacccagcgcccctgctggattgggaaaggaagaagacgccggtaggttccattccaccaaaaaagggaacttccacgagatctttaacctcacagagaacgagcgcccccttgccgtttgcgagaatggatggcgctgttgcctcatcaatagggaccggaagatgcctacggattacattcgcaatggtgttctgtacgtcaccgagaattacttgtgtttcgagagcagtaagtccggatccagcaagcggaacaaagtgataaaactggtggatatcacggacatccagaagtacaaggtcttatctgtcctgccaggctcaggtatgggaattgcagtatcgacccccagtactcagaaaccactggtcttcggggccatggttcacagagacgaagcgtttgagacaattctgagccagtacataaagattacctccgcggcggcatccggaggagacagctag

SEQ ID NO: 184572 - DNA, 1737 bp, Artificial Sequence
  derived and/or modified sequence
atgttgcgcagactggacaaaatccgcttcaggggccacaagcgagacgactttttggatcttgcggaaagcccaaatgcctctgacaccgagtgctctgatgaaatccctctaaaagttcctcgaacttctcctcgggattctgaagagcttcgcgacccagctggtcctggaacccttatcatggccacaggagtgcaagacttcaacagaacagagttcgatcgcctgaatgagatcaagggccatctcgagatcgctctgctcgaaaagcattttctccaagaagagctgcgcaagctccgagaggaaaccaacgcagaaatgctgaggcaggagctggaccgagaaagacagagacgtatggaactggagcagaaagttcaggaggtcctaaaagctcgaactgaagagcagatggcacagcaaccaccgaaagggcaagcccaggcatccaacggagcagaaagacggtctcagggcctctcctcacggctgcaaaaatggttttacgaacgcttcggcgagtatgtagaggactttcgattccaacctgaggagaacaccgttgaaacagaggaaccgctgtcagctcggcggctgacggagaatatgcgcagactgaagagaggggctaagccagtgactaactttgttaaaaacttgtccgcgttatctgattggtatagcgtctatacaagtgccatcgcctttaccgtgtacatgaatgctgtatggcatggatgggcaataccactgttcctgtttctagccattcttcgactctcactgaattatctcattgcgcgaggatggcgtatccagtggagtatcgtacccgaggtgagtgaaccagtggaaccacctaaggaggacttaacggtatccgagaagttccagctggtgctggatgttgcgcaaaaggcacagaacctatttggaaaaatggccgacattttagaaaagataaaaaatctatttatgtgggtgcagccggagatcacgcaaaaactgtatgtggccctgtgggccgccttcttggccagctgctttttcccttatcgtctcgtcggcctagccgtcgggctctacgcaggcattaaattcttcctaatagattttattttcaagaggtgcccgcgcctgagagccaagtacgatacaccctacattatatggcggtctcttcctaccgatcctcagctaaaggaacggagcagcgcggctgtgtcccggagactgcagacaaccagctcccgctcatacgtgcccagcgctcctgcagggttagggaaagaggaggatgccggaagatttcacagtacgaagaaaggaaattttcatgagattttcaatctgacagagaacgagaggccattggctgtgtgcgagaacggctggagatgttgcctgataaaccgagatcgcaaaatgcctacagattacatcagaaacggggtgctatatgtgacagaaaactacctctgtttcgaaagtagcaaatcgggtagttccaaacgaaataaagtgattaagctcgtcgatattaccgacatccaaaaatacaaggtgctcagcgtgctgcccggcagtggaatgggcatcgcagtatccactccaagcacacaaaagcctctcgtgttcggcgccatggtgcatcgcgatgaggcatttgaaaccattttatcccaatacataaagatcacatccgcagccgccagtggcggtgactcttag

SEQ ID NO: 184573 - DNA, 1737 bp, Artificial Sequence
  derived and/or modified sequence
atgctgcggcggctggacaagatccgcttccggggccacaagagagatgacttcctggacctggccgagagccccaatgccagtgacacagaatgttctgatgagatccccctgaaggtgcccaggaccagcccccgggacagcgaggagctgcgggaccctgctggccctggcaccctcatcatggccaccggggtgcaggacttcaacagaacagaatttgaccggctgaatgagatcaagggccacctggagatcgccctgctggagaagcacttcctgcaggaggagctgaggaagctgcgggaggagaccaatgctgagatgctgcggcaggagctggaccgggagcggcagaggaggatggagctggagcagaaggtgcaggaggtgctgaaggccaggacagaggagcagatggcccagcagccccccaagggccaggcccaggccagcaatggagctgagaggaggagccagggcctgagcagccggctgcagaagtggttctatgaaagatttggagaatatgtggaggacttccgcttccagccagaagaaaatacagtggagacagaggagcccctgagcgcccggcggctgacagagaacatgaggcggctgaagagaggagccaagcctgtgaccaactttgtgaagaacctgagcgccctgagtgactggtacagcgtgtacaccagcgccatcgccttcaccgtgtacatgaatgctgtgtggcacggctgggccatccccctcttcctgttcctggccatcctgcggctgagcctgaactacctgattgcccggggctggaggatccagtggagcatcgtgcctgaggtgtctgagcctgtggagccccccaaggaggacctgactgtgtctgagaagttccagctggtgctggatgtggcccagaaggcccagaacctgtttgggaagatggctgacatcctggagaagatcaagaacctcttcatgtgggtgcagcctgagatcacccagaagctgtatgtggccctgtgggccgccttcctggccagctgcttcttcccctaccgcctggtgggcctggccgtgggcctgtatgccggcatcaagttcttcctgattgacttcatcttcaagcgctgcccccggctgcgggccaagtatgacaccccctacatcatctggaggagcctgcccacagacccccagctgaaggagaggagcagcgctgctgtgtcccggcggctgcagaccaccagcagccgctcctatgtgcccagcgccccagctggcctgggcaaggaggaggatgctggccgcttccacagcaccaagaagggcaacttccacgagatcttcaacctgacagaaaatgaaagacccctggccgtgtgtgaaaatggctggcgctgctgcctgatcaacagagacaggaagatgcccacagactacatcagaaatggagtgctgtatgtgacagagaactacctgtgctttgagagcagcaagagcggcagcagcaagaggaacaaggtgatcaagctggtggacatcacagacatccagaagtacaaggtgctgtctgtgctgcccggcagcggcatgggcattgctgtgtccacccccagcacccagaagcccctggtgtttggagccatggtgcacagagatgaggcctttgagaccatcctgagccagtacatcaagatcaccagcgctgctgccagcggcggggacagctag

SEQ ID NO: 184574 - DNA, 1737 bp, Artificial Sequence
  derived and/or modified sequence
atgctgcggcggctggacaagatccggttccggggccacaagcgggacgactttctggaccttgcagagagccctaatgcctccgatacagagtgctcagacgagatccctcttaaggtgccaagaacctctccgcgggacagtgaggagctgcgcgatccagcgggcccaggcacattgattatggcaacaggcgtgcaggattttaaccgaaccgagttcgatagactgaatgagattaaaggtcacctggaaatagccctcctggaaaagcatttcctccaggaggagcttaggaagctgcgcgaggaaacaaacgccgagatgctgcgccaggaattagacagggagcgccagaggaggatggagctggagcagaaagtacaggaagtgttaaaagctaggaccgaggaacagatggcccagcagccacctaaaggacaggcccaagcgtccaatggagcggagcggagatctcaggggctctccagccgccttcagaagtggttttatgagaggttcggagaatatgttgaagattttaggtttcagccagaggagaataccgttgagacggaagaacccctttctgcacgccggttgacagagaatatgagacggctgaagaggggcgctaaacccgtgaccaacttcgtgaaaaacctgtctgctctctccgactggtatagcgtgtatacaagtgcgattgccttcactgtttatatgaacgcagtctggcacggttgggctattccattattcctatttttagcaatcctccggctatctttaaattacctcatagccaggggctggcgaatccagtggagcatagtgccagaagtgtcagaacctgtggaacccccaaaagaagatctcacagtatctgaaaagttccagctagtgttagatgtcgcgcagaaagcccagaatctctttggaaagatggccgatatcctcgaaaagattaagaacctgttcatgtgggtccagcccgaaatcacccagaaattatacgtggctctatgggccgccttcctggcgtcctgcttcttcccctacagactagtcggcctcgcagttggcctctacgctgggataaaatttttcctgatagatttcatcttcaagaggtgccccagacttcgagccaagtacgacaccccatatattatctggcggagcctccccactgatccgcagctcaaggagaggtccagcgcagccgtctctcggcggctccagactacttcttcaaggtcctacgtgccttctgctcccgctggactgggtaaagaagaggacgcgggtcgctttcatagcaccaagaaagggaattttcatgagatttttaatctgaccgagaatgaacggcctctggctgtgtgtgaaaatggctggcggtgttgcctgatcaatcgagaccgcaagatgccaactgactatatacgcaatggagtcctatacgtgactgaaaattatctttgttttgagagtagcaaaagtggctctagcaagcgcaacaaagtcatcaagttggttgacattaccgatattcaaaagtataaagttttgagcgtactgcccggcagcggcatggggatcgccgtatctactccgtcaacccagaaacccctggtattcggagcgatggtacaccgggatgaagcattcgagaccatcctgagccagtacatcaaaattacctcggcggccgcctctggaggtgacagctag

SEQ ID NO: 184575 - DNA, 1737 bp, Artificial Sequence
  derived and/or modified sequence
atgctgcggcggctggacaagatccggttccggggccacaagcgggacgatttcttagacttagcagaaagcccgaatgcctcggataccgaatgctccgacgagattccactgaaagttcctcgaaccagccctcgcgattctgaggagctgcgcgacccagcaggccccgggaccctcatcatggcaacgggcgtgcaggactttaaccgtacggaattcgataggctaaacgaaataaaggggcacttggaaatcgccctcctggagaagcattttctccaggaagaactgcgcaagctacgggaggagactaatgccgagatgttgagacaggagctggacagggaacgtcagcggcgaatggagctggaacagaaggtgcaggaagtcctgaaggcacggaccgaagaacagatggcacagcaacctcctaaggggcaggctcaagcctctaacggggcagagcgcaggtctcaaggtctttcgagcagactacaaaagtggttttacgagcggtttggtgagtacgtggaggacttccgcttccagcctgaggaaaacacagtggaaactgaggaacctcttagcgctaggcggctaactgagaatatgaggagacttaagagaggcgccaaacccgtgaccaatttcgtcaaaaacctgtccgccctaagtgattggtatagcgtttacacatcagcaatcgctttcacagtgtacatgaacgccgtgtggcacggctgggcgattccactgttcctcttcctagcaatccttcgactttcactaaactatcttattgctagagggtggaggattcagtggagcatcgtgcctgaggtgtcagagcctgtggagccccctaaggaagaccttaccgtcagtgagaaatttcagctggtgctggacgtcgcccagaaggctcagaacttattcggcaagatggcagacattttagagaaaataaagaacttattcatgtgggtccagccagagatcacacagaagctctatgtggcactgtgggcagctttcctcgccagttgtttttttccataccggcttgtgggcctggctgtcggcctctacgccggcatcaagtttttcttaattgattttatctttaagaggtgccccaggctgcgggcaaaatacgatactccttacattatctggcgaagcctgcctacagatccccaattgaaggaacgctcctctgctgcagtatctaggcgactccagacaacttcttcccgctcctatgtgcccagtgcccccgcaggcttgggtaaagaggaagatgcgggcagattccatagtacgaaaaagggcaattttcatgagatctttaaccttaccgaaaatgaacgccccttggccgtgtgcgagaacggctggcgctgctgcctgataaaccgcgatagaaaaatgcccacggattatatacggaacggggttctctacgtgacagagaactatctgtgctttgaatcctctaaaagcggatcttccaaaagaaacaaggtaatcaaactcgtggatatcacagatatacagaagtacaaggtgctctccgtgttgccagggtctgggatgggaatcgcagtgtctacccctagcacacagaaaccgctggtttttggcgccatggttcaccgcgacgaggccttcgagacaatactcagccagtatattaagattaccagcgctgccgcctctgggggggacagctag

SEQ ID NO: 184576 - DNA, 1737 bp, Artificial Sequence
  derived and/or modified sequence
atgcttaggcgcttggacaaaatccgattccggggtcataaacgggatgacttcctggacttagcggagagccccaacgcctcagacacagaatgttcagatgaaatcccactcaaagtcccccgaaccagtccccgagactccgaagaactgagggacccagccggacctggcaccctgataatggccaccggcgtccaggacttcaatcgcaccgagtttgaccggctgaatgaaatcaagggccatctggagatcgcccttcttgagaaacacttccttcaggaagagctgcgaaaactgcgcgaggagacaaacgcagaaatgctgcggcaggaactggaccgagaacggcagagacggatggagctggagcagaaagtacaggaggtgctcaaagcaagaacagaagaacaaatggcgcagcagcctcccaagggacaggctcaagcatccaatggagcggagagacggtcacaaggtctctcgtctagacttcaaaaatggttctatgagcgctttggtgaatacgtggaagacttcagattccagccggaagagaatacggtggagaccgaagagcccttaagtgccaggagactcaccgagaatatgcgcaggctgaagaggggggcaaaaccagtgacaaattttgtgaagaacctttcagcgctctctgactggtattctgtatacacatccgccattgcctttaccgtttacatgaacgcggtatggcacggctgggcaatcccactcttcttattcctggccatcctccgcctcagcctgaattatttgatagcacgaggatggcgaatccagtggagcattgtgccagaggtctctgaacctgtcgaacctcccaaggaagatcttactgtgtccgaaaaatttcaactagtgttggatgttgcacagaaagcacagaatctcttcgggaaaatggccgatattttagaaaagatcaaaaacctcttcatgtgggtgcagcccgagattacacagaagttgtatgtcgcgctttgggcggctttcctggcttcttgcttctttccttacaggctggttggattggccgttggcctgtatgccggaatcaaattcttcctgattgatttcatcttcaagcgctgccccaggctgcgagccaagtatgacaccccatatatcatttggaggtcactccctacggacccgcagctgaaggagcgaagttctgctgccgtttcccgtcggctccagactacatcctcgagatcctacgtgcccagcgcacccgcaggcctcgggaaggaggaggatgcgggtaggtttcattctaccaaaaaaggtaatttccacgagatctttaatctcaccgaaaatgagagaccactggccgtctgtgagaatggatggcgctgttgtttgatcaacagggaccgcaaaatgcctacggactacattaggaatggagtgctctacgtaaccgagaactacctctgtttcgaatcgtccaagagtggctccagcaaaagaaacaaggtcattaagttggttgatatcacggacattcagaagtataaggtactctcggtgctgccaggcagtgggatgggcatcgcagtctcaactccaagcactcagaagccactagtctttggggctatggtgcacagggacgaggcctttgagacaatactgagccagtacattaagatcacgtctgctgccgcttccggcggagattcttag

SEQ ID NO: 184577 - DNA, 1737 bp, Artificial Sequence
  derived and/or modified sequence
atgcttagacgcttggataagatccgcttcagaggccacaagcgggatgacttcctggacctcgccgagagtcctaatgcttccgacaccgagtgctcagacgagatccccctcaaggtgcctcgcacatcacctcgtgacagcgaagaactgcgcgacccggcagggcctgggactctgatcatggcaacaggggtgcaggattttaaccgaaccgagtttgaccgtcttaatgagattaaaggccacctggagattgcacttctggagaagcacttcctgcaggaagagctcagaaagctccgggaagaaaccaatgcggaaatgctacggcaagaactcgatcgggagcggcagagaagaatggagctggagcagaaggtgcaggaagttctgaaagctcgaaccgaggaacaaatggcgcagcaaccgcctaaggggcaggcacaggcctctaatggcgctgagagaaggagccaaggtttgagcagtcgactgcagaaatggttctacgagcgtttcggagagtacgtagaggatttccgcttccaacccgaagagaataccgtggagacggaggagcccctatccgctcgtagactaactgaaaatatgagaagattgaaacgcggagctaaacctgttacgaatttcgtgaagaacctaagcgcactcagtgactggtattcagtatatacaagcgctatagcttttaccgtgtatatgaacgccgtatggcacggttgggccatacccctgttcctgtttttggcaatcctgagactgtctctgaattatttgatagccagaggctggaggatacagtggagcattgttccggaggtctccgaacctgtggagccacccaaggaggacctgaccgtgtccgaaaagtttcagttagtcctggacgttgcacaaaaggcccagaatttgttcgggaagatggctgacatcttggaaaagattaaaaatctgttcatgtgggtccaaccggaaataacccaaaagttatacgtagcactctgggccgcttttttagctagttgtttcttcccatatcgactcgttgggttggcggtcggtctctatgccggaattaaattctttttgatcgatttcatttttaaaaggtgccctcggttgcgggcaaagtacgacaccccctatattatctggagaagcttacccactgatcctcagctgaaggagcgtagctccgcggctgtatccagaaggcttcagactaccagctcccggtcctatgtgcccagcgctcccgctggcctgggcaaggaagaagacgccggaaggtttcactccacaaaaaaagggaactttcatgaaatatttaacctgactgaaaacgagcgcccacttgccgtgtgtgaaaatggctggcggtgctgccttatcaaccgagatcgaaagatgccaacggactacatcagaaatggggtgctttacgtgaccgagaattatctttgcttcgagagcagcaagagtggatcatcgaagcgcaacaaggtgattaaactggtagacattactgacatacagaagtacaaggtactgtctgtgctgcctgggtctggaatggggattgccgtgtccacgccatccacacaaaagcccctggtctttggcgctatggtacatcgcgatgaggcgtttgagactattttgtcccaatatatcaaaatcacaagcgcggctgcttctggcggagacagctag

SEQ ID NO: 184578 - DNA, 1737 bp, Artificial Sequence
  derived and/or modified sequence
atgctgagaagactggacaagatcagattcagaggccacaagagagacgacttcctggacctggccgagagccccaacgccagcgacaccgagtgcagcgacgagatccccctgaaggtgcccagaaccagccccagagacagcgaggagctgagagaccccgccggccccggcaccctgatcatggccaccggcgtgcaggacttcaacagaaccgagttcgacagactgaacgagatcaagggccacctggagatcgccctgctggagaagcacttcctgcaggaggagctgagaaagctgagagaggagaccaacgccgagatgctgagacaggagctggacagagagagacagagaagaatggagctggagcagaaggtgcaggaggtgctgaaggccagaaccgaggagcagatggcccagcagccccccaagggccaggcccaggccagcaacggcgccgagagaagaagccagggcctgagcagcagactgcagaagtggttctacgagagattcggcgagtacgtggaggacttcagattccagcccgaggagaacaccgtggagaccgaggagcccctgagcgccagaagactgaccgagaacatgagaagactgaagagaggcgccaagcccgtgaccaacttcgtgaagaacctgagcgccctgagcgactggtacagcgtgtacaccagcgccatcgccttcaccgtgtacatgaacgccgtgtggcacggctgggccatccccctgttcctgttcctggccatcctgagactgagcctgaactacctgatcgccagaggctggagaatccagtggagcatcgtgcccgaggtgagcgagcccgtggagccccccaaggaggacctgaccgtgagcgagaagttccagctggtgctggacgtggcccagaaggcccagaacctgttcggcaagatggccgacatcctggagaagatcaagaacctgttcatgtgggtgcagcccgagatcacccagaagctgtacgtggccctgtgggccgccttcctggccagctgcttcttcccctacagactggtgggcctggccgtgggcctgtacgccggcatcaagttcttcctgatcgacttcatcttcaagagatgccccagactgagagccaagtacgacaccccctacatcatctggagaagcctgcccaccgacccccagctgaaggagagaagcagcgccgccgtgagcagaagactgcagaccaccagcagcagaagctacgtgcccagcgcccccgccggcctgggcaaggaggaggacgccggcagattccacagcaccaagaagggcaacttccacgagatcttcaacctgaccgagaacgagagacccctggccgtgtgcgagaacggctggagatgctgcctgatcaacagagacagaaagatgcccaccgactacatcagaaacggcgtgctgtacgtgaccgagaactacctgtgcttcgagagcagcaagagcggcagcagcaagagaaacaaggtgatcaagctggtggacatcaccgacatccagaagtacaaggtgctgagcgtgctgcccggcagcggcatgggcatcgccgtgagcacccccagcacccagaagcccctggtgttcggcgccatggtgcacagagacgaggccttcgagaccatcctgagccagtacatcaagatcaccagcgccgccgccagcggcggcgacagctag

SEQ ID NO: 184579 - protein, 1608 aa, Artificial Sequence
  derived and/or modified sequence
MYSAHRPLMPASSAASRGLGMFVWTNVEPRSVAVFPWHSLVPFLAPSQPDPSVQPSEAQQPASHPVASNQSKEPAESAAVAHERPPGGTGSADPERPPGATCPESPGPGPPHPLGVVESGKGPPPTTEEEASGPPGEPRLDSETESDHDDAFLSIMSPEIQLPLPPGKRRTQSLSALPKERDSSSEKDGRSPNKREKDHIRRPMNAFMIFSKRHRALVHQRHPNQDNRTVSKILGEWWYALGPKEKQKYHDLAFQVKEAHFKAHPDWKWCNKDRKKSSSEAKPTSLGLAGGHKETRERSMSETGTAAAPGVSSELLSVAAQTLLSSDTKAPGSSSCGAERLHTVGGPGSARPRAFSHSGVHSLDGGEVDSQALQELTQMVSGPASYSGPKPSTQYGAPGPFAAPGEGGALAATGRPPLLPTRASRSQRAASEDMTSDEERMVICEEEGDDDVIADDGFGTTDIDLKCKERVTDSESGDSSGEDPEGNKGFGRKVFSPVIRSSFTHCRPPLDPEPPGPPDPPVAFGKGYGSAPSSSASSPASSSASAATSFSLGSGTFKAQESGQGSTAGPLRPPPPGAGGPATPSKATRFLPMDPATFRRKRPESVGGLEPPGPSVIAAPPSGGGNILQTLVLPPNKEEQEGGGARVPSAPAPSLAYGAPAAPLSRPAATMVTNVVRPVSSTPVPIASKPFPTSGRAEASPNDTAGARTEMGTGSRVPGGSPLGVSLVYSDKKSAAATSPAPHLVAGPLLGTVGKAPATVTNLLVGTPGYGAPAPPAVQFIAQGAPGGGTTAGSGAGAGSGPNGPVPLGILQPGALGKAGGITQVQYILPTLPQQLQVAPAPAPAPGTKAAAPSGPAPTTSIRFTLPPGTSTNGKVLAATAPTPGIPILQSVPSAPPPKAQSVSPVQAPPPGGSAQLLPGKVLVPLAAPSMSVRGGGAGQPLPLVSPPFSVPVQNGAQPPSKIIQLTPVPVSTPSGLVPPLSPATLPGPTSQPQKVLLPSSTRITYVQSAGGHALPLGTSPASSQAGTVTSYGPTSSVALGFTSLGPSGPAFVQPLLSAGQAPLLAPGQVGVSPVPSPQLPPACAAPGGPVITAFYSGSPAPTSSAPLAQPSQAPPSLVYTVATSTTPPAATILPKGPPAPATATPAPTSPFPSATAGSMTYSLVAPKAQRPSPKAPQKVKAAIASIPVGSFEAGASGRPGPAPRQPLEPGPVREPTAPESELEGQPTPPAPPPLPETWTPTARSSPPLPPPAEERTSAKGPETMASKFPSSSSDWRVPGQGLENRGEPPTPPSPAPAPAVAPGGSSESSSGRAAGDTPERKEAAGTGKKVKVRPPPLKKTFDSVDNRVLSEVDFEERFAELPEFRPEEVLPSPTLQSLATSPRAILGSYRKKRKNSTDLDSAPEDPTSPKRKMRRRSSCSSEPNTPKSAKCEGDIFTFDRTGTEAEDVLGELEYDKVPYSSLRRTLDQRRALVMQLFQDHGFFPSAQATAAFQARYADIFPSKVCLQLKIREVRQKIMQAATPTEQPPGAEAPLPVPPPTGTAAAPAPTPSPAGGPDPTSPSSDSGTAQAAPPLPPPPESGPGQPGWEGAPQPSPPPPGPSTAATGR

SEQ ID NO: 184580 - DNA, 4827 bp, Artificial Sequence
  derived and/or modified sequence
atgtatagtgcacaccggccactcatgcctgcaagcagcgcagcctcacgtgggctgggtatgttcgtgtggactaacgtggagccacggtctgtcgccgtttttccatggcacagcctggttcctttcctggccccgtctcagcccgatccttctgtgcagccctcagaggctcagcagccagcctcccaccctgtggccagcaaccagagcaaagagcctgctgaaagcgccgccgttgcacatgagagaccgccaggcgggaccggtagtgcagaccctgagcgcccacctggggcgacgtgccctgagtccccaggccccggacctccacaccccctgggagtagtagagagtggcaagggtccgccgcctactaccgaggaggaagcctccgggcccccaggcgagcccaggctggactcagagaccgagtccgatcacgatgacgcgttcctaagcataatgtctcccgaaattcaactgccgttaccccccgggaaaaggaggacccagtccctctctgccctgccgaaggagcgagattccagttccgaaaaggatggacgctctcctaataagagagagaaagaccacatcagaagaccgatgaatgcctttatgatcttctcgaaacggcatcgcgccctcgtccaccaaaggcacccaaatcaagacaatcggacagttagtaaaatcttgggcgagtggtggtacgctttgggccctaaggagaagcagaagtatcatgacctagcgtttcaggttaaggaagctcacttcaaggcacatcctgactggaaatggtgtaataaggataggaagaaatcttcttccgaggcaaagcctacaagcctggggctggccggagggcataaggagacccgggagcgctcaatgagcgagacagggaccgctgccgcccccggcgtctcttcggagctcctatccgtcgctgctcagactctgttgtcatcggacacaaaagctccgggctcctcctcctgtggggctgaacggctgcacactgtcggtggaccaggatctgccagaccaagagcttttagccatagcggagtccattccctggatggcggtgaagttgattcgcaggctctccaggagctgacccagatggtctctggtcccgcctcttactctggacctaagccttccacgcaatatggagcccccggacctttcgctgctcccggcgagggtggcgccctggccgccactggcaggccacccctgctccccactagagctagtagaagccagagagccgcatctgaagatatgactagcgacgaagagaggatggtgatttgtgaagaagaaggcgacgatgatgtgatcgctgacgacgggttcggaacaaccgacatcgatctgaaatgcaaggaacgggtaactgattctgagtcgggggatagcagcggggaagatcccgagggaaataagggctttgggcgcaaggtgttttcaccagtgattaggtcatcgttcactcactgtaggcctccattggatcccgagccccccggtcctcctgaccctcccgttgccttcgggaaggggtatggctccgccccctctagcagcgcgagcagtcccgcctcttcgtctgcgagtgcagctactagtttttccctcgggagtggtacctttaaagctcaggaaagcgggcaggggagtaccgccggcccactccggcctccgcctcccggggcagggggcccagccaccccttccaaggctacccgcttcttgcccatggacccggccacgtttcgccgtaagaggccggagtccgtgggggggttagagccacccggcccaagtgtcatcgctgctcccccttccggaggcggcaacatcctgcagaccttagtactgccacctaataaggaagagcaggaagggggcggcgcgcgggtgccaagcgcgcccgctccctcattggcatacggcgcccccgccgctccactctctcgccccgccgccactatggttactaacgtggttcgccccgtcagttctacacctgtgcccattgcgagcaaaccatttccaaccagtggcagggccgaagcgagtcctaatgataccgccggggccaggaccgagatgggaactggcagtagagtgcctggcggttcccccctaggcgtgagcctcgtgtactcagacaaaaaaagcgcggctgccacatctcccgcacctcacttggtggctgggcccttgttaggtaccgttggcaaagccccagccaccgtgacaaatttgctcgtgggcacccctggctatggcgctccggctccgcccgcagtgcagtttattgcccagggcgctccaggcggcggaaccacagccgggtctggggctggagccggctcagggcccaacggccccgttccactggggatattacaaccaggggccctcggtaaagcaggtgggataacccaggtgcagtacattttgccaaccttaccccaacagttacaagtggccccagctcctgccccggccccggggacaaaagcagctgcacccagtggtccggctcctactaccagcatcagattcaccctgcctcctggcacctctactaatggcaaagtcttagctgcaacggctcccacaccgggtatcccaattcttcagtccgtcccatccgccccaccaccaaaggctcagtccgtatctcctgtgcaggccccaccaccgggcggatctgcacagctcctcccagggaaagtattggtccccctggcagccccatccatgtctgtgcggggagggggcgcgggccagccgctgcctctagtatccccccccttcagtgtgcctgtacagaacggagctcaaccacccagcaaaattattcagcttaccccagtgcctgtatcaactcccagcgggcttgtaccgccactgtctcccgccaccctgcccggccctaccagtcagccccaaaaagtcttgctgccctccagcactcggatcacctatgtgcagtctgctggaggacatgcactgcctctaggtaccagtccagcaagttcccaggcaggcactgtcacttcatacggtcccacgagctcagttgcgcttggtttcacatcactcggtccctccggtcccgcctttgtgcagcctctactgtccgcaggccaggccccacttctcgcccccgggcaggttggtgtgtccccagttccgagcccacaactccctcctgcatgtgcggctcctggaggacctgtgattactgctttctattccgggtcccctgcccctacttcctccgcgccactagctcaaccaagccaggcgccgccatccctagtatatactgtagctaccagtaccacaccccccgccgcaacaatccttcccaaggggccaccggcccccgctaccgcaacgcccgcacccactagcccattccctagtgctaccgctggtagtatgacatattctctggtcgctccaaaagcccagaggccttcgccgaaagcccctcagaaggtgaaggccgccatagcctccatccccgtgggctctttcgaggccggagcttcaggacgacctggaccggcccctagacagcctctcgagcctgggcctgtgcgagagcctaccgcccccgaatcagaattggaaggacagccaactcccccagcaccgccccctctgccagaaacttggacccccaccgccagatccagtcctccgctgcccccccctgcagaggagcgcacctcagcgaaagggcccgagacaatggcatcgaagttcccatcctcgtcctctgactggcgcgtgcctggacagggtttggagaataggggagagccacccacaccaccatcccccgctcctgctcctgcagttgcccctggcggttctagcgagtcatctagcggacgtgctgccggcgacacccctgaacgcaaagaggcagccggcactggcaagaaggttaaagttcggcctccaccccttaagaagacctttgactctgtggacaatcgggtattgtctgaggttgattttgaggagagatttgcggagctgcccgagttcaggccagaggaggttctgcctagccccacactccagtctctagccacaagcccacgtgcgatcctgggatcttaccgtaaaaagaggaaaaacagcaccgacctcgactctgccccagaagatccaactagcccaaagcgcaaaatgagacgcagatcaagttgtagttctgaacctaacacacccaagtcagctaagtgcgaaggggatattttcacgttcgacaggaccgggacggaagccgaagacgtgctgggagagttagaatacgacaaagttccctattcatctctcagacgaactctggaccagagaagggccctcgtaatgcaactttttcaggaccatgggtttttccccagtgcccaggccaccgccgcatttcaggctcgctacgcagatatttttcccagtaaggtgtgtttgcagctcaagataagggaggtgaggcagaaaatcatgcaggctgctacgccaaccgagcagcctcccggagccgaggcaccacttcccgtgccccctcctactggaacggctgccgcaccggctcctactccatctcctgcaggaggccctgaccctacttctccttcttcagacagcggcactgctcaggccgccccccctcttccccctccgccggagagcgggccgggacaaccgggctgggagggcgctccccaaccgtcgccaccacctcctggcccctccacagccgcgacgggacgctag

SEQ ID NO: 184581 - DNA, 4827 bp, Artificial Sequence
  derived and/or modified sequence
atgtacagcgcccaccggcccctgatgcctgccagcagcgctgccagccggggcctgggcatgtttgtgtggaccaacgtggagcccaggtctgtggccgtgttcccctggcacagcctggtgcccttcctggcccccagccagcctgaccccagcgtgcagcccagcgaggcccagcagcctgccagccaccctgtggccagcaaccagagcaaggagcctgctgagagcgctgctgtggcccacgagaggcctcctgggggcactggatctgctgaccctgagaggcctcctggggccacctgcccagagagccctggccctggccccccccaccccctgggcgtggtggagagcgggaaaggacctccacccaccacagaggaggaggccagcggccccccaggagagccccggctggacagcgagacagaaagtgaccatgatgatgccttcctgagcatcatgagccctgagatccagctgcccctgcccccaggcaagaggaggacccagagcctgagcgccctgcccaaggagcgggacagcagcagcgagaaggatggccgcagccccaacaagcgggagaaggaccacatcagaagacccatgaatgccttcatgatcttcagcaagaggcaccgggccctggtgcaccagaggcaccccaaccaggacaacagaacagtgtccaagatcctgggggagtggtggtacgccctgggccccaaggagaagcagaagtaccatgacctggccttccaggtgaaggaggcccacttcaaggcccacccagactggaagtggtgcaacaaggacaggaagaagagcagcagcgaggccaagcccaccagcctgggcctggccggcggccacaaggagacccgggagaggtccatgtctgaaacaggaacagctgctgcccctggggtgtcctctgagctgctgtctgtggccgcccagaccctgctgagcagtgacaccaaggcccctggcagcagcagctgtggggctgagcggctgcacacagtgggcggccctggcagcgcccggccccgggccttcagccacagcggcgtgcacagcctggatggaggagaggtggacagccaggccctgcaggagctgacccagatggtgtctggccctgccagctacagcggccccaagcccagcacccagtatggagcccctggcccctttgctgcccctggagagggcggggccctggccgccaccggccggccccccctgctgcccacccgggccagccgcagccagagagctgccagcgaggacatgaccagtgatgaggagaggatggtgatctgtgaggaggagggagatgatgatgtgattgctgatgatggcttcggcaccacagacatcgacctgaagtgcaaggagcgggtgacagacagcgagagcggggacagcagcggggaggaccctgagggcaacaagggcttcggcaggaaggtgttcagccctgtgatccgcagcagcttcacccactgccggccccccctggaccctgagcccccaggccccccagacccccctgtggccttcggcaagggctacggcagcgcccccagcagcagcgccagcagccctgccagcagcagcgccagcgctgccaccagcttcagcctgggcagcggcaccttcaaggcccaggagagcggccagggcagcacagctggccccctgcggcccccacctcctggggccggcggccctgccacccccagcaaggccacccgcttcctgcccatggaccctgccaccttccggaggaagaggcctgagagcgtgggcggcctggagcccccaggccccagcgtgattgctgccccacccagcggcggcggcaacatcctgcagaccctggtgctgccccccaacaaggaggagcaggagggcggcggggcccgggtgcccagcgccccagcccccagcctggcctatggagccccagctgcccccctgagcaggcctgctgccaccatggtgaccaacgtggtgcggcctgtgagcagcacccctgtgcccatcgccagcaagcccttccccaccagcggccgggcagaggccagccccaatgacacagctggggccaggacagagatgggcaccggcagccgggtgcctgggggcagccccctgggcgtgtccctggtgtacagcgacaagaagtctgctgctgccaccagccctgccccccacctggtggccggccccctgctgggcaccgtgggcaaggccccagccaccgtgaccaacctgctggtgggcaccccaggctacggggccccagcccctcctgctgtgcagttcatcgcccagggcgcccctgggggcggcaccacagctggcagcggggccggggccggcagcggccccaatggacctgtgcccctgggcatcctgcagcccggggccctgggcaaggccggcggcatcacccaggtgcagtacatcctgcccaccctgccccagcagctgcaggtggccccagccccagccccagcccctggcaccaaggctgctgcccccagcggccctgcccccaccaccagcatccgcttcaccctgcccccaggcaccagcaccaacgggaaggtgctggccgccacagcccccaccccaggcatccccatcctgcagagcgtgcccagcgcccccccacccaaggcccagagcgtgtcccctgtgcaggcccctcctcctgggggcagcgcccagctgctgcccgggaaggtgctggtgcccctggccgcccccagcatgtctgtgcggggcggcggggccggccagcccctgcccctggtgtccccacccttctctgtgcctgtgcagaatggagcccagccccccagcaagatcatccagctgacccctgtgcctgtgtccaccccatctggcctggtgccccccctgagccctgccaccctgcccggccccaccagccagccccagaaggtgctgctgcccagcagcacccgcatcacctacgtgcagagcgctgggggccacgccctgcccctgggcaccagccctgccagcagccaggccggcaccgtgaccagctatggccccaccagctctgtggccctgggcttcaccagcctgggccccagcggccctgcctttgtgcagcccctgctgtctgctggccaggcccccctgctggcccctggccaggtgggcgtgtcccctgtgcccagcccccagctgcccccagcctgtgccgcccctgggggccctgtgatcacagccttctacagcggcagccctgcccccaccagcagcgcccccctggcccagcccagccaggccccacccagcctggtgtacacagtggccaccagcaccaccccacctgctgccaccatcctgcccaagggccccccagccccagccacagccaccccagcccccaccagccccttccccagcgccacagctggctccatgacctacagcctggtggcccccaaggcccagaggcccagccccaaggccccccagaaggtgaaggccgccatcgccagcatccctgtgggcagctttgaggccggggccagcggccggcccggccctgccccccggcagcccctggagcccggccctgtgcgggagcccacagcccctgagagcgagctggagggccagcccaccccaccagcccccccacccctgcctgagacctggacccccacagcccggagcagcccccccctgcccccacctgctgaggagaggaccagcgccaagggccctgagaccatggccagcaagttccccagcagcagcagtgactggagggtgcccggccagggcctggagaacagaggagagccccccaccccacccagccctgccccagccccagctgtggcccctgggggcagcagcgagagcagcagcggccgggctgctggggacaccccagagaggaaggaggccgccggcaccgggaagaaggtgaaggtgcggcccccacccctgaagaagacctttgacagcgtggacaacagagtgctgtctgaggtggactttgaggagagatttgctgagctgcctgagttccggcctgaggaggtgctgcccagccccaccctgcagagcctggccaccagcccccgggccatcctgggcagctacaggaagaagaggaagaacagcacagacctggacagcgcccctgaggaccccaccagccccaagaggaagatgagaagaagaagcagctgcagcagcgagcccaacacccccaagagcgccaagtgtgagggggacatcttcacctttgacagaactggaacagaagcagaagatgtgctgggggagctggagtatgacaaggtgccctacagcagcctgcggaggaccctggaccagaggcgggccctggtgatgcagctgttccaggaccacggcttcttccccagcgcccaggccacagctgccttccaggcccgctatgctgacatcttccccagcaaggtgtgcctgcagctgaagatccgggaggtgcggcagaagatcatgcaggccgccacccccacagagcagcccccaggagctgaggcccccctgcctgtgcccccacccactggaacagctgctgccccagcccccacccccagccctgctgggggccctgaccccaccagccccagcagtgacagcggcacagcccaggccgccccacccctgcccccacctcctgagagcggccctggccagcccggctgggagggcgccccccagcccagccccccacctcctggccccagcacagctgccaccggccgctag

SEQ ID NO: 184582 - DNA, 4827 bp, Artificial Sequence
  derived and/or modified sequence
atgtacagcgcccaccggcccctgatgcccgccagcagcgccgccagccgggggctcgggatgtttgtctggaccaatgtggaacctcggagtgttgccgtatttccgtggcattccctggtgccgtttctcgcaccctcccagccagaccccagcgtccagcccagcgaagcccagcagccggcctcccaccctgtcgctagcaaccaatcaaaggaacctgcagaaagcgccgctgtggcacacgagcgcccgcctggagggactggatcggctgatccagagcgtcccccaggtgctacctgcccggagtcaccagggcctggtcctccacacccactgggcgtcgtagaatccgggaagggccctcctccgaccaccgaggaagaggcctcaggcccaccaggggaacctcgactagactctgaaacggagagtgatcatgacgacgcatttctgtctattatgagcccggagatacagctgccccttccacctggaaagaggcgcacccagagcctgtctgctttgcctaaagagcgagactcttcttccgaaaaagatggccgctcccctaataaacgagagaaggatcatatccgccggcctatgaatgcgtttatgatttttagcaagaggcatagggctctggtgcatcaacgccatcctaaccaagacaacagaacagtgtccaaaatcctgggggaatggtggtacgctttggggccaaaggaaaaacagaaataccacgacctagctttccaggttaaagaagcccattttaaggcgcaccctgattggaagtggtgtaacaaagatcgcaagaagagctcttcagaggcaaagccaacgtcccttggacttgctgggggtcacaaggagacgagagaacgctcaatgagtgaaactggcaccgctgctgcaccaggggtgtcctctgaactgctgtcagtggccgcgcagacgctcctctcatctgataccaaagctcctggatccagctcgtgtggggcagagcgcctgcacaccgttggcgggcctggcagcgcccgtccacgggcttttagccacagtggagtacattctctagacggcggagaggtcgacagccaggcgctacaggagctcacacagatggtctccggaccggcttcgtattccggtccaaaaccttcaacacagtatggagcccccgggccatttgccgccccaggggaggggggcgctttggcagccacgggacgccctccactgctcccgacacgagcaagtcggagccagagagcagctagcgaggacatgacttccgacgaggagcgcatggtgatctgcgaggaagaaggggatgacgacgtcattgccgatgacggattcggaaccactgacatcgacctaaaatgtaaagagcgggtgacagacagtgagtccggtgattctagtggtgaggatccggaaggcaataaggggtttggtaggaaagtgttcagccccgtgatcagatcgtcttttacccattgccgccctcctctcgaccccgaacctccaggacccccagatcccccagtggccttcggtaaagggtacggcagcgctccatcctcctcggcaagcagtcctgcaagtagctcagcaagcgctgccacatcgtttagcctcggttccgggacatttaaggcccaggaatcagggcagggttccaccgccggcccactgaggcctcctccccctggtgccggtggcccagccactccttctaaagccacgcgtttcctacctatggaccccgctacattccgccggaagagacctgaatccgtagggggattagaaccccctggcccttcagtgattgccgctccgccttccggcggagggaatattctgcagactctggtcctgcccccgaacaaggaggaacaggaaggaggcggggcaagggtcccctcagccccggccccatcccttgcatacggcgctcccgcggcgcctctgtcgagaccagccgctacgatggtaaccaatgtggttagaccagtctcctctactccagtacctattgcaagtaaaccctttcccactagcgggcgggcagaagcctccccaaacgatacagccggagctcgcacagagatgggcactgggagtcgggtgcccggtggctcccccttgggggtctccctggtgtactctgataagaagtctgcggctgcaacttctcccgccccccacttagtggctgggcctctattaggaactgtcgggaaggcacctgctaccgtgacaaacctcctggtgggcaccccagggtacggagccccagcccctccggcagtccagtttattgcccagggggctcccgggggcggtactacagcaggctcaggcgccggcgcagggagcgggccgaacggccccgtgccacttggtattctgcaacccggagcgcttggcaaagccggagggattacccaggtgcagtacatcctgcctaccttgccgcagcagcttcaggtcgctcccgcccccgcgcctgctccggggacaaaagccgcggccccgtccgggccagctcccacaacaagtatcagatttaccctccccccaggtacttcgactaacgggaaggtgttggctgcaactgcccctacccccggcatcccgatcttgcaatctgtgccatccgccccacctccaaaagcccagagtgtgtctccagtgcaggcgccgcctcctggtgggagcgctcaactgctgcccggtaaagtgcttgtgcccttggccgcccccagtatgtcagttcgcggcggtggcgctggacagcctctaccgctcgtgtcccctccgttttccgtcccggtgcaaaacggcgcccagcctccttcgaagatcattcagctgacacccgtcccagtgtcaacaccctcaggactggttccaccgctgagccctgctaccctgcccggcccaacatcacagccccaaaaggtgctgctgccttcctctacaagaatcacttatgtgcagagtgcaggaggacacgctttaccacttggcaccagccccgctagctcccaggccgggacagtgacctcatatggcccaacttcctccgttgcgctcgggttcacctcccttgggccctctggaccagctttcgtgcagcccctgctgagcgccggacaggctcccctgctcgcacccggccaagtcggagtgtcccccgtgccctccccccagctgccgcctgcctgcgccgctccaggtggcccggtaataaccgcattttattctggaagtccggcacccacctcatccgctcctctagcccagccgtctcaagccccaccgtccctggtctacacagtcgctacttccacaaccccacccgccgctaccattctgcccaaagggccaccagcccctgcaactgctactccagctccaaccagccccttcccctccgccactgccggatccatgacatatagccttgtggccccgaaggcccagcgaccttctccgaaagctccacagaaagtcaaggcagcaattgcaagcattcccgtcgggagcttcgaagccggcgcgtctggtcgccctggccctgctccacgtcagcctctggagcctgggcccgtgcgggaacccactgcccccgagtcagagttagaagggcagccaacccctcccgccccacctccacttcccgagacatggacgcccaccgcccgcagctctcctcccctgccaccaccagccgaggaacgcacgagcgcgaagggcccagaaacaatggcctcaaaattcccctccagctcctccgactggcgggtgcctggccagggactggagaacaggggggaacctccaacccctccgagtcccgcccccgctccggctgtggctccaggaggaagctctgaatccagctcaggcagggctgccggggacactcctgaaaggaaggaggctgctggcaccggcaaaaaagtgaaagtgcgtcctcctccccttaagaagacctttgattctgtagataacagggtgctgagcgaagtggattttgaggagaggtttgcagaattaccagagtttagacccgaagaagtcctaccctcccccacactacagtcactggctacgtctccccgagctattctgggctcatatagaaagaaacgcaaaaactcgacagatctggattccgcccccgaggatcctaccagccccaaacgtaaaatgaggcgccgctcctcctgcagctccgaacctaatacacccaagtctgctaaatgcgagggagatatttttacatttgacagaaccggaacggaagctgaggatgtcttgggagagctcgaatatgataaggttccatatagtagcttaaggaggaccctggatcagcgacgtgccctcgttatgcagctcttccaggaccacgggttttttccatcggcacaggccacagccgcttttcaggcccgatacgcagacatcttccccagcaaggtgtgcttacaactaaagatcagggaagtgcgtcaaaaaataatgcaggcagccactccgacagaacagcccccaggggctgaagcaccactccctgtgccaccacctactgggaccgccgctgcccccgcccctacaccaagccccgcgggtggccccgatcctacatcaccatcctccgactctggcacagcacaggccgcaccccctctccctcctccaccggagtcaggcccaggacagcccgggtgggagggagcccctcagcctagccccccccctccaggcccttctaccgcagccacaggcagatag

SEQ ID NO: 184583 - DNA, 4827 bp, Artificial Sequence
  derived and/or modified sequence
atgtacagcgcacacaggccactgatgcctgcctccagcgctgccagtcgcggacttggaatgtttgtgtggaccaacgtcgagccgaggagcgtggccgtcttcccatggcacagcctggtgccctttctagccccttctcagcccgacccatcagttcagccctccgaggcacagcagcctgccagccaccccgtggcaagcaaccagtccaaggaacctgcagagtccgccgctgtcgcacacgaacgccctccgggtggcacgggcagcgctgaccccgagcgcccaccaggggctacctgtcctgagtccccaggtccaggccctccgcaccctcttggtgtcgtcgagagtggaaagggaccccctcccacaaccgaggaagaggcctccggccctcccggagaacccagacttgacagtgagaccgagagcgaccatgacgacgctttcttatcaatcatgagccctgaaatccaactaccgctgcctccgggaaaaagaaggacccagtccctctccgctctccccaaggagcgtgatagttcttcggagaaggatggacgcagccctaataaaagggaaaaagatcatattaggagaccgatgaatgcgttcatgatttttagcaaacgacaccgggctctggtccatcagcgccacccaaatcaggataataggaccgtgtcaaagatcctcggcgagtggtggtatgcactaggccctaaggagaagcagaaatatcatgatcttgctttccaagtgaaagaggcgcattttaaagcccacccagactggaagtggtgtaacaaagatagaaagaagtcatcatctgaagccaagccgacaagcttggggcttgcaggaggccataaggagacacgcgaaaggtcgatgtccgagaccggcacggctgcggctcctggagtgagcagcgagcttttgtcagttgccgctcaaacattactttcttccgacacaaaagcaccaggatcaagctcatgcggggctgagcggctgcacactgtgggcggacccggatccgcacgcccaagagccttctcccactccggggtacactccttggatggcggagaggttgacagccaagccctgcaggagctaacacaaatggtaagtgggccagctagctattcaggcccaaagccctccactcaatacggagcacctgggccatttgccgctcccggagaaggcggagctctcgccgctacgggcagaccacccctgctccctaccagagcttcccgatcccagagagctgcgagtgaggacatgacatcagatgaggagcgaatggtcatatgcgaggaggaaggagatgacgatgtgatagccgacgacgggtttggcacaactgacattgatttgaagtgcaaagagagagtgaccgattccgagagtggtgatagctcaggcgaagatcccgagggcaacaagggtttcggaagaaaggttttcagcccagtgattcgcagttcatttactcattgtagacccccactcgatcctgaaccccctggcccaccggaccccccagtcgccttcggaaaaggttatggctcagctccctcctcatctgcaagtagcccggcaagcagcagcgcgtcggctgccacaagcttctctctggggtctggtaccttcaaagcgcaggagtccggtcaaggaagcactgctggtcccctcagacctcctccccctggtgcgggtggcccagccaccccatccaaggctacgaggttcctccctatggatcccgctaccttccggcgaaaaaggccggaatccgtgggaggactggagcccccaggcccttccgtgatcgctgcccctccgtccggcggtggaaatatcctgcagacactggtgctccctcctaacaaagaagagcaggaaggaggcggtgcccgtgtcccatcagctcccgcaccaagtctggcgtacggcgctcccgctgcgcctctgtcccgcccagcagccacaatggtgaccaacgttgtcagacccgtgagttccacaccggtccctatcgcctctaaacctttcccgacaagtggccgtgcggaggcttctccaaatgacaccgccggagccagaaccgaaatgggcaccggttccagagttcccggaggaagtccattgggtgtgtccttggtttattcagataagaagtctgcagctgcaactagccctgcccctcacttagtggctggccctctgctgggtacagtgggcaaagcgcctgccacagtcactaacttgctcgttggtaccccaggatacggcgcaccagctcctccagcagtgcagtttattgcacagggcgctcctggaggtgggacaactgcaggaagcggagcaggggcaggcagtggacccaatggtccagtgccactgggcattctgcaaccgggtgcattgggcaaggccggaggcataactcaagtccagtacattctgcctaccttgccccaacagctacaggtggccccagccccagcacctgcaccgggtaccaaggccgctgcaccttcagggccagcacctactacgtcaatccgtttcacgcttcctccagggacctctacaaatggcaaggtcctcgctgccaccgccccaacaccaggcattcccattttgcagagcgtgccaagcgcccctccaccaaaggcacagtcggtgagtccagtccaagcccctcctcctggcggtagcgcccagctgcttccagggaaagtgttagtgcctctcgcggctccaagcatgtcagttcgcggagggggtgcgggtcagccgctccctttggttagccccccattctcagtgccggttcaaaacggtgctcagccaccatccaagatcattcaattgacaccagtgcctgtgagcactccatctggtttggtcccacctctgagccctgccacattgccgggacctaccagtcaacctcagaaagtgttgctgccttcttcaactcgaattacctacgtgcagtccgccggagggcacgctctgccacttgggacaagtcctgccagctcccaggccggaaccgtcaccagttacgggccaacaagctctgtggctcttggcttcacctccttgggacccagcggcccagccttcgtgcaaccacttctgagcgccggacaggcccctctcctggctcccggacaagttggagtcagccctgtgccatccccacaattgccacccgcttgtgcagctcccggtggacccgtgataactgccttctacagcgggagcccggcacctaccagctccgccccactggctcagcccagtcaagcaccaccctccctggtgtacacggtggcaaccagcactaccccccctgccgctaccattttgccaaagggaccgcctgctcctgcaactgccaccccagctccgaccagcccatttcctagcgccactgcagggtccatgacatacagtctagtcgcccctaaagcacaacgcccaagccctaaggcaccccagaaggtgaaagctgccatagcctctatcccagtgggttcctttgaagccggagccagcgggagaccaggcccagcccctagacaaccacttgagcctgggcctgtgagggaacctaccgctcccgaatctgaactggaaggccagccaacccctccagctccaccaccattgcctgagacgtggactccaaccgcacggtcgtcccctcccctgccccctccagcggaagagagaacgtcagcgaagggtccggagaccatggccagcaagttccccagcagctccagcgattggcgcgtccctggtcagggccttgagaatagaggagaacctccaacacccccttccccggcaccagctccagcagttgcccctgggggatcaagcgagtcaagttctggacgtgccgctggggacacaccagaaaggaaggaagccgcaggtacgggcaagaaagtgaaagtacgcccacccccactgaagaaaacatttgattccgtggacaaccgcgtgctgagtgaggtggacttcgaagagcgctttgcagagctccccgaatttagacccgaagaggtcctgccctcacccaccctgcagagtctagccactagccctagagcaatccttggtagctaccgaaagaagcgtaagaattccaccgacctggatagcgccccagaagacccaaccagtccaaaacgtaagatgcggagaaggtccagctgtagtagtgagccgaacacccctaaaagcgccaagtgcgaaggtgatatatttaccttcgatagaacaggaacggaggccgaagacgtgctgggggagttggaatacgataaagtgccctacagttccctgcgtagaactttagatcagcggagagctctcgtgatgcagctgtttcaggatcacggattctttccctccgctcaagcgacagctgcctttcaagctcgttatgccgacattttcccttccaaggtgtgccttcagctgaagataagagaagtgaggcagaagatcatgcaagccgcaacaccaaccgagcagcccccaggtgcggaggctccacttcctgtgcccccacctactggcacggcagccgcaccagccccaacgcctagcccagcagggggtcctgacccaacctccccatcaagtgatagtggcaccgctcaggccgcacctccgttgccccctcctcccgagagcggaccaggccagccgggatgggagggagctccccagcccagccccccacccccagggccaagcactgccgctacaggtcgctag

SEQ ID NO: 184584 - DNA, 4827 bp, Artificial Sequence
  derived and/or modified sequence
atgtactctgcacaccgcccactcatgccagcctcatccgccgctagcagaggcctcgggatgtttgtgtggaccaacgttgaaccacggtcagtggctgtgtttccctggcatagcctggtacccttcctggccccgagccagcctgacccttccgtccagccaagtgaagctcagcagccagcttcccacccagttgctagcaatcaatccaaggaacctgcagagtctgctgcggttgcccacgagcgcccccccgggggcacaggatctgcggacccagagcggcctccgggagcgacttgtccggagtcacctggcccaggcccccctcatcctttgggcgtcgtcgagtccgggaagggaccgcctccaacaactgaggaagaggctagcgggcccccaggtgagccgaggctggactcagaaacggaatcggatcatgatgatgctttcttgtctattatgtccccagaaatccaactgcccttaccccccggcaaacgaagaactcaaagcctatccgctctgccaaaagaacgcgattcttcatccgagaaggacggacggagtccgaacaaacgcgaaaaggatcatatccggcgcccaatgaacgcgttcatgatcttctctaagaggcaccgagccctggtgcaccagcggcacccaaaccaggataatagaacggtcagtaagatattgggtgaatggtggtacgccctgggcccaaaagagaagcaaaagtaccatgaccttgcttttcaggtcaaagaagcacacttcaaagcacaccccgattggaaatggtgtaataaggataggaaaaagtcttcctcagaggccaaacctacatctctgggccttgccggtgggcacaaagaaacccgagagcgttccatgtccgaaaccggtaccgcagccgcaccaggggtttcctccgagctgctgtcagtagctgctcagaccctcctttccagcgacactaaagcccccgggagctcatcgtgcggggccgagagactgcacacagtcggtggtccaggtagtgctaggcctcgcgccttctcccattcaggtgtgcactctttagatggaggcgaagtggattcccaagctctccaggagctgacccaaatggtatcaggcccagcttcatactcagggcccaaaccttcgacacagtacggcgcccctggtcccttcgcagcccccggagagggcggtgccctcgcggccactggtcgtccccctctcctccctaccagagccagcaggtctcagcgcgccgcctccgaggacatgacaagcgacgaggagagaatggtcatttgtgaggaggagggagatgacgatgtgattgctgatgacggcttcggcaccactgatatcgatctcaagtgtaaggaaagagtaacggattcagagtcaggtgactcctccggagaggacccagagggtaacaaaggcttcggcaggaaggttttcagccctgtgattcgcagctccttcacacactgtcgcccacccctcgatcccgagccgcccggccctccagatccccctgtcgcatttggaaaggggtacggatccgccccctcatcctcggctagctctcctgcttcaagctccgcctcagctgcaactagtttctctttgggatccggcacttttaaagctcaggaaagtggccagggaagcacggccggacctctgcggccgcctcctcccggcgccggtggccctgccacaccctctaaagctacccgttttctgcctatggatccagcaaccttcagacgcaagcgaccggagtcagtaggaggcctggagccacccggaccatccgtgatcgccgctccccccagcggtggggggaatatcctgcagaccttggtgctgccacctaataaagaagagcaggagggaggaggtgcaagggtaccaagtgcaccagctccaagcttagcctacggagctcctgctgctccgctgagtagacccgccgccacaatggttaccaacgtagtcaggccagtaagctctacacctgttccaattgcctccaagccatttcccacaagtggacgagccgaagcaagcccaaatgacacggccggagcacggacagaaatgggcacaggaagcagagttcccggtggcagtcctctgggggtaagcctggtatactcagataagaaatctgcggcagccacgtcccctgctccgcatcttgtcgccggaccgcttctcgggactgtcggtaaggctcccgcgactgtgactaatctcctggtaggcaccccgggctacggcgcacccgctcctcctgccgtccagttcatcgcgcagggggccccgggaggcgggaccacggcgggctctggtgctggagcgggttctggacccaatggtcctgtgcctctcggcatcttgcagccaggggccctgggaaaggcagggggaatcactcaggtgcagtacatcttacccaccctacctcagcaacttcaagttgcacccgcaccggctcccgcacctgggactaaagccgcggcaccgtccggacctgcacctacaacctctatcaggtttaccctcccacctggtacttcaactaacggcaaggttcttgctgctacagctcctacaccgggcattcctattctgcaatctgtcccgagcgccccacctccaaaagcccagagtgtgagcccagtgcaggctccacctccaggcggcagcgcccaactacttcctggcaaagtactggtgcctctagcagctccttccatgtctgtacgcggcgggggggccgggcaacctttacctctggtgagtccaccattctcagtacctgtgcaaaacggggcgcagcctccaagtaagatcatccagctgacacctgttcccgtttccacaccgtctggcctcgtccctcctctgtccccagcaacacttccaggccctacaagccagccccagaaagtgcttctcccatcttccacacggatcacctacgtccaatccgcgggaggccacgcactccctctgggcacgagtcccgcaagctctcaggcaggcaccgttacctcttacggaccaacatcatccgtggcactaggcttcactagcttgggtccctcaggtcctgccttcgttcaacccttattgtcagctggacaggcacccctcttggcgcccgggcaggttggcgtgagccccgttccatcacctcagcttccgccagcatgtgctgcccccggcggcccagtgattaccgctttctactctggctcccccgcaccaacctcttccgcccctctggcccagccctcacaggccccaccaagccttgtctatactgtggctacctcaacaactccacccgctgccaccatcctgccaaaaggcccacccgctcccgctacagctacacccgcacccacatctccatttccaagcgccacggcaggatccatgacctacagtctggtagccccaaaggcccagaggccctcccctaaagcaccacagaaggtgaaggcggccattgcctctattcctgtcgggtcttttgaggccggagcatctgggcgcccggggcctgccccacgccagccccttgagcctgggcctgtgcgcgagcctaccgctcctgagtccgagctggagggccagccgactccacctgcaccacctccattaccagagacgtggacgcccaccgctagaagcagccctcccctcccacctcctgccgaagaaagaacctcagctaagggacctgagacaatggctagtaagttcccatcctcatccagcgattggagggtccccggacaggggttggagaataggggcgaacctcctacgccaccctctccagctccggcccccgcggttgccccaggtggatcctctgaatctagcagcggaagggccgcgggcgatactcctgagcgtaaagaagccgctggtacgggcaaaaaggtcaaggtcaggcccccacctctgaagaagacgtttgattccgttgacaaccgcgtcttatccgaagtcgatttcgaagagcgtttcgcggaacttcctgaattcaggcccgaggaggtgctcccctcaccaacactccagtcactggctacttcaccaagggctatcctgggatcctaccggaaaaaaagaaagaacagcaccgacctggactccgcgcccgaggaccccacttcaccaaagaggaaaatgcggcggcgcagctcatgtagctctgagcccaatacacccaaaagcgcgaagtgcgaaggggatatttttacatttgatcggactgggacagaggccgaagatgtgctgggagagcttgagtacgacaaagtgccctattcctccctccggaggaccctcgaccagagaagagcactggtgatgcaactgttccaggaccatgggttcttcccttccgcccaagccactgccgcttttcaggccaggtatgctgatatatttccatcgaaggtatgtctgcagctgaaaattagagaagttcggcaaaagattatgcaagctgccacgcccactgaacagccaccgggcgccgaagcgccactgcctgtgccacccccaaccggcacagcggcagcccctgcacccaccccctcaccggccggtggacccgatcccaccagtcctagtagcgactctggtactgcccaggccgctccaccgctgcctccgccaccggagagtggacccgggcagccaggatgggagggcgccccccagccctccccaccacctcctgggccctcaaccgccgcaactgggagatag

SEQ ID NO: 184585 - DNA, 4827 bp, Artificial Sequence
  derived and/or modified sequence
atgtattccgcccatcgcccactgatgcctgcttcatctgcagcttctaggggactcggaatgttcgtttggacaaacgtggagccccgatccgtggccgtattcccttggcacagtctcgttccctttctggccccaagccaacccgatccatccgtgcagcctagtgaagctcagcaaccagcatcacacccagtcgcgtcgaaccagtccaaggaacccgcagagagtgccgcagttgctcacgagagaccccccggggggacaggctctgctgatccggaacgcccccccggagccacctgccctgagtctcccggacccggccctcctcacccactcggagttgtagaaagcggcaaaggtccacctccaactactgaagaagaagcaagtggaccgccaggagaaccccgattagattctgagactgagtccgaccatgacgatgcttttttaagcataatgtcccctgagattcagctgcccttaccccctggcaaaagaagaacacaatccctgtccgcattgccgaaggagcgggattcctcttccgagaaggatggacggtcacccaacaaacgtgaaaaagaccacattcgaagacccatgaacgctttcatgatatttagtaagaggcacagagccctcgttcatcagcgtcacccgaaccaggacaatagaacggtttctaaaatcctaggagaatggtggtacgccctcggtccgaaggagaaacaaaagtatcacgaccttgcttttcaagtgaaagaggcccattttaaagcacatccggattggaaatggtgtaataaagaccgtaagaagtcgtctagcgaggctaaaccaacatctctcggcctggccggcggccacaaggaaactcgcgaacgctccatgtcagaaacaggcaccgctgcagcccctggtgtgagctcagaactgttgagtgtcgctgcgcaaacactgctatcatccgacacaaaggcccctggtagttcttcatgtggagccgagcgactccacaccgtgggaggccccggctccgcccgtcccagagcctttagtcattctggtgtgcactccctggatggtggcgaggtagattctcaggcactccaggaattaacgcaaatggtgtcaggccccgcctcatattcaggaccgaaacctagcacacagtacggcgcacctggaccattcgcggcccccggagagggtggtgctctggccgctactggcaggccgcctctgctgcctacaagagcctcaagatcacagcgtgccgcgagtgaagacatgactagcgatgaagaaaggatggtcatttgtgaggaggagggagatgacgacgtcatagctgacgacgggttcggaactaccgatattgacctgaaatgtaaagagagagttactgattctgaaagcggagacagctctggcgaggatcctgaaggcaataaaggcttcgggagaaaggtatttagccctgtaatccggtcctcattcacccattgtcgacccccccttgatcccgagccccccggacccccagatcctcccgtggcattcggcaaaggatatggtagtgccccttcttcttctgcaagttcccccgcttcttctagcgccagcgccgctacgtctttctcactgggctctggcacatttaaagctcaagagagtggccagggctccacggccggccccttgagaccccccccacccggcgcaggcggcccagcaacaccctccaaagccactagattcctccccatggatcccgccactttcaggcgtaagagaccggaatccgtggggggactggaacctcctggacctagtgtgattgctgcaccccctagtggcggagggaatatattacaaactttagtgttgccccccaataaagaggagcaggaaggggggggagcaagggtacctagcgcaccagccccctctttagcctacggagctccagcggcccccttaagtaggcctgctgccaccatggtcaccaacgtcgtgagacccgtctcctccacacccgtccccatcgctagcaaaccatttccaacgtcgggtagagcggaagccagccctaacgataccgcaggagcacggactgaaatgggaaccggctcacgtgtgcctggaggttcccccctgggtgtgagcctggtctatagcgataagaaaagtgctgccgcgacatctcctgctcctcatttagtcgctggccccctcctcggcaccgtaggcaaagctccagccacagtgaccaacttactggtgggcacacctggttacggagcccctgcccctccagccgttcagttcatcgcacaaggcgctccaggtggcggcacaacagccggatcaggagcaggggcaggctccggccctaatggaccggtgcctcttgggatcctacaacctggcgccctaggaaaggcaggcggaattacccaggtacagtacatcttgcccactttgccccagcagctgcaagtcgcccccgcgccggccccagcccccggtacaaaagcggccgccccttcagggccagcgcccacaacaagtatccggtttaccttacccccaggaacaagtaccaatggaaaagtgttagccgctaccgcacctacccctggaatcccaatcctgcagagcgtcccgtccgcccccccaccaaaggcacaatcagtgagtcctgttcaggccccaccacctggaggaagcgcccagttgctgccaggaaaagtgctggtccccctggccgccccgagtatgtcagtacgcggcggaggtgccggtcaacccctcccacttgtttccccccccttttcagttcctgtacaaaacggtgcccaacccccaagcaaaatcattcagcttacaccagttcccgtcagcacaccctctggactcgtgcccccactcagtcccgcgacgctccctggaccaaccagccagccacagaaggttctgctgccatcctccactcggatcacatacgtacaaagcgctggaggtcatgcacttcccctgggaacgtcaccggcatcttcacaagccggaactgttacaagttacggccctacttcaagtgtggcgcttggctttacaagtctcggtcctagcggtcccgcttttgtccagcctttgctgtctgccggtcaggcccccctgcttgctcccggacaggtgggggtatcacccgtccctagtccccagctgcccccggcctgcgcagcccctggaggccctgttattacggcattttattccggatcacctgctccaacaagcagcgctcccctcgctcagccgtcccaggccccaccaagtctcgtatacaccgtagccactagtacaaccccccccgccgcaaccatactccccaaaggccctcccgccccagccacagcgactccagcccccacgagcccctttccttccgccactgccggctcaatgacttacagcctcgtagctcccaaagcccaacggccaagccccaaggctccccagaaagtcaaagcagcgatagcctctatccctgtgggatcctttgaagccggcgcctccggcagacccggccccgccccccgacagcctctcgagccaggacctgtacgcgaaccaactgcccccgagtcagagctcgagggtcaacccacaccacccgccccccctcctttacctgagacttggacacctacggccagatcctcaccacccctcccaccacccgccgaagaaaggaccagcgcgaaaggacccgagaccatggcatcaaagtttccctcttcatctagcgattggcgagtgccggggcaaggactggaaaataggggcgaaccccctacacccccttctcccgctcctgctcccgccgtcgcgcctggcggctcctcagagtcttctagcgggagggccgcgggggatactccagaacggaaggaagccgcaggtacaggtaaaaaggtcaaggtgcgccctcccccactgaagaagacttttgactccgtcgacaatcgtgtgcttagtgaagttgactttgaggaacggttcgcagaactgccagaattcagacctgaagaagtgttgcctagtcctaccttacagtctcttgctacatctcctagagcaattttaggctcctacaggaaaaagcggaaaaattctactgacttggacagtgctccagaggaccctacctcccctaagagaaagatgagaaggcgaagtagctgttcatccgaaccaaataccccgaagagtgccaagtgtgagggagacatatttacctttgacagaactgggactgaggccgaagatgtgttgggggaactggaatatgacaaagtaccttattcctcactgagacggacattggatcagaggcgagccctggtgatgcagcttttccaggatcacgggttttttccatctgcccaggcaactgcagctttccaggctagatatgctgacatcttcccctcaaaagtgtgcctgcaacttaaaatccgggaagttcgccagaaaataatgcaggcagctactcctactgaacagccaccaggcgccgaagctcccttaccagtccctccaccgaccgggaccgccgcagcccccgcacccacaccaagcccagccggcggccctgatcctactagcccctcatctgactccggcaccgcacaggccgcccctccacttccccccccacctgagtccggcccgggccagccgggttgggaaggagctccgcaaccttctccgcctccaccaggcccctctacagctgctacaggtcgatag

SEQ ID NO: 184586 - DNA, 5473 bp, Artificial Sequence
  derived and/or modified sequence
ggaggtgcgagcccctgccgggtcccccctgcgccggaccatgtattcggcccacaggcccctgatgcccgcgtccagcgcggcctcccgtggcctcggcatgttcgtgtggacgaatgtggaacctcgctctgtggctgtgttcccttggcactccttagtccccttcctggcacccagccagcctgacccctccgtgcagccgagcgaggcccagcaacctgccagccacccagtggcctccaaccagagcaaagaacctgctgagtcggcagctgttgctcatgaacggccaccaggtgggacagggagtgctgaccctgagcggccccctggagccacatgccctgagagcccaggacccggacccccacaccctttgggggtggtggaatctggtaagggtccgcctcccaccacggaggaggaggcctccggccccccaggagagccccggctggacagtgagacagagagtgaccatgatgatgccttcctctccatcatgtctcctgagatccagttgcctctaccgcccggaaaacgtcggacccagtccctcagtgccctacccaaggaacgggactcatcttctgagaaggatggacgcagccccaacaagcgggagaaggaccacatccggcggcccatgaatgccttcatgatcttcagcaagcggcaccgggccctggtccaccagcgtcatcccaaccaggacaaccggaccgtcagcaagatcctgggcgagtggtggtatgccctggggcccaaggagaagcagaagtaccacgacctggccttccaggtgaaggaggcccacttcaaggcccacccagattggaagtggtgcaacaaggaccgaaagaagtccagctcagaggccaagcccacgagcctggggctggcaggagggcacaaggagacgcgggagcggagcatgtcggagacgggcactgctgctgcccctggggtgtcctctgagctcctgtccgttgcagcccagacactcctgagctcagacaccaaggctccggggagcagctcctgtggggcagaacggctacacacagttgggggacctggctcagcccggccccgagctttctcccacagcggggtacacagcctggacggcggagaagtagacagtcaggcgctacaggaactgacgcagatggtgtctggccctgcatcgtactctggcccaaagccttctacccagtatggagctccaggaccctttgcagcccctggtgagggaggtgccttggcggccactgggcggcccccgctgctgcccacccgagcttctcgttctcagcgtgcggccagtgaggacatgacgagtgatgaggagcgcatggtcatctgtgaggaggaaggggatgatgatgtcattgctgacgatggcttcggcaccactgacattgatctcaagtgcaaggagcgggtgaccgacagcgagagtggggacagctctggggaggacccagagggcaacaagggctttggtcggaaggtgttttcacctgtgatccgttcctcctttacccactgccgccccccactggaccctgagcccccagggcccccggatcctcctgtagcctttggcaaaggctatggttccgccccatcctcctctgcgtcctcgcctgcttcctcctcagcctcggcagccacctccttctcactgggctcaggaaccttcaaggcccaggagtctggtcagggcagcacagcgggccccctacggcccccaccccctggggctgggggtccagcgacaccttccaaggcaacccggttcctcccaatggatcctgccaccttccggcgcaagagacccgaaagtgtgggtggcctggagccaccaggcccctcagtcatcgcggcccctcccagcggaggaggaaacatcctgcagacactggtgctgcccccaaacaaggaggagcaagagggcggcggagccagagtgccctccgcccccgccccatcactggcctatggggccccagcagctcccctgtcccgtcctgccgccaccatggtcaccaatgtggtgcggcctgtcagcagcactcctgtgcccatcgcctctaagcccttccccacctctggccgggctgaggcgtctccaaatgacacagcaggtgccaggactgaaatgggcactgggtctcgggtgcctgggggctccccgctgggtgtcagcttagtgtattcggacaagaagtcggcagcagccacctcaccagccccacacttggtggctggacccctgctgggcactgtggggaaggcgcctgccactgtcactaacctactggtgggcaccccggggtatggggcccctgcgccccctgctgtccagttcattgcccagggggcccctggtggtgggaccactgcgggctcaggagcaggtgctgggagtggccccaatgggccagtacccctgggcatcctgcaaccaggtgccctgggcaaggctgggggaatcacccaggtacagtacatcctgcccacgctgccccagcagcttcaggtggcacctgccccagcaccagcccctgggaccaaggcagcggctcccagcggccctgcacccaccaccagcatccgtttcaccctcccaccgggcacttccaccaacggcaaagtcctggctgccactgcacccactcctggcatccccatcctgcagtctgtaccctccgccccaccccccaaagcccagtcagtttctcccgtgcaggccccgcccccgggtggctcagcccagctgctgcctgggaaggtcctagtgcctctggccgcccctagcatgtcagtgcggggtggaggggccggccagccactgccactggtgagcccgcccttctcagtacctgtgcagaatggtgcccagccccccagcaagatcatccagctgaccccggtgcctgtgagcacacccagcggcctggtgccgcccctgagcccagccacactccctggacccacctctcagcctcagaaggtcctgttgccctcctccaccagaatcacctatgtgcagtcagcgggcgggcacgcgctgcccctgggtaccagccctgcgtccagccaggctggaacagtcacctcgtacgggcccacgagctctgtagctctaggcttcacctcgctggggcccagcggccccgccttcgtgcagcccctgctctcagcaggccaagccccactgctggctcccggtcaggtgggcgtgtcacctgtgcccagtccccagctgccgcctgcctgtgcagcccccggaggtcctgtcataacagcattttactctggcagccctgcacccacctcctcagcacccctggcccagccatcccaggcccccccaagcctggtctacactgtggccaccagcacaaccccacctgcagccaccattctgcccaagggcccgccagcccctgccactgccaccccagccccgactagccctttccccagcgccacagcaggttccatgacctacagcttagtggcccccaaggcccagcggcccagcccgaaggccccccagaaagtgaaggcagccatcgccagcattcccgtggggtcctttgaggcaggtgcctctgggcggcctggccctgcaccccggcagcctctggagcctggcccagtccgagagccaactgccccagagtctgagcttgaggggcagcccacaccaccagcccctccacccctgccagagacctggactcccacggcccggagcagccccccactgcccccacctgctgaggagcggaccagcgccaagggccctgagaccatggccagcaaattccccagctcatcttcagactggcgcgtccctgggcagggcctggagaatcgtggggagcctcccactcctcccagcccggccccagctccagctgtagcccctggtggcagcagcgagagcagcagtgggcgggcagccggggacaccccggagcgcaaggaggcggctggtactggcaagaaggtgaaggtgcggcccccgcccctgaagaagacctttgactctgtggacaacagggtcctgtcagaagtggacttcgaagagcgctttgctgagttgcctgagtttcggcctgaggaggtgctgccctcccccaccctgcagtctctggccacctcaccccgggccatcctgggctcttaccgcaagaagaggaagaactccacggacctggattcagcacccgaggaccccacctcgcccaagcgcaagatgagaagacgctccagctgcagctcggagcccaacacccccaagagtgccaagtgcgagggggacatcttcacctttgaccgtacaggtacagaagccgaggacgtgcttggggagctagagtatgacaaggtgccatactcctccctgcggcgcaccctggaccagcgccgggccctggtcatgcagctctttcaggaccatggcttcttcccgtcagcccaggccacagccgccttccaggcccgctatgcagacatctttccctccaaggtttgtctgcagttgaagatccgtgaggtgcgccagaagatcatgcaggctgccactcccacggagcagccccctggagctgaggctcctctccctgtaccgccccccactggcaccgctgctgcccctgcccccactcccagccccgcagggggccctgaccccacctcacccagctcggactctggcacggcccaggctgccccgccactgcctccacccccagagtcggggcctggacagcctggctgggagggggctccccagccctcccccccacccccaggtccctccacagctgccacaggcaggtgagggacccctgagaagatgccaggacttatagtaccccctcaggacatggacagtatgtgggggcaggaaggttatctcctcccgggtaaagccatttcgtcctctccagtttggggcggaatgaggcctgctcctcttgtaaatacccccttccctcgaagctccctcccggtgctggggggcagctgaggggctgcaggggcagtctccctcctccaagcccctgtacataacctggagcgtgtgaccttcagagcttttcactttatgcaaaatggctcctgtgagggctgcaagctggagggtggtgcaggccttgggccacagggaggcgcctgtggaatagggggagttcatgcaccccttttttccccagaggggctggactcaggttagtttgggggtgggggctcctgcactttgccacaggcacggggagggttttctcctcaccccctctgccctcccaacttgggttgtactttctaagaaggtgattccccctgcccttgcccccttccccagaacaaaacatgttgatcatgtgcaatatttcttactgtgccgagaagccgcaatgagcgagattaaagctgtttaacacac

SEQ ID NO: 184587 - DNA, 4827 bp, Artificial Sequence
  derived and/or modified sequence
atgtacagcgcccacagacccctgatgcccgccagcagcgccgccagcagaggcctgggcatgttcgtgtggaccaacgtggagcccagaagcgtggccgtgttcccctggcacagcctggtgcccttcctggcccccagccagcccgaccccagcgtgcagcccagcgaggcccagcagcccgccagccaccccgtggccagcaaccagagcaaggagcccgccgagagcgccgccgtggcccacgagagaccccccggcggcaccggcagcgccgaccccgagagaccccccggcgccacctgccccgagagccccggccccggccccccccaccccctgggcgtggtggagagcggcaagggccccccccccaccaccgaggaggaggccagcggcccccccggcgagcccagactggacagcgagaccgagagcgaccacgacgacgccttcctgagcatcatgagccccgagatccagctgcccctgccccccggcaagagaagaacccagagcctgagcgccctgcccaaggagagagacagcagcagcgagaaggacggcagaagccccaacaagagagagaaggaccacatcagaagacccatgaacgccttcatgatcttcagcaagagacacagagccctggtgcaccagagacaccccaaccaggacaacagaaccgtgagcaagatcctgggcgagtggtggtacgccctgggccccaaggagaagcagaagtaccacgacctggccttccaggtgaaggaggcccacttcaaggcccaccccgactggaagtggtgcaacaaggacagaaagaagagcagcagcgaggccaagcccaccagcctgggcctggccggcggccacaaggagaccagagagagaagcatgagcgagaccggcaccgccgccgcccccggcgtgagcagcgagctgctgagcgtggccgcccagaccctgctgagcagcgacaccaaggcccccggcagcagcagctgcggcgccgagagactgcacaccgtgggcggccccggcagcgccagacccagagccttcagccacagcggcgtgcacagcctggacggcggcgaggtggacagccaggccctgcaggagctgacccagatggtgagcggccccgccagctacagcggccccaagcccagcacccagtacggcgcccccggccccttcgccgcccccggcgagggcggcgccctggccgccaccggcagaccccccctgctgcccaccagagccagcagaagccagagagccgccagcgaggacatgaccagcgacgaggagagaatggtgatctgcgaggaggagggcgacgacgacgtgatcgccgacgacggcttcggcaccaccgacatcgacctgaagtgcaaggagagagtgaccgacagcgagagcggcgacagcagcggcgaggaccccgagggcaacaagggcttcggcagaaaggtgttcagccccgtgatcagaagcagcttcacccactgcagaccccccctggaccccgagccccccggcccccccgacccccccgtggccttcggcaagggctacggcagcgcccccagcagcagcgccagcagccccgccagcagcagcgccagcgccgccaccagcttcagcctgggcagcggcaccttcaaggcccaggagagcggccagggcagcaccgccggccccctgagaccccccccccccggcgccggcggccccgccacccccagcaaggccaccagattcctgcccatggaccccgccaccttcagaagaaagagacccgagagcgtgggcggcctggagccccccggccccagcgtgatcgccgccccccccagcggcggcggcaacatcctgcagaccctggtgctgccccccaacaaggaggagcaggagggcggcggcgccagagtgcccagcgcccccgcccccagcctggcctacggcgcccccgccgcccccctgagcagacccgccgccaccatggtgaccaacgtggtgagacccgtgagcagcacccccgtgcccatcgccagcaagcccttccccaccagcggcagagccgaggccagccccaacgacaccgccggcgccagaaccgagatgggcaccggcagcagagtgcccggcggcagccccctgggcgtgagcctggtgtacagcgacaagaagagcgccgccgccaccagccccgccccccacctggtggccggccccctgctgggcaccgtgggcaaggcccccgccaccgtgaccaacctgctggtgggcacccccggctacggcgcccccgccccccccgccgtgcagttcatcgcccagggcgcccccggcggcggcaccaccgccggcagcggcgccggcgccggcagcggccccaacggccccgtgcccctgggcatcctgcagcccggcgccctgggcaaggccggcggcatcacccaggtgcagtacatcctgcccaccctgccccagcagctgcaggtggcccccgcccccgcccccgcccccggcaccaaggccgccgcccccagcggccccgcccccaccaccagcatcagattcaccctgccccccggcaccagcaccaacggcaaggtgctggccgccaccgcccccacccccggcatccccatcctgcagagcgtgcccagcgcccccccccccaaggcccagagcgtgagccccgtgcaggcccccccccccggcggcagcgcccagctgctgcccggcaaggtgctggtgcccctggccgcccccagcatgagcgtgagaggcggcggcgccggccagcccctgcccctggtgagcccccccttcagcgtgcccgtgcagaacggcgcccagccccccagcaagatcatccagctgacccccgtgcccgtgagcacccccagcggcctggtgccccccctgagccccgccaccctgcccggccccaccagccagccccagaaggtgctgctgcccagcagcaccagaatcacctacgtgcagagcgccggcggccacgccctgcccctgggcaccagccccgccagcagccaggccggcaccgtgaccagctacggccccaccagcagcgtggccctgggcttcaccagcctgggccccagcggccccgccttcgtgcagcccctgctgagcgccggccaggcccccctgctggcccccggccaggtgggcgtgagccccgtgcccagcccccagctgccccccgcctgcgccgcccccggcggccccgtgatcaccgccttctacagcggcagccccgcccccaccagcagcgcccccctggcccagcccagccaggccccccccagcctggtgtacaccgtggccaccagcaccaccccccccgccgccaccatcctgcccaagggcccccccgcccccgccaccgccacccccgcccccaccagccccttccccagcgccaccgccggcagcatgacctacagcctggtggcccccaaggcccagagacccagccccaaggccccccagaaggtgaaggccgccatcgccagcatccccgtgggcagcttcgaggccggcgccagcggcagacccggccccgcccccagacagcccctggagcccggccccgtgagagagcccaccgcccccgagagcgagctggagggccagcccaccccccccgcccccccccccctgcccgagacctggacccccaccgccagaagcagcccccccctgcccccccccgccgaggagagaaccagcgccaagggccccgagaccatggccagcaagttccccagcagcagcagcgactggagagtgcccggccagggcctggagaacagaggcgagccccccaccccccccagccccgcccccgcccccgccgtggcccccggcggcagcagcgagagcagcagcggcagagccgccggcgacacccccgagagaaaggaggccgccggcaccggcaagaaggtgaaggtgagacccccccccctgaagaagaccttcgacagcgtggacaacagagtgctgagcgaggtggacttcgaggagagattcgccgagctgcccgagttcagacccgaggaggtgctgcccagccccaccctgcagagcctggccaccagccccagagccatcctgggcagctacagaaagaagagaaagaacagcaccgacctggacagcgcccccgaggaccccaccagccccaagagaaagatgagaagaagaagcagctgcagcagcgagcccaacacccccaagagcgccaagtgcgagggcgacatcttcaccttcgacagaaccggcaccgaggccgaggacgtgctgggcgagctggagtacgacaaggtgccctacagcagcctgagaagaaccctggaccagagaagagccctggtgatgcagctgttccaggaccacggcttcttccccagcgcccaggccaccgccgccttccaggccagatacgccgacatcttccccagcaaggtgtgcctgcagctgaagatcagagaggtgagacagaagatcatgcaggccgccacccccaccgagcagccccccggcgccgaggcccccctgcccgtgcccccccccaccggcaccgccgccgcccccgcccccacccccagccccgccggcggccccgaccccaccagccccagcagcgacagcggcaccgcccaggccgccccccccctgccccccccccccgagagcggccccggccagcccggctgggagggcgccccccagcccagcccccccccccccggccccagcaccgccgccaccggcagatag

SEQ ID NO: 184588 - protein, 434 aa, Artificial Sequence
  derived and/or modified sequence
MAATDIARQVGEGCRTVPLAGHVGFDSLPDQLVNKSVSQGFCFNILCVGETGLGKSTLMDTLFNTKFEGEPATHTQPGVQLQSNTYDLQESNVRLKLTIVSTVGFGDQINKEDSYKPIVEFIDAQFEAYLQEELKIRRVLHTYHDSRIHVCLYFIAPTGHSLKSLDLVTMKKLDSKVNIIPIIAKADAISKSELTKFKIKITSELVSNGVQIYQFPTDDESVAEINGTMNAHLPFAVIGSTEELKIGNKMMRARQYPWGTVQVENEAHCDFVKLREMLIRVNMEDLREQTHTRHYELYRRCKLEEMGFKDTDPDSKPFSLQETYEAKRNEFLGELQKKEEEMRQMFVQRVKEKEAELKEAEKELHEKFDRLKKLHQDEKKKLEDKKKSLDDEVNAFKQRKTAAELLQSQGSQAGGSQTLKRDKEKKNNPWLCTE

SEQ ID NO: 184589 - DNA, 1305 bp, Artificial Sequence
  derived and/or modified sequence
atggccgccacggacatcgctcgccaggttggagaagggtgccgaactgtcccactggctggccacgtcggctttgattccctacctgaccagctagtgaataaaagcgtcagccagggcttttgcttcaatattctctgcgtgggggagaccggactgggaaagagcacactcatggacaccctgttcaacaccaaattcgaaggagagcccgcaacgcacacccagccaggcgtgcagttgcagagtaatacatacgaccttcaagagagcaacgttcgccttaaattgacgatagtgtctactgtcggcttcggtgatcagatcaataaagaggactcatataagccaattgtcgaatttatcgatgcgcagtttgaagcatatctccaggaggaattaaaaatccggcgggtcttgcatacttaccacgattcccgcatccatgtctgcctctattttatcgcccctacagggcatagccttaagagtctggatctggtcactatgaagaagctggattccaaagttaatattatcccaattatcgctaaggcagacgctatctccaagtcagagctcaccaagttcaagattaagattacttccgaattggttagcaatggggtacaaatttaccagttcccgacagatgatgagtctgtagcagagatcaacggaacaatgaatgcccaccttccattcgctgttatcggctctaccgaagagctgaaaattgggaataagatgatgagagcccgccaatatccttgggggaccgtgcaggtggagaacgaagctcattgcgatttcgtgaagttacgggaaatgctgattcgggtaaatatggaggacttgagggagcaaactcacacccgtcattacgagctgtaccggcgctgtaaattggaagagatgggctttaaggacacagacccggattctaagcctttcagccttcaggagacttacgaggccaagcgaaatgagtttttgggagaactgcagaaaaaggaggaggaaatgcgacaaatgtttgtccagagagtcaaggaaaaagaggccgagctgaaagaggcagaaaaggagcttcacgagaaattcgacaggctcaaaaagctgcatcaggacgagaagaagaagctcgaagacaagaaaaaatcgttagatgacgaggttaatgcgttcaagcaaagaaagactgcggctgagctcctccagtcacaaggtagccaggctggaggtagccagacactgaaacgcgacaaggaaaagaaaaataatccttggttgtgcaccgaatag

SEQ ID NO: 184590 - DNA, 1305 bp, Artificial Sequence
  derived and/or modified sequence
atggccgccacagacatcgcccggcaggtgggggagggctgcaggacagtgcccctggccggccacgtgggctttgacagcctgcctgaccagctggtgaacaagtctgtgtcccagggcttctgcttcaacatcctgtgtgtgggggagaccggcctgggcaagagcaccctgatggacaccctcttcaacaccaagtttgaaggagagcccgccacccacacccagcccggggtgcagctgcagagcaacacctatgacctgcaggagagcaatgtgcggctgaagctgaccatcgtgtccacagtgggctttggagaccagatcaacaaggaggacagctacaagcccatcgtggagttcattgatgcccagtttgaggcctacctgcaggaggagctgaagatcagaagagtgctgcacacctaccatgacagccgcatccacgtgtgcctgtacttcatcgcccccaccggccacagcctgaagagcctggacctggtgaccatgaagaagctggacagcaaggtgaacatcatccccatcatcgccaaggcagatgccatcagcaagtctgagctgaccaagttcaagatcaagatcaccagcgagctggtgtccaatggagtgcagatctaccagttccccacagatgatgaatctgtggccgagatcaatggcaccatgaatgcccacctgccctttgctgtgattggcagcacagaggagctgaagattggcaacaagatgatgagggcccggcagtacccctggggcaccgtgcaggtggagaatgaggcccactgtgactttgtgaagctgcgggagatgctgatccgggtgaacatggaggacctgcgggagcagacccacaccaggcactatgagctgtaccgccgctgcaagctggaggagatgggcttcaaggacacagatcctgacagcaagcccttcagcctgcaggagacctatgaggccaagagaaatgagttcctgggggagctgcagaagaaggaggaggagatgaggcagatgtttgtgcagagggtgaaggagaaggaggccgagctgaaggaggccgagaaggagctgcacgagaagtttgaccggctgaagaagctgcaccaggatgagaagaagaagctggaggacaagaagaagagcctggatgatgaggtgaatgccttcaagcagaggaagacagctgctgagctgctgcagagccagggcagccaggccggcggcagccagaccctgaagagggacaaggagaagaagaacaacccctggctgtgcacagaatag

SEQ ID NO: 184591 - DNA, 1305 bp, Artificial Sequence
  derived and/or modified sequence
atggccgccaccgacatcgcccggcaggtgggcgagggctgccggaccgtgccactcgctggacacgtcggttttgactctctaccagaccaactggtgaataagagcgtgtcacagggattctgtttcaatatattatgcgtgggcgaaacaggcctgggaaaatccacattgatggataccttgttcaacactaagttcgagggcgaacctgctactcacactcagccaggtgtgcaactgcagagcaacacatatgatcttcaagaatctaacgttagactcaaactgaccatcgtcagcacagtcggattcggagatcaaatcaataaagaggattcatataaacccattgttgaattcattgacgcccagtttgaagcctatctacaggaagagctgaaaattcggcgggtgttgcatacttatcatgactctagaattcatgtgtgcctttacttcattgcaccgacgggccattctctcaagtcattggatcttgttaccatgaaaaagctggattcaaaagtgaatattattcctattattgcaaaagccgatgccatttctaagtctgagctgacgaagttcaaaatcaagatcacatccgagttagtgtctaatggcgtccaaatctatcagtttccaaccgatgacgaaagcgtggctgagataaacggcaccatgaatgctcatctgcctttcgccgtgatcggctccacagaagaacttaagattgggaacaagatgatgagggcaaggcagtacccttggggcacagtccaggtagagaacgaagcccactgtgactttgttaaattgcgggaaatgcttataagagtgaacatggaagacctgagggagcagacccatacgcggcactacgagctgtatcggcgctgcaagctggaggagatgggatttaaggacaccgacccggacagtaagccgttctccttgcaggagacctacgaagccaaacggaatgagttcttaggcgaactgcagaagaaagaggaggaaatgagacagatgtttgttcaaagggttaaggagaaagaagctgaacttaaggaggctgagaaagagttgcatgagaaatttgaccgcctcaagaaacttcaccaggatgagaagaagaagctggaggacaaaaagaaatccctggacgacgaggtcaatgccttcaaacaaaggaagacggcagcggaactgctgcagagtcagggcagtcaggctggtggctcccagaccctgaaacgcgacaaggagaagaagaataatccatggctgtgtactgagtag

SEQ ID NO: 184592 - DNA, 1305 bp, Artificial Sequence
  derived and/or modified sequence
atggcagccactgacattgcccgtcaagttggggaagggtgccggaccgttcccctcgctggacacgtcggctttgattcgttgcccgatcaattggtgaataaatcagtcagccaaggtttttgctttaacattctgtgcgtcggagagactggcctgggaaagagtacactcatggataccctgttcaacaccaaatttgaaggagagccggcaactcatactcaaccaggcgtccaactgcagtccaatacctacgacctgcaggagtcaaacgtacggctgaaactcaccattgtgagcactgtaggtttcggggatcagattaataaggaggactcctacaagccaattgtcgagttcattgatgcgcaatttgaggcctacctgcaggaggagctgaagatccgacgcgtactgcatacatatcacgacagtcggattcacgtttgtctatatttcatagcccctaccggccatagccttaagagtctcgacttagtgacaatgaaaaagttggattcaaaggtgaatattattcctattatagccaaagcagatgcgatttctaagtctgagctaaccaagtttaaaataaagataacatctgaactagtgagtaatggtgttcaaatctaccagtttcccactgatgatgaatctgttgccgagattaatggtaccatgaatgctcatttgccctttgccgtgattgggtctactgaggaactgaaaatcggcaataagatgatgcgggcaaggcagtacccctggggcaccgttcaggttgaaaacgaggctcactgtgatttcgttaaactgcgggagatgcttatccgggtgaatatggaagatcttagggaacagactcacactcggcattacgaactttaccgcagatgcaaattggaggaaatggggtttaaggacactgacccagactctaaaccattttctctgcaagagacatacgaagccaaacgcaacgaattcctgggcgagttgcagaaaaaagaggaagagatgcgccagatgttcgttcagcgggtgaaggaaaaggaggccgaattaaaagaggctgaaaaggagctgcacgagaagttcgaccggctgaaaaaactccatcaagacgagaagaaaaagctagaggacaagaagaagtctctggatgatgaggtgaacgctttcaagcagcgcaagaccgcagctgagctcctgcagagccaggggagccaagctggcggaagccagacactgaaaagggacaaggaaaaaaaaaacaatccatggctatgtacagaatag

SEQ ID NO: 184593 - DNA, 2693 bp, Artificial Sequence
  derived and/or modified sequence
gaagaactggaactggtctggccatagggggaagcggcgcgttaaatccgccccctctccataccctactttcaaggggtgggcggtagaggggaggttggggttggagcagcggcgagggggcccctcccttgcacctccccccaccggacttggtcgcgcccgaagtgtaacactttctctttgtcggaggagctcctctgtttcctgtgcagtagctcccgttgcggcggcacccgtggcagccctggcggacgcaggagcgatggcagcgaccgatatagctcgccaggtgggtgaaggttgccgaactgtccccctggctggacatgtggggtttgacagcttgcctgaccagctggtgaataagtccgtcagccagggcttctgcttcaacatcctgtgcgtgggagagacaggtttgggcaagtccaccctcatggacaccctgttcaacaccaaattcgaaggggagccagccacccacacacagccgggtgtccagctccagtctaatacctatgacctccaagagagcaacgtgaggctaaagctcacgatcgttagcacagttggctttggggaccagatcaacaaagaggacagctacaagcctatcgtggaattcatcgatgcacaattcgaggcctacctgcaggaagagctaaagatccgaagagtgctacacacctaccatgactcccgaatccatgtctgcttgtatttcattgcccccacgggtcattccctgaagtctctggacctagtgactatgaagaagctggacagtaaggtgaacatcatccccatcattgccaaagcagatgccatttcgaagagtgagctaacaaagttcaaaatcaaaatcaccagcgagcttgtcagcaacggagtccagatctatcagtttcctacagatgatgagtcggtggcagagatcaatggaaccatgaacgcccacctgccgtttgctgtcattggcagcacagaagaactgaagataggcaacaagatgatgagggcgcggcagtatccttggggcactgtgcaggttgaaaacgaggcccactgcgactttgtgaagctgcgggagatgctgattcgggtcaacatggaggatctgcgggagcagacccacacccggcactatgagctgtatcgccgctgtaagctggaggagatgggcttcaaggacaccgaccctgacagcaaacccttcagtttacaggagacatatgaggccaaaaggaacgagttcctaggggaactccagaaaaaagaagaggagatgagacagatgttcgtccagcgagtcaaagagaaagaagcggagctcaaagaggcagagaaagagctgcacgagaagtttgaccgtctgaagaaactgcaccaggacgagaagaagaaactggaggataagaagaaatccctggatgatgaagtgaatgctttcaagcaaagaaagacggcggctgagctgctccagtcccagggctcccaggctggaggctcacagactctgaagagagacaaagagaagaaaaataatccatggctgtgtactgaatagtattccccgctacagctggactggactccatttagccttttaagccgaggttcctattttaactgacagctttcctttggggtgccaggcagcgaggccccccacccctatcctgccatgtacttcaagctcacttcttctttttgagttccgcaacttgctcctgcctcccagccccactggcactgaccatgaccacctacttctattttttttttagagtttctttttttgatcacttactttcaaagcacacagtcaaacaaggttatgccaaatttccaggcctttttgaagtattgagaaggggaaggggatttctcacttcaattatagatcataataggaagcaaaaagaaaaaaatgaaaagcaaacatatgcacgcacttttcttgttgacaaagcaagaatataggtttgctgtgtaggtttggtgctctattgattggtgagtgaccagagcaagtatgaaggtgatgctgccaaagcacaagccagtttcttgggaaaattcaagttacagtggagtatttttttgaagaccatatgcttggaggtagaaacaaaccaacgaccaaaaaaaaaaaaaaaaaaatctgctcagatactcagccagtagctcagagagatgctgagttaggcctgtcaggtctccttgggaaaggcttcatatttgcaactttgatgattctatgtccagcttcagagctgctttcccagaaattcacgcttaaacaaccaaccggtaaccaccacttccccacaccgccgcccggtaattatttgcattacaaaccggaggcgccctcatttgcatttgtgtacagattaactagttaaggcttgagaagctctgaataattcaaaagtattagacccacacagccttggagagaccttcagaaactaaggaggagttttatattaagggagacattttagtcagtaagacgatataacctacttactccgtaaggggaaatgaaggcccagagaagggaagggacttgaccgaggtcccacttctgtttcgaggcagaagccagactaattttcatgcctcctgactcccaatcagtttcacaaagggattcaatctgtttatatacgttacattcctgg

SEQ ID NO: 184594 - DNA, 1305 bp, Artificial Sequence
  derived and/or modified sequence
atggccgccaccgacatcgccagacaggtgggcgagggctgcagaaccgtgcccctggccggccacgtgggcttcgacagcctgcccgaccagctggtgaacaagagcgtgagccagggcttctgcttcaacatcctgtgcgtgggcgagaccggcctgggcaagagcaccctgatggacaccctgttcaacaccaagttcgagggcgagcccgccacccacacccagcccggcgtgcagctgcagagcaacacctacgacctgcaggagagcaacgtgagactgaagctgaccatcgtgagcaccgtgggcttcggcgaccagatcaacaaggaggacagctacaagcccatcgtggagttcatcgacgcccagttcgaggcctacctgcaggaggagctgaagatcagaagagtgctgcacacctaccacgacagcagaatccacgtgtgcctgtacttcatcgcccccaccggccacagcctgaagagcctggacctggtgaccatgaagaagctggacagcaaggtgaacatcatccccatcatcgccaaggccgacgccatcagcaagagcgagctgaccaagttcaagatcaagatcaccagcgagctggtgagcaacggcgtgcagatctaccagttccccaccgacgacgagagcgtggccgagatcaacggcaccatgaacgcccacctgcccttcgccgtgatcggcagcaccgaggagctgaagatcggcaacaagatgatgagagccagacagtacccctggggcaccgtgcaggtggagaacgaggcccactgcgacttcgtgaagctgagagagatgctgatcagagtgaacatggaggacctgagagagcagacccacaccagacactacgagctgtacagaagatgcaagctggaggagatgggcttcaaggacaccgaccccgacagcaagcccttcagcctgcaggagacctacgaggccaagagaaacgagttcctgggcgagctgcagaagaaggaggaggagatgagacagatgttcgtgcagagagtgaaggagaaggaggccgagctgaaggaggccgagaaggagctgcacgagaagttcgacagactgaagaagctgcaccaggacgagaagaagaagctggaggacaagaagaagagcctggacgacgaggtgaacgccttcaagcagagaaagaccgccgccgagctgctgcagagccagggcagccaggccggcggcagccagaccctgaagagagacaaggagaagaagaacaacccctggctgtgcaccgagtag

SEQ ID NO: 184595 - protein, 1266 aa, Artificial Sequence
  derived and/or modified sequence
MWVNPEEVLLANALWITERANPYFILQRRKGHAGDGGGGGGLAGLLVGTLDVVLDSSARVAPYRILYQTPDSLVYWTIACGGSRKEITEHWEWLEQNLLQTLSIFENENDITTFVRGKIQGIIAEYNKINDVKEDDDTEKFKEAIVKFHRLFGMPEEEKLVNYYSCSYWKGKVPRQGWMYLSINHLCFYSFLMGREAKLVIRWVDITQLEKNATLLLPDVIKVSTRSSEHFFSVFLNINETFKLMEQLANIAMRQLLDNEGFEQDRSLPKLKRKSPKKVSALKRDLDARAKSERYRALFRLPKDEKLDGHTDCTLWTPFNKMHILGQMFVSTNYICFTSKEENLCSLIIPLREVTIVEKADSSSVLPSPLSISTRNRMTFLFANLKDRDFLVQRISDFLQQTTSKIYSDKEFAGSYNSSDDEVYSRPSSLVSSSPQRSTSSDADGERQFNLNGNSVPTATQTLMTMYRRRSPEEFNPKLAKEFLKEQAWKIHFAEYGQGICMYRTEKTRELVLKGIPESMRGELWLLLSGAINEKATHPGYYEDLVEKSMGKYNLATEEIERDLHRSLPEHPAFQNEMGIAALRRVLTAYAFRNPNIGYCQAMNIVTSVLLLYAKEEEAFWLLVALCERMLPDYYNTRVVGALVDQGVFEELARDYVPQLYDCMQDLGVISTISLSWFLTLFLSVMPFESAVVVVDCFFYEGIKVIFQLALAVLDANVDKLLNCKDDGEAMTVLGRYLDSVTNKDSTLPPIPHLHSLLSDDVEPYPEVDIFRLIRTSYEKFGTIRADLIEQMRFKQRLKVIQTLEDTTKRNVVRTIVTETSFTIDELEELYALFKAEHLTSCYWGGSSNALDRHDPSLPYLEQYRIDFEQFKGMFALLFPWACGTHSDVLASRLFQLLDENGDSLINFREFVSGLSAACHGDLTEKLKLLYKMHVLPEPSSDQDEPDSAFEATQYFFEDITPECTHVVGLDSRSKQGADDGFVTVSLKPDKGKRANSQENRNYLRLWTPENKSKSKNAKDLPKLNQGQFIELCKTMYNMFSEDPNEQELYHATAAVTSLLLEIGEVGKLFVAQPAKEGGSGGSGPSCHQGIPGVLFPKKGPGQPYVVESVEPLPASLAPDSEEHSLGGQMEDIKLEDSSPRDNGACSSMLISDDDTKDDSSMSSYSVLSAGSHEEDKLHCEDIGEDTVLVRSGQGTAALPRSTSLDRDWAITFEQFLASLLTEPALVKYFDKPVCMMARITSAKNIRMMGKPLTSASDYEISAMSG

SEQ ID NO: 184596 - DNA, 3801 bp, Artificial Sequence
  derived and/or modified sequence
atgtgggtgaaccccgaggaggtgctgctggccaacgccctgtggatcaccgagagagccaacccctacttcatcctgcagagaagaaagggccacgccggcgacggcggcggcggcggcggcctggccggcctgctggtgggcaccctggacgtggtgctggacagcagcgccagagtggccccctacagaatcctgtaccagacccccgacagcctggtgtactggaccatcgcctgcggcggcagcagaaaggagatcaccgagcactgggagtggctggagcagaacctgctgcagaccctgagcatcttcgagaacgagaacgacatcaccaccttcgtgagaggcaagatccagggcatcatcgccgagtacaacaagatcaacgacgtgaaggaggacgacgacaccgagaagttcaaggaggccatcgtgaagttccacagactgttcggcatgcccgaggaggagaagctggtgaactactacagctgcagctactggaagggcaaggtgcccagacagggctggatgtacctgagcatcaaccacctgtgcttctacagcttcctgatgggcagagaggccaagctggtgatcagatgggtggacatcacccagctggagaagaacgccaccctgctgctgcccgacgtgatcaaggtgagcaccagaagcagcgagcacttcttcagcgtgttcctgaacatcaacgagaccttcaagctgatggagcagctggccaacatcgccatgagacagctgctggacaacgagggcttcgagcaggacagaagcctgcccaagctgaagagaaagagccccaagaaggtgagcgccctgaagagagacctggacgccagagccaagagcgagagatacagagccctgttcagactgcccaaggacgagaagctggacggccacaccgactgcaccctgtggacccccttcaacaagatgcacatcctgggccagatgttcgtgagcaccaactacatctgcttcaccagcaaggaggagaacctgtgcagcctgatcatccccctgagagaggtgaccatcgtggagaaggccgacagcagcagcgtgctgcccagccccctgagcatcagcaccagaaacagaatgaccttcctgttcgccaacctgaaggacagagacttcctggtgcagagaatcagcgacttcctgcagcagaccaccagcaagatctacagcgacaaggagttcgccggcagctacaacagcagcgacgacgaggtgtacagcagacccagcagcctggtgagcagcagcccccagagaagcaccagcagcgacgccgacggcgagagacagttcaacctgaacggcaacagcgtgcccaccgccacccagaccctgatgaccatgtacagaagaagaagccccgaggagttcaaccccaagctggccaaggagttcctgaaggagcaggcctggaagatccacttcgccgagtacggccagggcatctgcatgtacagaaccgagaagaccagagagctggtgctgaagggcatccccgagagcatgagaggcgagctgtggctgctgctgagcggcgccatcaacgagaaggccacccaccccggctactacgaggacctggtggagaagagcatgggcaagtacaacctggccaccgaggagatcgagagagacctgcacagaagcctgcccgagcaccccgccttccagaacgagatgggcatcgccgccctgagaagagtgctgaccgcctacgccttcagaaaccccaacatcggctactgccaggccatgaacatcgtgaccagcgtgctgctgctgtacgccaaggaggaggaggccttctggctgctggtggccctgtgcgagagaatgctgcccgactactacaacaccagagtggtgggcgccctggtggaccagggcgtgttcgaggagctggccagagactacgtgccccagctgtacgactgcatgcaggacctgggcgtgatcagcaccatcagcctgagctggttcctgaccctgttcctgagcgtgatgcccttcgagagcgccgtggtggtggtggactgcttcttctacgagggcatcaaggtgatcttccagctggccctggccgtgctggacgccaacgtggacaagctgctgaactgcaaggacgacggcgaggccatgaccgtgctgggcagatacctggacagcgtgaccaacaaggacagcaccctgccccccatcccccacctgcacagcctgctgagcgacgacgtggagccctaccccgaggtggacatcttcagactgatcagaaccagctacgagaagttcggcaccatcagagccgacctgatcgagcagatgagattcaagcagagactgaaggtgatccagaccctggaggacaccaccaagagaaacgtggtgagaaccatcgtgaccgagaccagcttcaccatcgacgagctggaggagctgtacgccctgttcaaggccgagcacctgaccagctgctactggggcggcagcagcaacgccctggacagacacgaccccagcctgccctacctggagcagtacagaatcgacttcgagcagttcaagggcatgttcgccctgctgttcccctgggcctgcggcacccacagcgacgtgctggccagcagactgttccagctgctggacgagaacggcgacagcctgatcaacttcagagagttcgtgagcggcctgagcgccgcctgccacggcgacctgaccgagaagctgaagctgctgtacaagatgcacgtgctgcccgagcccagcagcgaccaggacgagcccgacagcgccttcgaggccacccagtacttcttcgaggacatcacccccgagtgcacccacgtggtgggcctggacagcagaagcaagcagggcgccgacgacggcttcgtgaccgtgagcctgaagcccgacaagggcaagagagccaacagccaggagaacagaaactacctgagactgtggacccccgagaacaagagcaagagcaagaacgccaaggacctgcccaagctgaaccagggccagttcatcgagctgtgcaagaccatgtacaacatgttcagcgaggaccccaacgagcaggagctgtaccacgccaccgccgccgtgaccagcctgctgctggagatcggcgaggtgggcaagctgttcgtggcccagcccgccaaggagggcggcagcggcggcagcggccccagctgccaccagggcatccccggcgtgctgttccccaagaagggccccggccagccctacgtggtggagagcgtggagcccctgcccgccagcctggcccccgacagcgaggagcacagcctgggcggccagatggaggacatcaagctggaggacagcagccccagagacaacggcgcctgcagcagcatgctgatcagcgacgacgacaccaaggacgacagcagcatgagcagctacagcgtgctgagcgccggcagccacgaggaggacaagctgcactgcgaggacatcggcgaggacaccgtgctggtgagaagcggccagggcaccgccgccctgcccagaagcaccagcctggacagagactgggccatcaccttcgagcagttcctggccagcctgctgaccgagcccgccctggtgaagtacttcgacaagcccgtgtgcatgatggccagaatcaccagcgccaagaacatcagaatgatgggcaagcccctgaccagcgccagcgactacgagatcagcgccatgagcggctag

SEQ ID NO: 184597 - DNA, 3801 bp, Artificial Sequence
  derived and/or modified sequence
atgtgggtgaatccggaggaagtcctactggctaatgcgttgtggataaccgagcgcgccaacccatacttcattctccagcggagaaagggccacgctggggacggaggcggggggggggggttggccggcctgctagtgggtaccctggacgttgtgctggactctagcgctcgggtggctccctacagaatcttatatcaaaccccagattcactggtctattggactatcgcctgcggtggctcaagaaaagaaatcaccgaacactgggagtggttggagcagaacctgctccaaactttgtcgatctttgaaaacgaaaacgatattacaacgttcgtgcgcggcaagatacaagggatcatagccgagtataacaaaataaacgatgtgaaagaggatgacgacacagaaaagtttaaggaggcaatcgtaaaattccatagactcttcgggatgccagaggaagaaaagctcgtaaactattacagctgcagctattggaaggggaaagtacccaggcagggttggatgtacctgtctattaatcatctctgcttctactcatttctcatgggccgagaggccaagctcgtgatcagatgggttgatattacacagcttgaaaaaaacgcgacactactcctccccgacgttattaaagtgagtaccaggtcatctgagcacttcttttctgtgtttctgaatataaacgaaactttcaaactgatggagcaactggctaatattgccatgcgccaactgctggataacgaagggtttgagcaggatcgctctcttccaaaattaaagcgcaagagccccaagaaggtgtcggccctgaagcgcgacctggatgctcgagctaaaagcgaacgctaccgggcactgttcaggctccctaaggatgagaagctggatgggcatacagactgcacgctgtggacgcccttcaacaagatgcacatactcggacagatgtttgtgtcgacgaattacatctgtttcaccagcaaagaggaaaacctgtgtagtctgatcatccctctgcgggaggtgacaattgtggagaaggcagattcctctagtgtgctgccttctccgctctcaattagcacgagaaaccggatgaccttcttgttcgccaacctgaaagatcgcgatttccttgtccagaggataagtgattttctgcaacaaacaacttccaaaatatactccgacaaggagttcgccggttcatataattcctctgatgatgaagtatacagccgtccttctagcttagtcagttcctcacctcagaggtccactagctctgacgccgacggcgagcgtcaattcaatctgaacggtaacagcgttcctaccgcgacgcagacgttaatgaccatgtatagacggagaagtccagaggagttcaatcccaaacttgccaaagaattcctaaaagagcaagcctggaagattcattttgccgaatatgggcaggggatttgcatgtacaggactgaaaaaacccgagagctcgttcttaaaggcattcccgaaagcatgagaggtgagctctggttattgctttcaggggccatcaatgaaaaagccacacatcccgggtactatgaggacctggttgaaaaatccatgggcaagtacaatctcgcgactgaagaaattgaaagagacttgcacaggtcactgcctgagcatcccgcgtttcagaatgaaatggggattgcagccctcagacgagtcctgacggcatatgccttcagaaacccaaatatcgggtactgtcaagccatgaacattgtgacaagcgtgctgctgctctatgcgaaagaagaggaggccttctggcttctggtggcgctttgtgaaagaatgctgccggactattacaacacacgggttgttggcgcactcgtggaccagggagttttcgaagaattggcacgggactacgtgccccagctgtacgattgtatgcaggacctgggggtgatcagtaccataagcctgagctggtttctgaccttattcttgtctgtgatgccctttgaatccgcggtggtggtggtcgattgctttttctacgagggcattaaagtcatcttccagctggcactcgcggttctggatgcgaacgtggataagctgcttaattgtaaggacgacggggaagccatgaccgtcctgggtcgctatctcgattctgtaacgaataaggacagtacgcttccacccatcccccatctgcattcactgctttccgatgacgtcgagccctatcccgaagtagacatattcagattgattcgcacctcgtacgagaagttcggcacgataagggccgatctgattgaacagatgcggttcaagcagaggcttaaggtcatacagactcttgaagatacgacaaagaggaatgtggtaagaacaatagtaaccgaaacctcattcaccattgacgagctcgaggagctctacgccctgtttaaggccgaacacttgaccagctgctattggggcggcagctcaaacgccttggatcggcatgaccctagtttgccatatttggagcagtacagaatcgactttgaacagtttaagggaatgttcgcattgttatttccgtgggcttgcggtacccactcagacgtgctggcctcccgcctcttccagctgctggatgagaacggcgacagtctgattaattttcgggaattcgtctcaggcctgagtgctgcttgtcacggcgatctcaccgagaaactgaagctcctttataagatgcacgtgctccctgaaccatcatccgatcaggacgaacccgattcagcattcgaagctactcaatattttttcgaagacattacccccgagtgtactcatgtggtcggtttagacagtagatctaagcagggggcagacgatgggttcgtcactgtctctctcaagcccgataaggggaaacgggcaaactcccaggagaatcgaaattacctgcggttgtggacgcctgaaaacaagagcaagagcaagaatgcaaaggacctgccaaaattaaatcagggccagttcatcgagctgtgtaagaccatgtacaacatgttctctgaagatcctaacgagcaagagttgtatcacgctactgccgctgttactagcctgctgctcgaaatcggcgaggtggggaagctgttcgtggctcagcccgccaaggaaggtggcagcggaggctcagggccatcttgccaccagggaataccaggagtgcttttccctaagaagggtccgggccagccttacgtcgttgaaagcgtggaacccttgcctgcctctctggcacctgactcagaggaacattcccttgggggccagatggaggatataaagttggaagactcatcccctcgggataatggggcatgctcatccatgctaattagtgacgacgataccaaagacgactcctctatgtcaagttattccgtcctgtccgctggatcacatgaagaggacaagctgcactgtgaggatattggagaagacacagtcctggtccgtagtggccaggggacagccgcactcccgcgatccacgagcctggacagggactgggcaatcactttcgaacagttcctcgcctctcttttaacagaaccggcactggtgaaatactttgacaagccagtgtgcatgatggcccggatcacatccgccaagaacatcaggatgatgggaaagcccctcacctccgcatcggactatgaaatcagcgctatgtctggctag

SEQ ID NO: 184598 - DNA, 3801 bp, Artificial Sequence
  derived and/or modified sequence
atgtgggtgaaccctgaggaggtgctgctggccaatgccctgtggatcacagagcgggccaacccctacttcatcctgcagaggaggaagggccatgctggagatggcggcggcggcggcggcctggccggcctgctggtgggcaccctggatgtggtgctggacagcagcgcccgggtggccccctaccgcatcctgtaccagaccccagacagcctggtgtactggaccatcgcctgtggcggcagcaggaaggagatcacagagcactgggagtggctggagcagaacctgctgcagaccctgagcatctttgaaaatgaaaatgacatcaccacctttgtgcggggcaagatccagggcatcatcgccgagtacaacaagatcaatgatgtgaaggaggatgatgacacagagaagttcaaggaggccatcgtgaagttccaccggctgtttggcatgcctgaggaggagaagctggtgaactactacagctgcagctactggaagggcaaggtgccccggcagggctggatgtacctgagcatcaaccacctgtgcttctacagcttcctgatgggccgggaggccaagctggtgatccgctgggtggacatcacccagctggagaagaatgccaccctgctgctgcctgatgtgatcaaggtgtccaccaggagcagcgagcacttcttctctgtgttcctgaacatcaatgagaccttcaagctgatggagcagctggccaacatcgccatgaggcagctgctggacaatgaaggatttgagcaggacaggagcctgcccaagctgaagaggaagagccccaagaaggtgtctgccctgaagagggacctggatgcccgggccaagtctgagcgctaccgggccctcttccggctgcccaaggatgagaagctggatggccacacagactgcaccctgtggacccccttcaacaagatgcacatcctgggccagatgtttgtgtccaccaactacatctgcttcaccagcaaggaggagaacctgtgcagcctcatcatccccctgcgggaggtgaccatcgtggagaaggctgacagcagctctgtgctgcccagccccctgagcatcagcaccaggaacaggatgaccttcctgtttgccaacctgaaggaccgggacttcctggtgcagaggatcagtgacttcctgcagcagaccaccagcaagatctacagcgacaaggagtttgctggcagctacaacagcagtgatgatgaggtgtacagccggcccagcagcctggtgagcagcagcccccagaggagcaccagcagtgatgctgatggagagcggcagttcaacctgaatggaaattctgtgcccacagccacccagaccctgatgaccatgtacagaagaagaagccctgaggagttcaaccccaagctggccaaggagttcctgaaggagcaggcctggaagatccactttgctgaatatggccagggcatctgcatgtacagaacagagaagacccgggagctggtgctgaagggcatccctgagagcatgagaggagagctgtggctgctgctgagcggggccatcaatgagaaggccacccaccctggctactatgaggacctggtggagaagtccatgggcaagtacaacctggccacagaggagattgaaagagacctgcacaggagcctgcctgagcacccagccttccagaatgagatgggcattgctgccctgcggcgggtgctgacagcctatgccttcaggaaccccaacatcggctactgccaggccatgaacatcgtgacctctgtgctgctgctgtatgccaaggaggaggaggccttctggctgctggtggccctgtgtgagaggatgctgcctgactactacaacaccagggtggtgggcgccctggtggaccagggcgtgtttgaggagctggcccgggactatgtgccccagctgtatgactgcatgcaggacctgggcgtcatcagcaccatcagcctgtcctggttcctgaccctcttcctgtctgtgatgccctttgagagcgctgtggtggtggtggactgcttcttctatgagggcatcaaggtgatcttccagctggccctggccgtgctggatgccaacgtggacaagctgctgaactgcaaggatgatggagaggccatgacagtgctgggccgctacctggacagcgtgaccaacaaggacagcaccctgccccccatcccccacctgcacagcctgctgagtgatgatgtggagccctacccagaggtggacatcttccgcctcatccgcaccagctatgagaagtttggcaccatccgggctgacctgattgagcagatgaggttcaagcagaggctgaaggtgatccagaccctggaggacaccaccaagagaaatgtggtgaggaccatcgtgacagagaccagcttcaccattgatgagctggaggagctgtatgccctcttcaaggccgagcacctgaccagctgctactggggcggcagcagcaatgccctggacagacatgaccccagcctgccctacctggagcagtacagaattgactttgagcagttcaagggcatgtttgccctgctcttcccctgggcctgtggcacccacagtgatgtgctggccagccgcctcttccagctgctggatgaaaatggagacagcctcatcaacttccgggagtttgtgtctggcctgtctgctgcctgccacggggacctgacagagaagctgaagctgctgtacaagatgcacgtgctgcctgagcccagcagtgaccaggatgagccagacagcgcctttgaggccacccagtacttctttgaggacatcaccccagaatgtacccacgtggtgggcctggacagccgcagcaagcagggcgcagatgatggctttgtgacagtgtccctgaagccagacaagggcaagagggccaacagccaggagaacagaaactacctgcggctgtggaccccagagaacaagagcaagagcaagaatgccaaggacctgcccaagctgaaccagggccagttcatcgagctgtgcaagaccatgtacaacatgttttctgaggaccccaatgagcaggagctgtaccacgccacagctgctgtgaccagcctgctgctggagattggagaggtgggcaagctgtttgtggcccagcctgccaaggagggcggcagcggcggcagcggccccagctgccaccagggcatccctggggtgctcttccccaagaagggccctggccagccctacgtggtggagagcgtggagcccctgcctgccagcctggccccagattctgaggagcacagcctgggcggccagatggaggacatcaagctggaggacagcagcccccgggacaatggagcctgcagctccatgctgatcagtgatgatgacaccaaggatgacagctccatgagcagctacagcgtgctgtctgctggcagccatgaggaggacaagctgcactgtgaagatattggagaagatactgtgctggtgcgcagcggccagggcacagctgccctgcccaggagcaccagcctggaccgggactgggccatcacctttgagcagttcctggccagcctgctgacagagcccgccctggtgaagtactttgacaagcctgtgtgcatgatggcccgcatcaccagcgccaagaacatccgcatgatgggcaagcccctgaccagcgccagtgactatgagatcagcgccatgtctggatag

SEQ ID NO: 184599 - DNA, 3801 bp, Artificial Sequence
  derived and/or modified sequence
atgtgggtgaaccccgaggaggtgctgctggccaacgccctgtggataactgagcgcgcaaacccatacttcatactccagaggcgaaaagggcatgcgggggatggtggggggggcggcggcctggcaggactgttagtaggcaccctcgatgtcgtgttggattcgtcagcacgtgtggcaccctatagaatcctttaccagacacctgattctctggtgtattggacgatcgcatgtggcgggtcccgaaaggagatcaccgagcattgggaatggctcgaacagaatctcctccagactctgtccatcttcgaaaatgagaatgacatcactacattcgttcggggcaaaattcaagggataattgccgaatacaacaagattaacgacgtcaaagaggatgacgataccgagaaatttaaagaggccatcgtcaaatttcaccgattattcggtatgcccgaggaggaaaagttggtcaactactattcatgctcgtattggaaaggcaaagtgcctagacaaggttggatgtacttgtccattaatcacctttgtttctactccttcctgatggggcgggaggctaagctggtgatccgatgggtggatatcacacagctggagaaaaatgccactttactgctgccagatgttataaaggtatccaccagaagctcggaacattttttttcagttttcctgaatatcaacgagactttcaagctgatggagcaattagcgaacatcgccatgcgccaactgctagataatgaaggtttcgaacaggatcgtagtttgcccaagctaaaacggaaatctcctaagaaagttagcgcgcttaaacgggatcttgatgcaagggctaagagcgaaaggtatagggcactttttaggctgcccaaggatgagaagctggacgggcacaccgattgtactctgtggacacctttcaacaagatgcacatcttgggtcaaatgttcgtcagtactaattatatctgttttaccagcaaggaagaaaacctgtgtagccttataattccattacgcgaggtcacaattgtcgaaaaagccgactcctctagcgttctgccttctcccctcagtattagcacccgcaatcgaatgactttcttattcgcaaacctgaaagacagagatttcttggtccaaagaatttccgactttctgcagcagactacatccaagatctacagtgataaggagttcgccggctcctataactccagcgacgacgaggtgtactcaagaccttcctctctggtctcctctagcccccaaagatcaaccagctctgatgccgatggggagaggcagttcaatctgaatggcaacagcgtgcctacggctacccaaactctgatgacaatgtatcgaaggcggagccctgaggagttcaaccccaaactcgctaaggagttcctaaaagaacaggcctggaagattcatttcgcggagtatggacagggcatctgtatgtacaggactgagaagacacgtgagctggttttgaaaggcatccctgagagtatgcgcggggagctctggttgctgctgtccggagcaattaacgagaaggccacgcatcctggttactacgaggatctggtggaaaaaagcatgggcaagtacaatcttgcgacggaagaaatcgaacgcgatctgcaccggtctcttccagagcatccggctttccaaaatgaaatggggattgcagccctccgacgggtcctgaccgcctacgcgtttaggaatcccaacatcggatattgccaggctatgaatatagtcacttcggtgctcctcctgtatgccaaggaggaagaggccttttggttgctggttgccttatgtgaaaggatgctcccagactactacaacacccgagtggtgggcgcgttagtggaccaaggggtattcgaagaactggctcgagattatgtgccccagctgtatgattgtatgcaagatcttggtgtcatcagtaccatctcattgtcgtggttcttgacactatttcttagcgtaatgcccttcgagagtgctgtggtggtggtggattgctttttctacgagggcattaaggtgattttccagctggctctcgctgttctggacgccaacgtagataaactgctgaactgcaaagatgacggtgaggcaatgactgtactggggcgctacctggacagcgtgaccaataaagactccaccctccctccaatcccccatctacactcgttgttgtccgacgacgtagaaccctaccctgaggttgatatcttccggctgatccgcaccagctacgaaaagttcggcaccatccgcgccgacctgattgaacagatgaggtttaaacagcggctcaaagtaatccagactcttgaagacacaacaaagcgtaatgttgtaagaactattgttactgaaacatcgttcacaatcgacgagctggaggaactttatgctctcttcaaggctgaacacctcacgtcttgttattggggcggctcatccaacgcccttgatcgccatgatccgagtctgccctatttagaacagtaccgaatcgacttcgagcagtttaaggggatgtttgccttgctctttccatgggcatgtggaacacactcagatgtcttagcaagtagattattccaattactcgacgagaacggggacagcttgattaattttcgagagttcgtgagcggccttagcgccgcgtgccacggggatttgaccgagaagctgaagctgctgtataagatgcatgttttacccgaacctagctcagaccaagacgagcctgattcagcttttgaagcaactcagtacttctttgaggacatcacccctgaatgtacccacgtcgtgggtctggatagtaggagtaagcagggagctgacgacggcttcgtaactgtctccctcaaaccggataagggaaaaagggctaactcacaggaaaatagaaactacctgaggctctggacaccagaaaacaaatcaaagtccaagaacgcgaaagacctgcccaaactgaaccaaggtcagttcatcgaactgtgcaagaccatgtacaacatgttctctgaggatcccaacgagcaagagctgtaccatgccacagcagcagtcacatccctgctgctggagatcggcgaagtaggaaaactgttcgtggctcagcccgccaaagaaggcggctctggaggcagtgggccgagctgccaccagggaatccccggcgtcctgttccctaaaaaggggccaggtcagccctacgtggtggaatcagtggaacccttgcctgcatctctggccccagactctgaagaacactccttaggaggtcagatggaagacatcaagctcgaagactctagcccaagggacaacggcgcatgtagctctatgttgatctcagacgacgatactaaggacgatagcagtatgtcttcttattctgttctcagcgccggaagccatgaggaggacaagctccactgtgaggatataggtgaggacaccgtgctggtgcgcagcgggcagggaaccgcagcactcccaagaagcacgtctctcgaccgggactgggctattacttttgagcagtttttagcctccttgctgaccgaaccagcccttgtgaagtatttcgataaacctgtttgtatgatggccagaattaccagcgcgaagaatatacggatgatgggtaagcccctcaccagcgctagcgattacgagatttccgctatgtccgggtag

SEQ ID NO: 184600 - DNA, 3801 bp, Artificial Sequence
  derived and/or modified sequence
atgtgggtgaacccggaggaagttctcctggccaacgcactatggatcacagagcgcgctaacccttattttatcctccagcggagaaagggccacgccggagatgggggtggagggggtggactcgcgggattgctggtggggacacttgatgtggtgctcgatagtagcgcacgcgttgctccctacagaattttatatcagaccccagactccttagtgtactggacgatcgcctgtggaggcagtagaaaagaaattactgaacattgggagtggctggaacagaatctgctgcagactctgtccatctttgaaaatgaaaacgacatcacaaccttcgtgcggggaaaaatccagggcattatagccgaatacaataaaatcaacgacgtcaaagaggacgatgataccgagaaatttaaagaggcaattgtgaagttccaccggctgttcggcatgccagaagaggagaaattggtaaactactactcttgtagctactggaagggaaaggtgcccagacagggatggatgtatctcagcataaaccatctgtgcttctattcttttttaatgggcagagaggccaaactcgttattcggtgggtggacatcactcagctggagaagaatgcgacccttttgttgccagacgttattaaggtatcgactcggtcttctgaacatttttttagtgtctttctgaatatcaatgagacctttaagttgatggagcagctggccaatatagcaatgcgacagctgttggacaacgaagggtttgaacaggacaggagcctgcctaagctgaaacggaaatcccccaaaaaggtctccgcacttaaacgggatcttgatgctagggctaagtccgagaggtatagggccttattcagactacccaaggacgaaaagctggatgggcacactgattgtaccctgtggacgccgttcaataaaatgcatattctgggccagatgttcgtgagcacgaattatatttgtttcaccagtaaagaagaaaatctgtgtagtcttattatacccctcagggaggtgacgattgtggagaaagcagacagttcaagcgtcctgccatcccccctcagtatcagtacccgcaaccgcatgacattcctttttgccaacctcaaagatagagacttcctggtgcagagaattagtgatttcttgcaacaaactacgtctaagatatacagcgacaaagagtttgccggaagctacaatagttccgacgacgaagtctactcacgaccaagtagcctggtatcctcctccccccaaagaagcacttcctcggatgcagacggtgaacgacagttcaacttgaacggaaacagtgtcccgaccgcaacccagaccttaatgacaatgtatagacggcgttctcccgaggaatttaatccgaagctggctaaagaattcttgaaagagcaggcctggaagattcacttcgccgagtacggacagggaatttgcatgtacaggacagaaaagactagagagctggttctgaaaggcatcccagaatccatgcgtggggaactttggctgttgctatcgggcgcaatcaacgagaaggcaacacaccctgggtactacgaagacttagtggaaaagtccatggggaagtacaacctggcgactgaggaaattgagcgcgacctgcatcggagcctgcccgagcacccggctttccagaacgaaatgggaatcgcagctctgaggcgcgtgctcaccgcctacgccttccgcaaccccaacattggctactgccaggctatgaatatagtgacctctgtcctccttctgtatgctaaggaggaagaggctttctggcttctggtagctctctgtgagcgcatgctacccgactactacaatacaagggtggtcggagccctcgtcgaccaaggtgtgtttgaggaactggcgagagactatgtccctcagctctatgattgtatgcaagatcttggcgtgatctctacaatatctctctcatggttcctgacactgttcctctcagtgatgccgttcgagtcagcagtagttgtagtcgattgctttttctatgagggcatcaaggtgatatttcaacttgcactggctgttctcgacgctaacgtagacaagttgctgaactgcaaagacgacggggaggccatgacggttttggggagataccttgactccgtgacgaataaagactctacgcttccgccaatcccccacctccacagtctgctgtccgatgacgtggagccctatccggaagtcgacatctttaggttgattcgtacatcgtacgagaaattcggtaccattcgtgctgacctaatcgaacagatgcgcttcaaacaaagactgaaggtgattcagactctagaagacacaacaaagcggaacgtggtgagaaccatagtgactgagacaagtttcaccatcgatgaacttgaggaattgtatgctcttttcaaggcagaacatctcacttcctgctactggggaggcagctctaatgctctggataggcatgacccgagtctgccttatctggagcaataccggatagatttcgaacagttcaaagggatgttcgctctgctcttcccatgggcatgcggcacccacagtgacgttttagcatctcgactgttccagcttctcgatgaaaatggcgactccctgattaattttcgggagtttgtgtctggacttagcgcggcttgccacggtgacctgaccgaaaagttgaagctgctctataagatgcatgtgctccctgagccgtccagtgatcaagatgaacccgacagtgccttcgaagcgacccagtatttcttcgaggacatcacccccgaatgcacacacgtggtcggactggacagtaggagcaaacagggcgcagacgatggattcgtcaccgtgtccctgaagcccgacaaggggaaaagggccaatagtcaggagaataggaactacctgcgtctctggactcccgagaacaagagcaagtctaagaacgccaaggacctgccaaaactgaaccaggggcagttcattgaattgtgtaaaaccatgtataacatgttctccgaagaccctaacgagcaggagctgtaccatgcaaccgctgcagtgacatcactcctgctggagattggcgaagtcgggaagctatttgtcgcccaacccgctaaagagggtgggagtggcggttcggggccttcctgtcaccagggtattcccggtgtcctttttccgaagaaagggcctggccagccttatgtcgtggaatccgtagagcctctccccgcatccctggctcctgattccgaagaacattcgctcggcggtcagatggaggatatcaagcttgaggactcctctcctagggataacggcgcttgctcatctatgctgatctctgacgatgacaccaaggacgattccagcatgtcttcttatagtgtgctctctgcaggaagccatgaggaagataagctgcactgcgaagatatcggagaggataccgtgctcgtgcgttccgggcaggggaccgcagcgctgcctagatctacatccttggatagggattgggccattacctttgaacagtttctcgcgagtttattgacagagcctgctttggtcaagtactttgataagccggtttgtatgatggccagaatcaccagtgctaaaaacattaggatgatgggcaaaccgctcacctccgcttccgactatgagatctccgccatgtccggatag

SEQ ID NO: 184601 - DNA, 5306 bp, Artificial Sequence
  derived and/or modified sequence
gcgcgcctgtcgcggtggtgggtgcaggactggacccacgggcccattgtgcgcccgcccgcggcagccaggaccatgtgggtgaacccggaggaggtgttgctggccaacgcgctgtggatcaccgagagggccaacccatacttcatcctgcagcggaggaagggccacgccggcgatggaggcggcggcggcggactggcgggcctgctggtgggtacccttgatgttgtgttggactccagcgcccgggtcgctccttaccgaatcttgtaccagactccagactccctggtctactggaccatcgcctgtggtggttccaggaaagaaatcactgaacactgggaatggcttgagcaaaatctcttgcagacactctccatctttgaaaatgagaatgatatcaccacatttgtgagaggaaaaatacagggcatcattgcagaatacaacaaaatcaatgatgtaaaggaagatgatgacacggagaagtttaaagaagccattgtgaaatttcataggctgtttgggatgccagaggaagagaaactcgtcaactattactcttgcagctattggaaggggaaggtcccccgtcagggttggatgtacctcagcattaaccacctttgcttttattcttttcttatgggaagggaagcgaaactggtcatccggtgggtagacatcactcagcttgagaagaatgccaccctgcttctgcctgatgtgatcaaagtgagcacacggtccagtgagcatttcttctctgtattcctcaacatcaacgagaccttcaagttaatggagcagcttgccaacatagccatgaggcaactcttagacaatgagggatttgaacaagatcgatccctgcccaaactcaaaaggaaatctcctaaaaaagtgtctgctctaaaacgtgatcttgatgccagggcaaagagtgagagataccgtgcacttttccggctgcccaaagatgaaaaattagatggccacacagactgcactctctggactccatttaacaaaatgcacattttggggcagatgtttgtgtccacaaattacatctgttttaccagcaaggaggagaacttatgtagcctcattatcccgctccgtgaggtgacaattgtggaaaaggcagacagctccagtgtgctccccagtcccttatccatcagcacccgaaacaggatgaccttcctatttgccaacttgaaagatagagactttctagtgcagaggatctcagatttcctgcaacagactacttccaaaatatattctgacaaggagtttgcaggaagttacaacagttcagatgatgaggtgtactctcgacccagcagcctcgtctcctccagcccccagagaagcacgagctctgatgctgatggagagcgccagtttaacctaaatggcaacagcgtccccacagccacacagaccctgatgaccatgtatcggcggcggtctcccgaggagttcaacccgaaattggccaaagagtttctgaaagagcaagcctggaagattcactttgctgagtatgggcaagggatctgcatgtaccgcacagagaaaacgcgggagctggtgttgaagggcatcccggagagcatgcgtggggagctctggctgctgctgtcaggtgccatcaatgagaaggccacacatcctgggtactatgaagacctagtggagaagtccatggggaagtataatctcgccacggaggagattgagagggatttacaccgctcccttccagaacacccagcttttcagaatgaaatgggcattgctgcactaaggagagtcttaacagcttatgcttttcgaaatcccaacatagggtattgccaggccatgaatattgtcacttcagtgctgctgctttatgccaaagaggaggaagctttctggctgcttgtggctttgtgtgagcgcatgctcccagattactacaacaccagagttgtgggtgcactggtggaccaaggtgtctttgaggagctagcacgagactacgtcccacagctgtacgactgcatgcaagacctgggcgtgatttccaccatctccctgtcttggttcctcacactatttctcagtgtgatgccttttgagagtgcagttgtggttgttgactgtttcttctatgaaggaattaaagtgatattccagttggccctagctgtgctggatgcaaatgtggacaaactgttgaactgcaaggatgatggggaggccatgaccgttttgggaaggtatttagacagtgtgaccaataaagacagcacactgcctcccattcctcacctccactccttgctcagcgatgatgtggaaccttaccctgaggtagacatctttagactcatcagaacttcctacgagaaattcggaactatccgggcagatttgattgaacagatgagattcaaacagagactgaaagtgatccagacgctggaggatactacgaaacgcaacgtggtacgaaccattgtgacagaaacttcctttaccattgatgagctggaagaactttatgctcttttcaaggcagaacatctcaccagctgctactggggcgggagcagcaacgcgctggaccggcatgaccccagcctgccctacctggaacagtatcgcattgacttcgagcagttcaagggaatgtttgctcttctctttccttgggcatgtggaactcactctgacgttctggcctcccgcttgttccagttattagatgaaaatggagactctttgattaacttccgggagtttgtctctgggctaagtgctgcatgccatggggacctcacagagaagctcaaactcctgtacaaaatgcacgtcttgcctgagccatcctctgatcaagatgaaccagattctgcttttgaagcaactcagtacttctttgaagatattaccccagaatgtacacatgttgttggattggatagcagaagcaaacagggtgcagatgatggctttgttacggtgagcctaaagccagacaaagggaagagagcaaattcccaagaaaatcgtaattatttgagactgtggactccagaaaataaatctaagtcaaagaatgcaaaggatttacccaaattaaatcaggggcagttcattgaactgtgtaagacaatgtataacatgttcagcgaagaccccaatgagcaggagctgtaccacgccacggcagcagtgaccagcctcctgctggagattggggaggtcggcaagttgttcgtggcccagcctgcaaaggagggcgggagcggaggcagtgggccgtcctgccaccagggcatcccaggcgtgctcttccccaagaaagggccaggccagccttacgtggtggagtctgttgagcccctgccggccagcctggcccccgacagcgaggaacactcccttggaggacaaatggaggacatcaagctggaggactcctcgccccgggacaacggggcctgctcctccatgctgatctctgacgacgacaccaaggacgacagctccatgtcctcatactcggtgctgagtgccggctcccacgaggaggacaagctgcactgcgaggacatcggagaggacacggtcctggtgcggagcggccagggcacggcggcactgccccggagcaccagcctggaccgggactgggccatcaccttcgagcagttcctggcctccctcttaactgagcctgccctggtcaagtactttgacaagcccgtgtgcatgatggccaggattaccagtgcaaaaaacatccggatgatgggcaagcccctcacctcggccagtgactatgaaatctcggccatgtccggctgacacgggcgccttcccgggggagtgggaggagagggaggggagggattttttatgttcttctgtgttgagttttttctttctttcttttaaattaaatatttattagtacctggcttgaagcctagtgttttcataatgtaattcaatgaaaactgttggagaaatatttaaacacctcaatgtaggtacattacactcttgttgcggggaggggatttaccagaatacagtttatttcgtgaattctaaaaaacaaaaagatgaatctgtcagtgatatgtgtgtattataacttattaatcttgctgttgagctgtatacatggtttaaaaaatagtactgtttaatgctaagtaaggcagcagtcatttgtgtattcaggctttttaaataaaattagagctgtaaggaaaatgaaaagccacaaatgcaagactgttcttaaatggaaggcatagtcagcgagggtaaatcctataccactttaggaagtattaaaaatatttttaagatttgaaatatatttcatagaagtcctctattcaaaatcatattccacagatgttccccttcaaagggaaaacatttggggttctaaacagttatgaaagtaagtgatttttacatgattccagaataacacttgtattgaccaatttagacagataccagaccaattttgcatttaagaaattgttctgattatttacgtcaactcattagaattcagtgaaaagtaacagtcttttgtcacagagaatctgaaagtagcagcaaagacagagggctcatgacaggtttttgcttttgctttgcttttgtttttgaaagagtaaaagtactgatgcttctgatactggatgtttagcttcttactgcaaaaacataagtaaaacagtcaactttaccatttccgtattctccatagattgaagaaatttataccacatatcgcatatgaccatctttccatcaaatcaatgtagagataatgtaaactgaaaaaaaatctgcaagataatgtaactgaatgttttaaaaacagaacttgtcactttatataaaagaatagtatgctctatttcctgaatggatgtggaaatgaaagctagcgcacctgcactttgaattcttgcttcttttttattactgttatgattttgctttttacagatgttggacgattttttcttctgattgttgaattcataatcatggtctcatttcctttgcttctttggaatatttctttcaacacattcctttattttattatacattgtgtcctttttttagctattgctgctgttgttttttattctatttacaggatgatttttaaactgtcaaatgaagtagtgttaacctcaaataggctaaatgtgaacaaataaaatacagcaaatactcagatacagctttttatcttt

SEQ ID NO: 184602 - protein, 677 aa, Artificial Sequence
  derived and/or modified sequence
MAAGGGGSCDPLAPAGVPCAFSPHSQAYFALASTDGHLRVWETANNRLHQEYVPSAHLSGTCTCLAWAPARLQAKESPQRKKRKSEAVGMSNQTDLLALGTAVGSILLYSTVKGELHSKLISGGHDNRVNCIQWHQDSGCLYSCSDDKHIVEWNVQTCKVKCKWKGDNSSVSSLCISPDGKMLLSAGRTIKLWVLETKEVYRHFTGHATPVSSLMFTTIRPPNESQPFDGITGLYFLSGAVHDRLLNVWQVRSENKEKSAVMSFTVTDEPVYIDLTLSENKEEPVKLAVVCRDGQVHLFEHILNGYCKKPLTSNCTIQIATPGKGKKSTPKPIPILAAGFCSDKMSLLLVYGSWFQPTIERVALNSREPHMCLVRDISNCWAPKVETAITKVRTPVMNSEAKVLVPGIPGHHAAIKPAPPQTEQVESKRKSGGNEVSIEERLGAMDIDTHKKGKEDLQTNSFPVLLTQGLESNDFEMLNKVLQTRNVNLIKKTVLRMPLHTIIPLLQELTKRLQGHPNSAVLMVQWLKCVLTVHASYLSTLPDLVPQLGTLYQLMESRVKTFQKLSHLHGKLILLITQVTASEKTKGATSPGQKAKLVYEEESSEEESDDEIADKDSEDNWDEDEEESESEKDEDVEEEDEDAEGKDEENGEDRDTASEKELNGDSDLDPENESEEE

SEQ ID NO: 184603 - DNA, 2034 bp, Artificial Sequence
  derived and/or modified sequence
atggccgccggcggcggcggcagctgcgaccccctggcccccgccggcgtgccctgcgccttcagcccccacagccaggcctacttcgccctggccagcaccgacggccacctgagagtgtgggagaccgccaacaacagactgcaccaggagtacgtgcccagcgcccacctgagcggcacctgcacctgcctggcctgggcccccgccagactgcaggccaaggagagcccccagagaaagaagagaaagagcgaggccgtgggcatgagcaaccagaccgacctgctggccctgggcaccgccgtgggcagcatcctgctgtacagcaccgtgaagggcgagctgcacagcaagctgatcagcggcggccacgacaacagagtgaactgcatccagtggcaccaggacagcggctgcctgtacagctgcagcgacgacaagcacatcgtggagtggaacgtgcagacctgcaaggtgaagtgcaagtggaagggcgacaacagcagcgtgagcagcctgtgcatcagccccgacggcaagatgctgctgagcgccggcagaaccatcaagctgtgggtgctggagaccaaggaggtgtacagacacttcaccggccacgccacccccgtgagcagcctgatgttcaccaccatcagaccccccaacgagagccagcccttcgacggcatcaccggcctgtacttcctgagcggcgccgtgcacgacagactgctgaacgtgtggcaggtgagaagcgagaacaaggagaagagcgccgtgatgagcttcaccgtgaccgacgagcccgtgtacatcgacctgaccctgagcgagaacaaggaggagcccgtgaagctggccgtggtgtgcagagacggccaggtgcacctgttcgagcacatcctgaacggctactgcaagaagcccctgaccagcaactgcaccatccagatcgccacccccggcaagggcaagaagagcacccccaagcccatccccatcctggccgccggcttctgcagcgacaagatgagcctgctgctggtgtacggcagctggttccagcccaccatcgagagagtggccctgaacagcagagagccccacatgtgcctggtgagagacatcagcaactgctgggcccccaaggtggagaccgccatcaccaaggtgagaacccccgtgatgaacagcgaggccaaggtgctggtgcccggcatccccggccaccacgccgccatcaagcccgcccccccccagaccgagcaggtggagagcaagagaaagagcggcggcaacgaggtgagcatcgaggagagactgggcgccatggacatcgacacccacaagaagggcaaggaggacctgcagaccaacagcttccccgtgctgctgacccagggcctggagagcaacgacttcgagatgctgaacaaggtgctgcagaccagaaacgtgaacctgatcaagaagaccgtgctgagaatgcccctgcacaccatcatccccctgctgcaggagctgaccaagagactgcagggccaccccaacagcgccgtgctgatggtgcagtggctgaagtgcgtgctgaccgtgcacgccagctacctgagcaccctgcccgacctggtgccccagctgggcaccctgtaccagctgatggagagcagagtgaagaccttccagaagctgagccacctgcacggcaagctgatcctgctgatcacccaggtgaccgccagcgagaagaccaagggcgccaccagccccggccagaaggccaagctggtgtacgaggaggagagcagcgaggaggagagcgacgacgagatcgccgacaaggacagcgaggacaactgggacgaggacgaggaggagagcgagagcgagaaggacgaggacgtggaggaggaggacgaggacgccgagggcaaggacgaggagaacggcgaggacagagacaccgccagcgagaaggagctgaacggcgacagcgacctggaccccgagaacgagagcgaggaggagtag

SEQ ID NO: 184604 - DNA, 2034 bp, Artificial Sequence
  derived and/or modified sequence
atggccgccgggggcggggggtcttgcgatcccttggcacctgccggggtcccctgcgcattctcacctcattcgcaggcctacttcgcactcgcttcgactgatggtcatttaagagtttgggagactgcgaacaaccgccttcaccaggaatatgttcccagtgcgcatctttctggcacatgcacctgtctcgcttgggcgcctgcacgcctgcaggccaaagaatccccccagcgcaaaaaacggaagagtgaggctgttggaatgagtaatcagactgacctcttggccttaggtactgccgtgggatccatccttttgtactcaactgtgaagggggagttacatagcaagctgatttcaggcggtcacgataatcgggtgaactgcattcagtggcaccaggattcaggctgcctgtacagttgttctgacgataagcacattgtagagtggaacgtccaaacctgcaaggttaaatgcaaatggaagggcgacaatagttccgtgtcttcattgtgtatctcccctgacggaaagatgttactgtcagcgggccggaccattaagctttgggtgctggaaaccaaagaggtttatagacactttaccggacacgccacgccagtttccagcttgatgtttacaaccatccgcccgccaaatgagtcgcagcccttcgatggaattaccggcctgtacttcctaagcggcgctgtgcacgatcgcttgcttaacgtgtggcaggttaggtctgagaacaaggagaaaagcgctgtcatgtcctttacagtgaccgacgaacccgtctatattgacctcacattgtctgaaaacaaggaggagcccgtcaagcttgctgtggtatgccgcgatggtcaagtacatcttttcgagcatatcctcaacgggtactgtaaaaaacctctcacttccaactgcacgatacagatcgcaacccctgggaagggcaagaaatcgacaccaaaacccatcccgattctagctgccggcttctgctcggataagatgtctctgcttttggtgtatggtagttggtttcagccaacaatcgagcgagtcgctctgaacagtcgggagcctcacatgtgtctggttagggacattagcaattgctgggcacccaaggttgaaacagccataacaaaagttcggacccctgtgatgaattcagaggccaaggtgctagtgccaggcatccctgggcaccacgcagctatcaaacctgcccccccccagaccgagcaggtggagtccaagaggaagtcaggtggtaatgaggtgtctatcgaggaaagacttggcgccatggacatcgatacacataagaaaggcaaggaagacctgcaaaccaacagttttcctgtgttgctgacacagggccttgagtcaaacgacttcgaaatgctcaacaaggttttacagacacggaacgtgaatctcatcaaaaagaccgtactgaggatgcctcttcatactatcattcctcttcttcaggagctgacaaagcgactgcaggggcacccaaactccgccgtcttaatggtgcagtggctcaagtgcgtgctcaccgtgcacgcaagttatctcagcacactgcccgacctggtcccacagttaggaacactctatcagctgatggagtctcgggttaagactttccagaagctctcccacctccacggtaaactgatactcttgattacacaagtgacggcctctgagaagaccaaaggcgccacatcacctgggcagaaggcaaagctcgtgtacgaggaagaatcctcagaggaggaatccgatgatgagatcgcagacaaggacagtgaagacaattgggatgaggacgaggaggaatcagagtccgagaaagacgaggatgtggaagaagaagatgaggacgcggagggcaaagacgaagaaaacggcgaagaccgcgacacggcttcagaaaaagaacttaatggagactcagacctggatcccgagaacgagtcagaggaagagtag

SEQ ID NO: 184605 - DNA, 2034 bp, Artificial Sequence
  derived and/or modified sequence
atggctgctgggggcggcggcagctgtgaccccctggccccagctggggtgccctgtgccttcagcccccacagccaggcctactttgccctggccagcacagatggccacctgcgggtgtgggagacagccaacaaccggctgcaccaggagtatgtgcccagcgcccacctgagcggcacctgcacctgcctggcctgggccccagcccggctgcaggccaaggagagcccccagaggaagaagaggaagtctgaggccgtgggcatgagcaaccagacagacctgctggccctgggcacagctgtgggcagcatcctgctgtacagcacagtgaagggggagctgcacagcaagctgatcagcggcggccatgacaacagagtgaactgcatccagtggcaccaggacagcggctgcctgtacagctgcagtgatgacaagcacatcgtggagtggaatgtgcagacctgcaaggtgaagtgcaagtggaagggggacaacagctctgtgagcagcctgtgcatcagcccagatggcaagatgctgctgtctgctggccgcaccatcaagctgtgggtgctggagaccaaggaggtgtaccgccacttcaccggccacgccacccctgtgagcagcctgatgttcaccaccatccggcccccaaatgaaagccagccctttgatggcatcaccggcctgtacttcctgagcggggctgtgcatgaccggctgctgaatgtgtggcaggtgcgctctgagaacaaggagaagtctgctgtgatgtccttcaccgtgacagatgagcctgtgtacatcgacctgaccctgtctgagaacaaggaggagcctgtgaagctggccgtggtgtgcagagatggccaggtgcacctgtttgagcacatcctgaatggctactgcaagaagcccctgaccagcaactgcaccatccagatcgccacccctgggaagggcaagaagagcacccccaagcccatccccatcctggccgccggcttctgcagcgacaagatgagcctgctgctggtgtatggctcctggttccagcccaccatcgagcgggtggccctgaacagccgggagccccacatgtgcctggtgcgggacatcagcaactgctgggcccccaaggtggagacagccatcaccaaggtgaggacccctgtgatgaacagcgaggccaaggtgctggtgcccggcatccctggccaccacgccgccatcaagccagccccaccccagacagagcaggtggagagcaagaggaagagcggcggcaatgaggtgtccattgaggagcggctgggcgccatggacatcgacacccacaagaagggcaaggaggacctgcagaccaacagcttccctgtgctgctgacccagggcctggagagcaatgactttgagatgctgaacaaggtgctgcagaccagaaatgtgaacctgatcaagaagacagtgctgaggatgcccctgcacaccatcatccccctgctgcaggagctgaccaagaggctgcagggccaccccaacagcgctgtgctgatggtgcagtggctgaagtgtgtgctgactgtgcacgccagctacctgagcaccctgcctgacctggtgccccagctgggcaccctgtaccagctgatggagagccgggtgaagaccttccagaagctgagccacctgcacggcaagctgatcctgctgatcacccaggtgacagccagcgagaagaccaagggggccaccagccctggccagaaggccaagctggtgtatgaggaggagagcagcgaggaggagagtgatgatgaaattgctgacaaggacagcgaggacaactgggatgaagatgaggaggagagcgagagcgagaaggatgaagatgtggaggaggaggatgaagatgctgagggcaaggatgaagaaaatggagaggaccgggacacagccagcgagaaggagctgaatggagacagcgacctggaccctgaaaatgaaagtgaggaggagtag

SEQ ID NO: 184606 - DNA, 2034 bp, Artificial Sequence
  derived and/or modified sequence
atggccgccggcggcggcggcagctgcgaccccctggcccccgccggcgttccttgcgccttcagcccgcactcccaagcctatttcgcactggcttcgactgacgggcaccttagggtctgggaaaccgctaacaacagattgcaccaggagtacgtcccatctgcacatctaagtgggacctgcacatgtttggcgtgggcccccgctcgcctccaggcaaaggagtccccacagcggaaaaaaaggaaaagcgaagctgtgggtatgtcgaaccagacagacctgcttgcactcggcactgccgtggggagcattctgctctactctactgttaagggggagctgcactctaaacttatctccggcggacatgataacagggtgaactgtatccagtggcatcaggactccgggtgtctgtattcttgctccgatgacaagcatatcgttgagtggaatgtgcagacatgtaaggttaagtgcaaatggaaaggggataatagcagtgtgagctcgctgtgtattagtcctgatgggaaaatgctactctctgccgggagaactatcaaattgtgggtcctggagaccaaagaggtgtaccgtcacttcacaggccacgctactcccgtatcttccttaatgtttactaccattcggccgccaaatgagagccagccatttgatggaatcaccggactgtattttctgagtggagctgtgcatgacaggttgctgaacgtctggcaggtcaggtccgagaataaagaaaagagtgctgtaatgtcatttactgttaccgacgaaccagtttacatagatctcaccctatcggaaaataaagaggagcccgtgaagttggcagtcgtgtgtagagatggacaagtgcacctgtttgagcatattctcaacggatactgcaagaagccactgacatcaaattgtacaattcagatcgccacgcccggtaagggcaagaaatctactccaaagccaataccaatcctcgcggctgggttctgcagcgataagatgtctctccttctggtctatggctcctggttccagccaaccatcgagagggtcgctctaaattcaagggaaccacacatgtgtttggttcgagatatctcaaactgctgggcacctaaagtggagacggccatcaccaaagtccgcaccccagttatgaatagcgaggccaaggtactagtaccaggtattccggggcatcatgctgctatcaaacccgctcccccccaaacagaacaagtggagagcaagcgcaagtccggagggaacgaggtgtcgatcgaagagagactcggggccatggacatagacacccataaaaagggcaaagaagacctgcaaactaattcttttcctgtactcctcacccagggactggaaagcaatgactttgagatgctgaacaaggtgctgcaaaccaggaatgtgaatctgatcaaaaagactgttctgcgcatgccgctccatacaataattccactgcttcaggagttaaccaagagattgcagggacatcctaactcagcggtgcttatggtgcagtggctgaaatgcgtcttaactgtacacgcgagctacctcagtacactgcctgatctggtgcctcagcttggcactctgtatcagctgatggaatcacgggttaagactttccagaagctatcgcacctccacggaaaattaatccttttaatcacacaggtgaccgccagtgaaaaaactaagggggcaacatctcctggccaaaaagcgaagctcgtctatgaggaagagtcctcagaagaggagtctgacgatgaaattgctgacaaggacagtgaagataattgggatgaggatgaggaggaaagtgagtcagaaaaagatgaggatgtggaggaagaggatgaagacgctgaggggaaagacgaggagaatggtgaggacagggacaccgcctcagaaaaagagttgaatggggacagcgaccttgacccggagaatgagtcagaagaagagtag

SEQ ID NO: 184607 - DNA, 2034 bp, Artificial Sequence
  derived and/or modified sequence
atggccgctggaggcggaggttcctgcgacccacttgcacctgcaggcgttccatgcgctttcagccctcacagccaagcttacttcgctctggctagtacagatgggcatctaagggtatgggaaaccgccaacaacagactgcaccaagagtatgtgccttccgcccacctatctggaacttgtacctgcctggcatgggccccagcacgtttgcaggctaaggagagtcctcagaggaaaaaaagaaagtccgaagcagtgggtatgtctaaccagaccgacttgctcgcactggggacagcagtggggagcatactcctgtacagcacggtaaagggagagctacactccaagttgattagtggtggacacgacaaccgggttaattgtatccaatggcatcaggactctggctgcctgtactcctgtagcgatgataaacatatcgtggagtggaatgtgcagacctgtaaggtgaaatgtaaatggaagggcgataacagctccgtttcctccctgtgtatctccccagatggcaaaatgctactcagcgcgggaaggacgatcaagctttgggttctcgagactaaggaggtgtaccgccactttaccgggcacgctacgccagttagttctctgatgttcaccaccattaggccacccaatgagtcccagccttttgacggcattacgggactgtattttctttccggagcggtgcacgataggttgctgaatgtatggcaggtgcgatcagagaacaaggagaaatccgcagtgatgtctttcacggtgacggacgaacccgtctatatcgacctgacgctgagtgagaataaagaggagccagtcaagctagcagtcgtgtgtcgggatggtcaggtgcatctgtttgagcatatcctgaatgggtactgcaagaagccgttgacttcaaattgtacaatccagatcgcaactccgggaaagggaaaaaagtctaccccaaagcccatccctatcctggctgctgggttctgtagcgacaaaatgagcctgctcctagtctacggcagctggtttcagccaaccatagaaagagtggccctgaacagccgcgaaccgcatatgtgcctagtacgcgacatttcgaactgttgggcacctaaagtggaaaccgctataacaaaggtgcggaccccagtgatgaatagtgaggctaaggtactggttcctggtattcccggacatcatgcagctataaaacccgctcccccacaaacagagcaggttgagagtaaaagaaagagtgggggaaacgaggttagcatagaggagcggttgggcgcaatggacattgacacccataagaagggcaaggaggacttgcaaacaaacagcttccccgtcctgctgacccaaggtcttgagtctaatgactttgagatgctgaataaggttctgcaaactagaaatgtgaatctgatcaagaaaactgtgctgcgaatgcctttgcatacaatcattcctttacttcaggaactgacaaagaggcttcagggccacccaaattctgctgtgcttatggtacaatggctaaaatgtgtactcaccgtccatgcctcttatctcagcacattgccagatctggtcccccagctcggtacactctatcaactgatggagagtagagtcaaaacattccagaagctgtctcacctgcatggaaagctgatactactcattactcaggtcactgcatctgaaaaaaccaaaggggctacgagccctggtcagaaagctaaactggtgtatgaagaggagagcagtgaagaggaatccgacgacgagattgcagataaagactccgaggacaactgggacgaagatgaggaggaaagcgaaagtgagaaggacgaggacgtggaagaagaggacgaagacgccgaaggcaaggacgaagagaatggcgaagaccgggacaccgctagcgaaaaagaactgaacggagattctgatctggaccccgagaacgagtctgaggaagaatag

SEQ ID NO: 184608 - DNA, 3533 bp, Artificial Sequence
  derived and/or modified sequence
gcgccggtgcgcctgcgcacggacgaacacgtggctgcagcggggccagagcagcaatggcggcgggcggcggcggtagctgcgaccccctggcccctgctggggtcccttgcgccttctccccgcacagccaggcctacttcgctttggcctctaccgacggtcacttacgagtatgggagacggccaacaaccggctgcaccaggagtacgtgccttccgcgcacctcagtggtacctgcacctgtctggcctgggcgccagcgcggctgcaggccaaggaaagtccccagaggaaaaaaaggaaatcagaagctgtaggaatgagtaaccagactgacttattggctcttggcacagcagttggtagcattttattatacagcacagtaaaaggagagttacacagtaaattaataagtggtggacatgacaacagagtcaactgcatacagtggcatcaagacagtggctgtttatatagttgttcagatgataaacatattgtggaatggaacgtacagacatgcaaagtaaagtgcaaatggaaaggcgacaatagcagtgtcagttccctatgtatcagcccagatggaaagatgttgctttcagctggtcgaacaatcaaactatgggttttggagaccaaagaagtctacaggcatttcacaggacatgcaacgccagtttcgtcactgatgttcactaccatcagacctcctaatgagagccagccctttgatggaattacaggtctttatttcttatctggagcagtacatgaccggttacttaatgtctggcaggtccgatcagaaaacaaagaaaagagtgcagtgatgtcatttacagttaccgatgaacctgtctatattgacttaactttgtcagaaaacaaagaagagcctgtcaagttggctgttgtttgcagagatggtcaagtccatctttttgaacacatattaaatgggtactgcaaaaagcctttgacttcaaactgcacaattcagatagcaacacctgggaaaggcaagaagtcaacaccaaaacccatccctattctagctgctggtttttgctcagacaaaatgtcattgttgcttgtatatggcagttggtttcagcctactattgagcgagtggctttaaactccagagaacctcatatgtgtttagtaagagatatttcaaactgctgggcccccaaagtagaaacagctataacaaaggtgaggacaccagtgatgaattctgaagcaaaagttctggtgcctgggattcctggtcatcatgcagctatcaagcccgctcctccacaaaccgagcaagtagagagcaagaggaagtcagggggaaatgaggttagcattgaagaacgtctgggagcaatggatatagacacacacaaaaaaggaaaggaagacctccagacgaatagctttccagttcttcttacccagggcttagaaagtaacgattttgaaatgctaaataaagtacttcaaactaggaatgtaaaccttataaagaagactgtattaaggatgcccctgcatactattattccgttgttacaagagcttacaaagaggttacaaggacatcctaatagtgctgtgctaatggttcagtggctaaaatgtgtgttaacagttcatgcatcatacctgtccacgttgcctgacctggtaccccagctggggacactctaccagttaatggaaagcagagtcaaaacttttcagaaactttcacaccttcatggaaagcttattcttctaattacacaagtaacagcatcagagaagacaaagggagcaacttcccctggacagaaggcaaagttggtgtatgaagaagagtcttctgaagaggagtctgatgatgaaatagcagataaggattctgaagataattgggatgaagatgaggaggagagtgaaagtgaaaaagatgaggacgttgaagaggaagatgaggatgccgaaggaaaagatgaagaaaatggcgaggacagagatacagcaagtgaaaaagaattaaatggagattctgatttagatcctgaaaatgaaagtgaagaagaatgaagacagcaaagcaagccggtcaaactatataaactctggctcaccttgcccagtggtgagggctgcctctgtgccaggatgccaaggaccgctgcacatttccaaattcacagcagtggatcccatgccactttgctgtcctgagcaccccagacttgactgtgtaaataagagtgtttcattcaaatgttaataaactttacacagtatatagacacattttctgcaatgtactgacatcagtgtccaatatatggtatatttttataatataatatcctagtatgattggttatatcaagaattgacaagtgcagataaagacctttcccataggagttcaagaactggactgttgtgaagaagtcagctcttatctcaggttggtatctttcatcaaatccagatgcaaagcagcactagtgaaaatttttttaatttagtacatttaatttggtacattttcataaaatatgaagggataactacaaactggagtaaaaatgatggtaattaaaaaaaatcctcagtatccctagcttgtctattaactgtgataatctgacttgagtcagattgaatatttggagtgcttccccagaataaccacttatttttgaagctatcatgtgaagtatttttttaaaacaaaacaaaaattatggtcattaaaaaactagagaattagccatattaaggatttttcttgactgcaaattacttctaaagaatcatcagtgtatagattagaagtgctcattacctgcaacttttaaaaaaaattcagttatagctgcttttgaagaggtttccatttttatttaaattactaatggatcaaagaacaattgtttattttttctctttggttttagatattaatgataaccttgttggaattttttttccaaagaaaatatttttataattaaataatttaatgtttttcttccttttcattacctactcttggcagtgttagggtatctgtttacctttaaaatgataagtctcactcaagattttttatgtatgtataaatattttggtgtgctacaaaagcctttgcaaattatcagtagtagtttttttttttttttttttttttttaaagaatgagccgatattggcttagtgctcactaggggacatgcacatggaagctcacctctaagaaagggctgggcagatggatttattttttcccacctgtgaatatgtaaaacaaaaccattatctttgagggagtttttaataccaatgacagaacagagatttgtgtgctcatcttaagagccagagccatataagcatcttgggaaagcaagtttgaaccagctgctggtgtaatgtacagttatatttgtctataaatggagctgtttatggcaatttaataccattctctttgtaaagtgaataaatattcatctttacccagtg

SEQ ID NO: 184609 - protein, 1336 aa, Artificial Sequence
  derived and/or modified sequence
MMEIQMDEGGGVVVYQDDYCSGSVMSERVSGLAGSIYREFERLIHCYDEEVVKELMPLVVNVLENLDSVLSENQEHEVELELLREDNEQLLTQYEREKALRRQAEEKFIEFEDALEQEKKELQIQVEHYEFQTRQLELKAKNYADQISRLEERESEMKKEYNALHQRHTEMIQTYVEHIERSKMQQVGGNSQTESSLPGRRKERPTSLNVFPLADGTVRAQIGGKLVPAGDHWHLSDLGQLQSSSSYQCPQDEMSESGQSSAAATPSTTGTKSNTPTSSVPSAAVTPLNESLQPLGDYGVGSKNSKRAREKRDSRNMEVQVTQEMRNVSIGMGSSDEWSDVQDIIDSTPELDMCPETRLDRTGSSPTQGIVNKAFGINTDSLYHELSTAGSEVIGDVDEGADLLGEFSVRDDFFGMGKEVGNLLLENSQLLETKNALNVVKNDLIAKVDQLSGEQEVLRGELEAAKQAKVKLENRIKELEEELKRVKSEAIIARREPKEEAEDVSSYLCTESDKIPMAQRRRFTRVEMARVLMERNQYKERLMELQEAVRWTEMIRASREHPSVQEKKKSTIWQFFSRLFSSSSSPPPAKRPYPSVNIHYKSPTTAGFSQRRNHAMCPISAGSRPLEFFPDDDCTSSARREQKREQYRQVREHVRNDDGRLQACGWSLPAKYKQLSPNGGQEDTRMKNVPVPVYCRPLVEKDPTMKLWCAAGVNLSGWRPNEDDAGNGVKPAPGRDPLTCDREGDGEPKSAHTSPEKKKAKELPEMDATSSRVWILTSTLTTSKVVIIDANQPGTVVDQFTVCNAHVLCISSIPAASDSDYPPGEMFLDSDVNPEDPGADGVLAGITLVGCATRCNVPRSNCSSRGDTPVLDKGQGEVATIANGKVNPSQSTEEATEATEVPDPGPSEPETATLRPGPLTEHVFTDPAPTPSSGPQPGSENGPEPDSSSTRPEPEPSGDPTGAGSSAAPTMWLGAQNGWLYVHSAVANWKKCLHSIKLKDSVLSLVHVKGRVLVALADGTLAIFHRGEDGQWDLSNYHLMDLGHPHHSIRCMAVVYDRVWCGYKNKVHVIQPKTMQIEKSFDAHPRRESQVRQLAWIGDGVWVSIRLDSTLRLYHAHTHQHLQDVDIEPYVSKMLGTGKLGFSFVRITALLVAGSRLWVGTGNGVVISIPLTETVVLHRGQLLGLRANKTSPTSGEGARPGGIIHVYGDDSSDRAASSFIPYCSMAQAQLCFHGHRDAVKFFVSVPGNVLATLNGSVLDSPAEGPGPAAPASEVEGQKLRNVLVLSGGEGYIDFRIGDGEDDETEEGAGDMSQVKPVLSKAERSHIIVWQVSYTPE

SEQ ID NO: 184610 - DNA, 4011 bp, Artificial Sequence
  derived and/or modified sequence
atgatggagatccagatggacgagggcggcggcgtggtggtgtaccaggacgactactgcagcggcagcgtgatgagcgagagagtgagcggcctggccggcagcatctacagagagttcgagagactgatccactgctacgacgaggaggtggtgaaggagctgatgcccctggtggtgaacgtgctggagaacctggacagcgtgctgagcgagaaccaggagcacgaggtggagctggagctgctgagagaggacaacgagcagctgctgacccagtacgagagagagaaggccctgagaagacaggccgaggagaagttcatcgagttcgaggacgccctggagcaggagaagaaggagctgcagatccaggtggagcactacgagttccagaccagacagctggagctgaaggccaagaactacgccgaccagatcagcagactggaggagagagagagcgagatgaagaaggagtacaacgccctgcaccagagacacaccgagatgatccagacctacgtggagcacatcgagagaagcaagatgcagcaggtgggcggcaacagccagaccgagagcagcctgcccggcagaagaaaggagagacccaccagcctgaacgtgttccccctggccgacggcaccgtgagagcccagatcggcggcaagctggtgcccgccggcgaccactggcacctgagcgacctgggccagctgcagagcagcagcagctaccagtgcccccaggacgagatgagcgagagcggccagagcagcgccgccgccacccccagcaccaccggcaccaagagcaacacccccaccagcagcgtgcccagcgccgccgtgacccccctgaacgagagcctgcagcccctgggcgactacggcgtgggcagcaagaacagcaagagagccagagagaagagagacagcagaaacatggaggtgcaggtgacccaggagatgagaaacgtgagcatcggcatgggcagcagcgacgagtggagcgacgtgcaggacatcatcgacagcacccccgagctggacatgtgccccgagaccagactggacagaaccggcagcagccccacccagggcatcgtgaacaaggccttcggcatcaacaccgacagcctgtaccacgagctgagcaccgccggcagcgaggtgatcggcgacgtggacgagggcgccgacctgctgggcgagttcagcgtgagagacgacttcttcggcatgggcaaggaggtgggcaacctgctgctggagaacagccagctgctggagaccaagaacgccctgaacgtggtgaagaacgacctgatcgccaaggtggaccagctgagcggcgagcaggaggtgctgagaggcgagctggaggccgccaagcaggccaaggtgaagctggagaacagaatcaaggagctggaggaggagctgaagagagtgaagagcgaggccatcatcgccagaagagagcccaaggaggaggccgaggacgtgagcagctacctgtgcaccgagagcgacaagatccccatggcccagagaagaagattcaccagagtggagatggccagagtgctgatggagagaaaccagtacaaggagagactgatggagctgcaggaggccgtgagatggaccgagatgatcagagccagcagagagcaccccagcgtgcaggagaagaagaagagcaccatctggcagttcttcagcagactgttcagcagcagcagcagccccccccccgccaagagaccctaccccagcgtgaacatccactacaagagccccaccaccgccggcttcagccagagaagaaaccacgccatgtgccccatcagcgccggcagcagacccctggagttcttccccgacgacgactgcaccagcagcgccagaagagagcagaagagagagcagtacagacaggtgagagagcacgtgagaaacgacgacggcagactgcaggcctgcggctggagcctgcccgccaagtacaagcagctgagccccaacggcggccaggaggacaccagaatgaagaacgtgcccgtgcccgtgtactgcagacccctggtggagaaggaccccaccatgaagctgtggtgcgccgccggcgtgaacctgagcggctggagacccaacgaggacgacgccggcaacggcgtgaagcccgcccccggcagagaccccctgacctgcgacagagagggcgacggcgagcccaagagcgcccacaccagccccgagaagaagaaggccaaggagctgcccgagatggacgccaccagcagcagagtgtggatcctgaccagcaccctgaccaccagcaaggtggtgatcatcgacgccaaccagcccggcaccgtggtggaccagttcaccgtgtgcaacgcccacgtgctgtgcatcagcagcatccccgccgccagcgacagcgactacccccccggcgagatgttcctggacagcgacgtgaaccccgaggaccccggcgccgacggcgtgctggccggcatcaccctggtgggctgcgccaccagatgcaacgtgcccagaagcaactgcagcagcagaggcgacacccccgtgctggacaagggccagggcgaggtggccaccatcgccaacggcaaggtgaaccccagccagagcaccgaggaggccaccgaggccaccgaggtgcccgaccccggccccagcgagcccgagaccgccaccctgagacccggccccctgaccgagcacgtgttcaccgaccccgcccccacccccagcagcggcccccagcccggcagcgagaacggccccgagcccgacagcagcagcaccagacccgagcccgagcccagcggcgaccccaccggcgccggcagcagcgccgcccccaccatgtggctgggcgcccagaacggctggctgtacgtgcacagcgccgtggccaactggaagaagtgcctgcacagcatcaagctgaaggacagcgtgctgagcctggtgcacgtgaagggcagagtgctggtggccctggccgacggcaccctggccatcttccacagaggcgaggacggccagtgggacctgagcaactaccacctgatggacctgggccacccccaccacagcatcagatgcatggccgtggtgtacgacagagtgtggtgcggctacaagaacaaggtgcacgtgatccagcccaagaccatgcagatcgagaagagcttcgacgcccaccccagaagagagagccaggtgagacagctggcctggatcggcgacggcgtgtgggtgagcatcagactggacagcaccctgagactgtaccacgcccacacccaccagcacctgcaggacgtggacatcgagccctacgtgagcaagatgctgggcaccggcaagctgggcttcagcttcgtgagaatcaccgccctgctggtggccggcagcagactgtgggtgggcaccggcaacggcgtggtgatcagcatccccctgaccgagaccgtggtgctgcacagaggccagctgctgggcctgagagccaacaagaccagccccaccagcggcgagggcgccagacccggcggcatcatccacgtgtacggcgacgacagcagcgacagagccgccagcagcttcatcccctactgcagcatggcccaggcccagctgtgcttccacggccacagagacgccgtgaagttcttcgtgagcgtgcccggcaacgtgctggccaccctgaacggcagcgtgctggacagccccgccgagggccccggccccgccgcccccgccagcgaggtggagggccagaagctgagaaacgtgctggtgctgagcggcggcgagggctacatcgacttcagaatcggcgacggcgaggacgacgagaccgaggagggcgccggcgacatgagccaggtgaagcccgtgctgagcaaggccgagagaagccacatcatcgtgtggcaggtgagctacacccccgagtag

SEQ ID NO: 184611 - DNA, 4011 bp, Artificial Sequence
  derived and/or modified sequence
atgatggaaatacagatggatgagggcggtggcgtggtggtttatcaggacgactattgttctggctcagttatgtctgagagggtgtcaggccttgccgggtctatatatagggagttcgagcggctgatccactgctatgatgaggaagtggtcaaggagctgatgccactcgtcgtgaatgtactggaaaacctggacagcgtgctcagcgaaaatcaggaacacgaagtggaactcgagttgctccgagaggacaacgaacaactgctaactcaatacgaaagggagaaagccctgcgtcgccaggccgaggagaaattcatcgagttcgaagatgcactagaacaggagaagaaggagttgcagatacaggtcgaacactacgagttccagaccagacagttggaattaaaggctaaaaactatgcagaccaaatctcacgcctggaagaaagggagtctgaaatgaaaaaagaatacaacgcactgcaccagaggcatactgagatgatccagacttacgtcgagcatatcgaacgctcaaaaatgcagcaggttggaggtaactctcagaccgaaagtagtcttccggggcggcgcaaagagagacccacatccctgaatgtgtttccccttgctgatggtactgtcagagcccagatcggcggtaagctcgtccctgccggtgaccattggcacttaagcgatctaggtcaactgcagtcctcttcaagttatcaatgtccgcaagatgagatgagtgaatctgggcagagcagtgccgcagcaaccccatcgacgaccggcactaaaagcaacactcctacgagcagcgtgcctagcgcagccgtgacaccactgaatgagagtctgcaacctctgggagattacggagtgggttctaagaacagcaagagagcaagagagaagcgggatagtcgaaacatggaggtgcaggtgactcaagaaatgcgcaacgtgtccatcggcatggggtcctctgacgaatggagcgacgtccaggatattatcgactccacccccgaattagacatgtgcccagagacacgtctggatagaaccggcagcagcccaacacagggaatcgtgaacaaggcctttggcataaataccgatagtctctaccacgaattgtccacagccggctcagaggtgattggggacgtggacgagggagccgatttgctgggggaattcagcgttagggacgatttttttggaatgggcaaggaggtgggaaacctgctcctcgaaaattcccaattgctagaaactaaaaatgcgttaaacgtcgttaaaaatgacctgatcgccaaggtggaccaactctccggcgaacaggaagttttaagaggagagctcgaggctgctaagcaggccaaagtgaaactagagaaccgaattaaagaactcgaggaagagctcaaaagagtgaagagcgaagcgatcatagctcggcgggaaccaaaggaggaagccgaggatgtcagcagttatctgtgtaccgagagtgacaagatccctatggcccagcggcgtcggttcaccagagtggaaatggcccgggtgctgatggagcgcaatcaatacaaggaacggttgatggaactccaggaggccgttagatggacagaaatgatccgcgcctctagggagcatcctagcgtgcaggaaaaaaaaaaatcaacaatctggcagttcttctcccggctcttctctagcagtagcagccccccgccggcgaaacggccgtaccctagcgtgaacattcattacaagtctccgactactgcaggtttctcacagcgccgtaaccacgccatgtgtcccatttccgctggttctcgcccattggagtttttccctgacgatgattgtactagttcagcacggagagaacagaaacgggagcaataccgccaggtgagggaacatgtgagaaatgatgacggccggttacaagcctgcgggtggagtctacccgcgaagtacaaacagctgtcccccaatggcggacaggaggacacaagaatgaagaatgtccctgttccggtgtattgtaggcccttggtggagaaggatcccactatgaaactctggtgtgccgcgggagtcaatctctccggttggaggccaaatgaggatgatgctggtaatggtgtcaagcccgccccaggccgggatcctctgacttgcgaccgggaaggggatggcgagcccaaatccgcacataccagtcccgagaagaagaaggcaaaggagcttcccgagatggatgccacttcatcacgggtctggatccttacaagcaccctgacaacaagtaaagtggtaattattgatgccaatcagcccgggaccgtcgtggaccagtttactgtgtgcaatgcacacgtgctgtgtatctcttcaatcccagctgcgtccgattccgactatccccccggggagatgtttctcgatagtgatgtaaaccctgaagaccctggcgctgacggagtgcttgccggaatcacattagtagggtgtgcgacgagatgcaacgtccccagatctaattgttcttctcggggcgacacccccgtcctcgataaagggcagggcgaggtggctacaattgcgaacggcaaggtcaatccaagtcaatccaccgaagaagcaacggaggccaccgaggttccagatcctggcccaagcgagcccgagacggccacactccggcctggacctctgacagagcacgttttcacagaccccgccccaacaccttctagtgggcctcagcctggcagcgagaacggtccagaaccagacagttcctcaacacgccccgagcccgaacccagtggggacccaactggcgcgggctcctcagccgcacctacgatgtggctgggagcccaaaacggctggctgtatgtccacagtgcagtggccaattggaaaaagtgcctgcacagcattaaactgaaggatagtgtgctgtctcttgtccatgtaaagggccgtgtgctcgtcgccttagccgacggcactttggccatattccaccgcggcgaggatggtcagtgggacctgagcaactatcacctgatggacctgggccatccccaccacagtatcagatgcatggctgtggtgtatgacagagtgtggtgtggatataaaaacaaagtccatgtcatccaacctaaaacaatgcagattgaaaaatcttttgacgcccatcccaggagggagtcacaagttcgtcagctggcctggatcggcgacggggtgtgggttagcatacggcttgactcgactctgcgtttgtatcacgcccacacccaccaacatctgcaggacgttgatatcgagccctatgtcagcaagatgctcggcactggtaaactgggattttcattcgtgcgcatcactgcattgctcgtcgcgggaagtaggctgtgggttgggacggggaatggggtcgtgattagtattccattgaccgagaccgtcgttctgcaccgtggccagctgctgggacttagagcaaacaagacttcaccgaccagcggcgaaggagcacgccctggaggaataattcacgtttatggcgacgattcttcagacagagctgcatcctcttttataccctattgcagtatggctcaagcccagctgtgttttcacggccaccgcgacgcggttaagttcttcgtctccgtgccaggcaacgtgttggccactctaaacggaagcgttctggactcacctgcggaagggcccgggcctgccgccccagcatctgaagtggagggccagaaattgcggaatgtgttggtactgagcggcggtgaaggctatatagatttcagaatcggtgatggtgaggacgacgaaacggaggagggcgcaggagacatgagccaggtcaaaccagtcctctcgaaggcagaaagaagccatattattgtgtggcaggtgagctacacgcctgaatag

SEQ ID NO: 184612 - DNA, 4011 bp, Artificial Sequence
  derived and/or modified sequence
atgatggagatccagatggatgaaggaggaggagtggtggtgtaccaggatgactactgcagcggctctgtgatgtctgagcgggtgtctggcctggccggcagcatctaccgggagtttgagcggctcatccactgctatgatgaggaggtggtgaaggagctgatgcccctggtggtgaatgtgctggagaacctggacagcgtgctgtctgagaaccaggagcacgaggtggagctggagctgctgagagaagataatgagcagctgctgacccagtatgaaagagagaaggccctgcggcggcaggccgaggagaagttcattgaatttgaagatgccctggagcaggagaagaaggagctgcagatccaggtggagcactatgagttccagacccggcagctggagctgaaggccaagaactatgctgaccagatcagccggctggaggagcgggagagcgagatgaagaaggagtacaatgccctgcaccagaggcacacagagatgatccagacctacgtggagcacatcgagaggagcaagatgcagcaggtgggcggcaacagccagacagagagcagcctgcccggccgcaggaaggagcggcccaccagcctgaatgtgttccccctggctgatggcaccgtgcgggcccagatcggcggcaagctggtgcctgctggggaccactggcacctgagtgacctgggccagctgcagagcagcagcagctaccagtgcccccaggatgagatgtctgagagcggccagagcagcgctgctgccacccccagcaccaccggcaccaagagcaacacccccaccagctctgtgcccagcgctgctgtgacccccctgaatgaaagcctgcagcccctgggggactatggagtgggcagcaagaacagcaagagggcccgggagaagagggacagcaggaacatggaggtgcaggtgacccaggagatgagaaatgtgtccatcggcatgggcagcagtgatgagtggagcgatgtgcaggacatcatcgacagcaccccagagctggacatgtgcccagagacccggctggacagaacaggcagcagccccacccagggcatcgtgaacaaggccttcggcatcaacacagacagcctgtaccacgagctgagcacagctggcagcgaggtgattggagatgtggatgagggcgctgacctgctgggggagttctctgtgagagatgacttcttcggcatgggcaaggaggtgggcaacctgctgctggagaacagccagctgctggagaccaagaatgccctgaatgtggtgaagaatgacctgattgccaaggtggaccagctgagcggggagcaggaggtgctgcggggggagctggaggccgccaagcaggccaaggtgaagctggagaaccgcatcaaggagctggaggaggagctgaagagggtgaagtctgaggccatcatcgcccggcgggagcccaaggaggaggccgaggatgtgagcagctacctgtgcacagaaagtgacaagatccccatggcccagaggcggcgcttcaccagggtggagatggcccgggtgctgatggagaggaaccagtacaaggagcggctgatggagctgcaggaggccgtgcgctggacagagatgatccgggccagccgggagcaccccagcgtgcaggagaagaagaagagcaccatctggcagttcttcagccgcctcttcagcagcagcagcagccccccaccagccaagaggccctaccccagcgtgaacatccactacaagagccccaccacagctggcttcagccagaggaggaaccacgccatgtgccccatctctgctggcagccggcccctggagttcttcccagatgatgactgcaccagcagcgcccggcgggagcagaagcgggagcagtaccggcaggtgcgggagcacgtgagaaatgatgatggccgcctgcaggcctgtggctggagcctgcctgccaagtacaagcagctgagccccaacggcggccaggaggacaccaggatgaagaatgtgcctgtgcctgtgtactgccggcccctggtggagaaggaccccaccatgaagctgtggtgtgccgccggcgtgaacctgagcggctggaggcccaatgaagatgatgctggaaatggagtgaagccagcccctggccgggaccccctgacctgtgaccgggagggagatggagagcccaagagcgcccacaccagccctgagaagaagaaggccaaggagctgcctgagatggatgccaccagcagccgggtgtggatcctgaccagcaccctgaccaccagcaaggtggtgatcattgatgccaaccagcccggcaccgtggtggaccagttcaccgtgtgcaatgcccacgtgctgtgcatcagcagcatcccagctgccagtgacagcgactacccacctggagagatgttcctggacagtgatgtgaacccagaagatcctggagcagatggagtgctggccggcatcaccctggtgggctgtgccacccgctgcaatgtgcccaggagcaactgcagcagcagaggagacacccctgtgctggacaagggccagggcgaggtggccaccatcgccaacgggaaggtgaaccccagccagagcacagaggaggccacagaggccacagaggtgcctgaccccggccccagcgagcctgagacagccaccctgcggcccggccccctgacagagcacgtgttcacagatcctgcccccacccccagcagcggcccccagcccggctctgaaaatggacctgagccagacagcagcagcaccaggcctgagcctgagcccagcggggaccccactggagctggcagcagcgctgcccccaccatgtggctgggcgcccagaatggctggctgtatgtgcacagcgctgtggccaactggaagaagtgcctgcacagcatcaagctgaaggacagcgtgctgagcctggtgcacgtgaagggccgggtgctggtggccctggctgatggcaccctggccatcttccacagaggagaagatggccagtgggacctgagcaactaccacctgatggacctgggccacccccaccacagcatccgctgcatggctgtggtgtatgacagagtgtggtgtggctacaagaacaaggtgcacgtgatccagcccaagaccatgcagatcgagaagagctttgatgcccacccccggcgggagagccaggtgcggcagctggcctggattggagatggagtgtgggtgtccatccggctggacagcaccctgcggctgtaccacgcccacacccaccagcacctgcaggatgtggacatcgagccctacgtgtccaagatgctgggcaccgggaagctgggcttctcctttgtgcgcatcacagccctgctggtggccggcagccggctgtgggtgggcactggaaatggagtggtgatcagcatccccctgacagagaccgtggtgctgcaccggggccagctgctgggcctgcgggccaacaagaccagccccaccagcggggagggcgcccggcctgggggcatcatccacgtgtatggagatgacagcagtgacagagctgccagcagcttcatcccctactgcagcatggcccaggcccagctgtgcttccacggccacagagatgctgtgaagttctttgtgtctgtgcctggaaatgtgctggccaccctgaatggatctgtgctggacagccctgctgagggccctggccctgctgccccagccagcgaggtggagggccagaagctgagaaatgtgctggtgctgagcggcggggagggctacatcgacttcagaattggagatggagaagatgatgaaacagaggagggcgctggggacatgagccaggtgaagcctgtgctgagcaaggccgagaggagccacatcatcgtgtggcaggtgtcctacaccccagagtag

SEQ ID NO: 184613 - DNA, 5651 bp, Artificial Sequence
  derived and/or modified sequence
gcagcctcggcagcggcggcggcggagccctgaggcgacagcagctgcgggaggcgacgggctgcggcctgcggaacctgaggcagctggggagggccgggcgcgccggccggatagcgagccgcgctggcggcggcggtggccgcgatgatggagatccagatggacgagggcggcggcgtggtggtgtaccaggacgactactgctccggctcggtgatgtcggagcgggtgtcgggcctggcgggctccatctaccgcgagttcgagcgcctcatccactgctacgacgaggaggtggtcaaggagctcatgccgctggtggtgaacgtgctggagaacctagactcggtgctcagcgagaaccaggagcacgaggtggagctggagctgctgcgcgaggacaacgagcagctgctcacccagtacgagcgtgagaaggcgctgcgcaggcaggcggaggagaaattcattgagtttgaagatgctctggaacaagagaagaaagagctgcaaatccaggtggagcactacgagttccagacgcgccagctggagctgaaggccaagaactatgccgatcagatttcccggttggaggagcgggagtcggagatgaagaaggagtacaatgccctgcaccagcggcacacagagatgatacagacctacgtggagcacattgagaggtccaagatgcagcaggtcggaggaaacagccagaccgagagcagcctgccggggcggaggaaggagcgccccacctccctgaacgtgttccccctggctgacggcacggtacgtgcacagatcgggggcaagctcgtgcctgcgggggaccactggcacctgagtgacctcggccagctgcagtccagctccagctaccagtgtccacaggatgaaatgtccgagtcaggccagtcctcggcggccgccacacccagcaccacaggcaccaagtccaacacgcccacatcctccgtgccctcggccgccgtcacacccctcaacgagagcctgcagcccctgggggactatggcgtgggctccaagaacagcaagcgtgcccgggagaagcgcgacagccgcaacatggaagtacaggtcacccaggagatgcgcaacgtcagtataggcatgggcagcagtgacgagtggtctgatgttcaagacattattgactccacgccagagctggacatgtgtccagagacccgcctggaccgcacaggaagcagcccaacccagggcatcgtgaacaaagctttcggcatcaacaccgactccctgtaccatgagctgtcgacggcagggtctgaggtcatcggggatgtggacgaaggggccgacctcctaggggagttctcagtgcgcgatgatttctttggaatgggcaaagaagtggggaatctgctactggaaaactcacagcttctggaaaccaaaaacgccttgaatgtggtgaagaatgacctgattgccaaggtcgaccagctgtccggggagcaggaggtgctgaggggcgagttggaggctgctaagcaggccaaagtcaagctggaaaaccgtatcaaggagctggaagaggaactgaaaagagtgaagtccgaggccatcatcgcccgccgtgaacccaaagaagaggcggaggatgtaagcagctatctctgtacagaatcggacaaaatccccatggcccagcgccgccgcttcacgcgggtggagatggcccgtgtgctcatggagcggaaccagtacaaggagcggctgatggagctgcaggaggctgtgcggtggactgagatgatcagagcgtcccgagagcacccatccgtccaggagaagaagaagtcgaccatctggcagttcttcagccgcctcttcagctcttcctccagcccccctccggccaagcgcccctatccctcggtgaacatccactacaagtcacccaccactgccggcttcagccagcgccgcaaccatgccatgtgcccgatctcggcaggcagccggcccctggaattcttccctgacgacgactgcacgtcctccgcccgtcgagagcagaagcgcgagcagtaccgccaggtgcgtgagcacgtgcgtaacgacgacggccgtctgcaggcctgcggctggagcctgcccgccaagtacaagcagctgagtcccaacgggggccaggaggacacgcggatgaagaacgtgccggtgccggtgtactgccgccctctggtggagaaggaccccaccatgaagctgtggtgtgccgcgggcgtcaacctgagcgggtggaggcccaatgaggacgacgctgggaatggagtcaagccagcgccaggccgcgatcccctgacctgcgaccgcgaaggagacggcgagcccaagagcgcccacacgtctcccgagaagaagaaggccaaggagctccctgaaatggacgccacctccagccgggtgtggatcctgaccagcaccctgaccaccagcaaggtggtgatcatcgacgccaaccagccgggcacggtggtggaccagttcaccgtctgcaacgcgcacgtgctgtgcatctccagcatccccgcggccagcgacagcgactaccctcccggggagatgttcctggacagcgacgtgaacccagaggacccgggcgcagatggcgtgctggccggtatcaccctggtgggctgtgccacccgctgcaacgtgccgcggagcaactgctcctcccgaggggacaccccagtgctagacaaggggcagggggaggtggccaccatcgccaacgggaaggtcaacccgtcccagtccacagaggaggccacagaggccacggaggtgccagaccctgggcccagcgagccagagacagccacattgcggcccgggcctctcacagagcacgtcttcactgacccagccccgaccccgtcctctggcccccagcctggcagcgagaacgggccagagcctgacagcagcagcacacggccagagccagagcccagcggggaccccacgggagcaggcagcagtgctgcacccaccatgtggctgggagcccagaacggctggctctatgtgcactcggctgtggccaactggaagaagtgcctgcactccatcaagctgaaggattctgtgctgagcctggtgcatgtcaaaggccgtgtgctggtggctctggcggacgggaccctggccatcttccaccgtggtgaagatggccagtgggatctgagcaactatcacctaatggacctgggccacccgcaccactccatccgctgcatggctgttgtgtacgaccgcgtgtggtgtggctacaagaacaaggtgcacgtcatccagcccaagaccatgcagatagagaagtcatttgacgcccacccgcggcgggagagccaggtgcggcagctggcgtggatcggcgatggcgtatgggtgtccatccgcctggactccaccctgaggctctaccatgcacacacgcaccagcatctacaggacgtggacattgagccctacgtcagcaagatgctaggcactggcaagctgggtttctccttcgtacgcatcacggccctgcttgtcgcgggcagccggctctgggtgggcaccggcaacggagtggtcatctccatccccctgacagagactgtggtcctgcaccgaggccagctcctggggctccgagccaataagacatcccccacctctggggagggcgcccgtcccgggggcatcatccacgtgtatggcgatgacagcagtgacagggcggccagcagcttcatcccctactgctccatggcccaggcccagctatgcttccatgggcaccgcgatgccgtgaagttctttgtctcggtgccagggaacgtgctggccaccctgaatgggagtgtgctggacagcccagccgagggccctgggccagctgcccctgcctcggaggtcgagggccagaagctgcggaacgtgctggtgctgagcggcggggagggctacatcgacttccgcattggagacggagaggacgacgagacggaggagggcgcaggggacatgagccaggtgaagcccgtgctgtccaaggcagagcgcagtcacatcatcgtgtggcaggtgtcctacacccccgagtgaagctgctgccctgcctggcccgacctgtacataggacccccgaccacctgacccccgcccggcccgcggggtagccagccaggcgccgccgcccctcttctaacctctcaacctgcagctttcacctgagtctggcccctccagcgggcagggagtgcggggatgcggatcagctgggaggaggaggggaggggaacttccacccgaggggaagatgctctcgggacagtttcccgggcagctcctggccagcttccagcccagagtcctcaagtccagggcaccttgggcccagcgcaggcagaatccgaggtggtcctggctctaccctgggcctcctactccccagcacccctggaggaggcaggggctccccgccgccgaggctgcctgccctgggcccacctctgcatgctgctcatggggccaccctgcctcctgggccctcactctgcctaggggagctgggccaggcactagcctttgcccagggaggtgggcctcaggctgcccaggtgcctgcaccccagccggccttctctggggcctccccgtcgtcaagcctctatcctgtctgtccccaccccagctgtcccctgcccagggagctggcataaaagcacgaggcccggctccctggggcagctgcttgagaacagagactgctaccccatcctgcccatgcaggcaggctcttgccagccccgttctgacccgtgtccccccaggctctgcctgggcagaagactcaccttggaggagtgggccctggagtcctgtccctcccagaagcccccagggtgggatttctcaggctgccagggcaggcccaggcctcaggaagaaggggaggcccctggcctctccgggatcagtcctaggacacaggctcagcctcaggttgatgggggatgatgtgctcccggggcctgcctcctgcacggggctccacggagcccagctcccagacacgctactaagtgcctagggttgcccgctgtggcctgcttccagggagcaacagagaggccaccaagcagaggcccgtggggctgaggatggagccgcccccagccgactccaagcccgcagagggcagacgccaccctggactgctctccctgcccagctgggcctctctggcctattcctaccttccaggcccactgcactcctgtctgggaggcccttatgagggcagcccagcccccgcacccacccccaaccagagaagcacagatcttggggagctgccccacaagccccgctggccaccgagggctgcagccgctgcgctgccggcttctccccaccaccctgccacctccactgtgatgtatgtccgctccctcgtctgttcccccaggatctcgaagtgactccgggctgagcagtggggcggctgggggaggggtgacgattctcctcaggctttggccctgcaagcaaacccacatatctgctctgtatgtaataaatgtcttaacgtcgta

SEQ ID NO: 184614 - DNA, 4011 bp, Artificial Sequence
  derived and/or modified sequence
atgatggagatccagatggacgagggcggcggcgtggtggtgtaccaggatgactactgctccggctctgtcatgagcgaaagggtttccgggcttgccgggagtatctaccgggaatttgagcgtctcatacattgctatgacgaggaagtagtgaaggagctgatgcccctggtcgtcaatgttctagaaaatctggattccgtgctgagcgaaaatcaggagcacgaagtcgagctggagctgctaagagaggataatgaacagctgctgacccagtacgagagagagaaggcgctgaggcgccaggcggaagagaagtttatcgaattcgaggacgctctagagcaggagaagaaggagctgcagatccaggtcgagcactacgagttccaaacgcgtcagctggaattgaaagccaaaaattacgcggaccagatctctagactggaagagcgggagagcgagatgaagaaagagtacaacgcactccatcagagacataccgagatgattcagacctacgtagagcacatagaacgatccaagatgcagcaggttggcggtaacagccaaacggagtcaagcctgccaggcaggcggaaggaaagacccactagtttgaacgttttcccactcgccgatggcaccgtgcgggcacaaattggaggcaagctcgtgccagcgggagatcactggcacttaagcgatttgggacaactgcagtcatcttcatcttatcagtgtccgcaagatgagatgagtgaaagcggacaatcgagcgccgcagccaccccaagtacgacaggaaccaaatccaacaccccaacatcctcggtcccatcggcagccgtgactccgcttaatgagtcactgcagcctctgggcgattacggtgtgggctcaaagaactctaaacgggctcgagaaaagcgagatagccgtaacatggaggtacaagttacccaagagatgaggaatgtttcaatcgggatgggatcctccgatgaatggtccgacgtgcaggatatcatagactcaacgcctgagctggacatgtgccctgagacgcgtctcgaccgcaccggtagcagcccgactcagggtatcgtgaataaggccttcggcattaatacggacagcctttatcatgagctgtctaccgctggatccgaggtaatcggtgacgtggacgagggtgctgacctgttaggcgagttctccgttcgggacgacttttttggcatgggaaaagaggttggcaacctgctgctggagaactcccagctgctcgaaactaaaaacgccctgaacgttgtgaaaaacgatctgattgcaaaggtggaccagctgtccggcgagcaagaagtgctgcggggcgagctggaggcagcgaagcaagcaaaagtgaaactcgaaaaccggatcaaggaactggaagaggagctaaaaagagtaaaatctgaggctattatcgcccgtcgagagcctaaggaggaggccgaggatgtgtcttcttacttatgtaccgagtctgacaagatacccatggctcagaggaggcgctttacgcgcgtggagatggctcgggtgcttatggagagaaatcagtataaagagcgcttaatggagctgcaggaagcagtgcgatggaccgagatgatcagagcaagtagggaacacccctccgtgcaggaaaaaaaaaagagcactatctggcagtttttctctagacttttcagctctagttcctccccccctccagccaaacgaccttatcccagtgtaaacattcactataagagtccaacgaccgctgggttctcccaacggagaaatcatgcaatgtgccctatctcagcgggttctcgcccacttgagtttttccctgatgatgattgtacaagcagtgccagaagagaacagaaacgtgaacagtataggcaggttcgcgaacatgtgcgcaatgatgacggccgcctgcaggcgtgcggttggtcgttaccggccaaatataagcagctttcacccaacggcggccaagaggacacccgtatgaagaatgtccctgtgcccgtctactgccgcccactcgtagaaaaagatcctactatgaagctttggtgcgcagccggagtgaacctcagcggttggagacctaacgaggatgatgcagggaacggggtgaaaccggcacccggaagggatccccttacttgcgatagggaaggtgatggggagcccaaatctgcccatacatccccagaaaaaaagaaggccaaagagttgcctgagatggatgccacctcctcacgagtttggattctgacaagcaccctgactacttccaaggtggtgattatagatgctaaccagcccggaaccgttgtcgatcagttcaccgtatgcaacgctcacgtgctgtgcatttcctctatcccagccgcgagcgacagtgattaccctccgggtgaaatgttcctggactctgatgttaacccagaagatcctggcgccgatggtgtgcttgcagggatcacccttgtcggatgtgccaccagatgcaatgtccccaggagtaactgcagctcacgtggcgatacccctgtcctggacaaagggcaaggcgaggtggccaccatcgccaatggaaaagtcaatccaagtcagagtaccgaggaggccacggaggctacagaggttcccgaccctggcccgtctgaacctgaaactgcaacccttagaccaggccctctcaccgaacacgttttcactgacccagctcccaccccttcaagcggccctcagcctgggtctgaaaatggcccagagcccgattccagctcgacgcggccagagccggaaccatccggagatcctacgggtgccggatcatcagctgcccctaccatgtggctgggggcccagaatggctggctgtacgtgcacagcgctgtggctaattggaagaaatgtctacacagtattaagctaaaagattctgtattgtccctggttcacgtcaaaggtcgggttctcgttgcactggccgacggcacactcgccatcttccatagaggcgaagacggtcagtgggatctttcgaattatcaccttatggacctgggccacccccatcacagcataagatgtatggccgttgtgtatgacagggtatggtgtggctacaaaaacaaagtgcacgttatccagcctaagacaatgcagattgaaaagtccttcgacgctcacccccgtagagaatcacaggtgaggcagttggcttggattggggacggcgtctgggtgtcgatccggctcgatagcaccttgcggctataccacgctcatacccatcagcacctccaggatgtggacatcgagccctacgtgtcaaagatgcttggtacaggaaagctggggttttcttttgtcaggatcaccgctttacttgtggccggctctagactatgggttggtactggaaatggagtggttatcagtatcccactgaccgaaaccgtcgttttgcatcgaggtcaattgttgggtttacgtgctaacaagacctccccaacatctggtgaaggcgcaagacctggagggattattcacgtttacggcgatgactcctctgacagagcagcttcaagtttcataccgtattgtagcatggcgcaagctcaactatgctttcacggtcaccgggatgccgtgaaattctttgtttcagtgcccgggaacgtgcttgcgacattaaacgggagtgttctggatagccctgctgagggcccgggtcctgcggcgccagcaagtgaggtggagggtcagaaattgagaaatgtgctggtgctgtctggcggtgagggctatattgactttcggatcggcgatggggaggatgacgagacagaggaaggggccggtgacatgtctcaggtgaagcctgtactgagcaaagccgagaggagccacattattgtgtggcaggtatcctacactcctgagtag

SEQ ID NO: 184615 - DNA, 4011 bp, Artificial Sequence
  derived and/or modified sequence
atgatggaaatccagatggacgaaggtggtggtgtagtcgtgtatcaggacgattactgtagtggcagtgtgatgtctgagagggtgagcggcctcgctggaagtatctatagggagttcgagagactgatacactgctacgacgaagaggtggtgaaggagttgatgccccttgttgtgaacgtgttggaaaacctcgactcggtcctgagcgagaaccaggaacatgaagtcgagcttgaactgttgcgcgaagacaatgaacagctcctgacgcagtatgagcgggaaaaggcgctgagaagacaggccgaggagaagttcatagagttcgaagatgctctggagcaagaaaaaaaggagctccagatacaggtggaacattacgaattccagactagacaactcgagctaaaggcaaagaattatgccgatcagatttcgcgattggaagagcgcgagagcgaaatgaagaaggaatacaatgcactacaccagcggcatacggagatgatccagacgtacgtcgagcacattgaaaggtctaagatgcaacaggtggggggtaattcacagacggaatcctctcttcctggacgcaggaaggagcggcctacctcactgaacgtgtttcctttagccgacggcactgtcagggctcagatcggcggaaagttggtccccgctggcgatcattggcacctctctgacctgggtcagttacagtcttctagcagctaccagtgtccccaggacgagatgtcagaaagcggccagagctctgccgctgctacaccatcgacaactgggactaaaagcaataccccaacatcgagcgttccaagtgcagctgttacacccctgaacgaatccctccagccacttggtgactatggagtgggatcaaagaatagcaagcgggctagggaaaaacgggactctagaaatatggaggtgcaggtgacacaagagatgaggaatgtttccatcgggatgggttccagtgatgagtggtccgatgtccaggacatcatcgacagcaccccggagctggatatgtgccccgaaacccgtctggatcgtaccggctcctccccgacccaagggatcgtaaacaaagcctttgggataaacactgactccctctaccacgaattatccacagcgggatcagaggtaattggcgatgtggacgaaggcgctgacctcttaggagaattctctgttcgtgacgacttctttggcatggggaaggaagtagggaatctactgctggagaattcgcagctgctcgaaacaaagaatgccctgaacgtggtgaagaatgatctcatcgctaaagtcgatcagcttagcggagaacaggaggtgctgagaggggaattggaggcggctaagcaggcaaaggttaaactggagaataggattaaagaactcgaagaagaactcaaacgggttaagtccgaggcgattatagcaagacgagagccaaaggaagaggccgaagacgtgagcagttatctgtgcactgagagcgataagatccctatggcacagcgccgtcggtttactcgggtcgagatggctcgagtgctcatggaacgtaaccagtataaagagagattgatggagctgcaagaagcagtaaggtggacggaaatgatcagagcatcccgggagcacccctcagtgcaggagaagaagaaaagtacaatctggcagttcttctctaggctcttctccagctcttccagccctcccccagctaaaagaccgtatcctagcgtcaacattcattacaaatctccaaccactgctggattttcccagagacggaatcatgccatgtgtccaatctccgctggatcaagaccattagagtttttcccggacgatgattgcacaagctctgcccgacgcgaacagaaacgtgagcagtaccggcaggttcgggagcacgtaaggaatgacgacggcaggcttcaggcatgcggctggagccttcctgccaagtataaacagttgtctcccaacggcggacaagaagacacccggatgaaaaacgttccggtgcccgtctattgtcgcccattggttgaaaaagatcccactatgaagctgtggtgtgccgctggggtgaatctgtcaggatggagacccaatgaggatgatgccggaaatggcgttaaaccagctccaggtagggaccccttgacttgtgatagagagggtgacggagaacccaagagtgcacacacctcccctgaaaaaaagaaggcaaaggagctacccgaaatggacgccaccagcagccgggtctggattctgacctccacactgaccacatctaaggtggtgatcatcgatgctaatcagcctggcacagttgttgatcagttcacagtctgcaacgcccacgtgctgtgtatttcctcaatccccgcagcaagtgactcggattatccccctggggaaatgttcctagacagcgatgtcaaccccgaggaccccggagccgacggggtgctagccggaatcaccctggtagggtgcgccactcgttgtaacgtgccgagaagtaattgcagtagccgcggtgataccccagttttggacaaaggacagggggaggtggcgactatcgccaacgggaaggttaacccatctcaatccacagaagaggctacagaggccacagaagtaccggaccccggtcccagcgagcccgagaccgctaccctgcgtccgggaccattgacagagcatgtttttacagaccccgcaccaacaccgagctccggcccacagcccggatctgaaaatggcccagagcctgattcttcttctacgcggccagaaccagagcctagcggggatcccaccggagccggtagctccgccgctccgacaatgtggctgggcgcacagaacggttggctctacgtccatagcgctgtggccaactggaaaaagtgcttgcactcaataaaacttaaggacagcgtcctgagtctcgtccacgttaaaggcagagtactggtggcactggccgatgggacactcgccattttccataggggtgaggacgggcagtgggatctttcaaattatcacctgatggacctagggcatccacaccacagcatcagatgtatggccgtcgtgtatgacagggtgtggtgcggatacaagaacaaggtgcatgtgatccagcccaaaactatgcagatcgagaagagctttgacgcccaccctcgccgagagagtcaggttcggcagctcgcgtggatcggggatggagtctgggtcagcattcggctcgattctacattgcgcctctatcacgcgcacacacatcagcatctgcaggatgtggacatcgagccatatgtgtccaaaatgttaggcaccgggaaactgggatttagttttgtgcggattactgctctgcttgtcgccggttctcggctgtgggtgggtacaggcaatggggtggtaatctccattcccttaacagagacagttgtactccaccgcggtcagctactcggcctgcgcgctaacaagacttcaccgacttctggggaaggagccagaccgggtgggattatacatgtgtacggagatgacagtagcgatagggccgcaagcagctttatcccgtactgctctatggcacaagcccagctatgcttccatggccaccgtgatgccgtcaagttctttgtgagcgtcccgggtaacgtgttggcaacgctgaatggaagcgtcttagatagccccgctgagggcccaggacctgctgcaccagcttctgaagtggaggggcagaaacttcggaacgtgcttgtattaagcggcggagagggatacattgatttcaggataggggatggcgaggatgacgagacagaagaaggggcaggtgatatgagccaggtaaaacctgtcttgtcaaaagcagagcgctctcatatcatagtctggcaggtgtcttataccccagaatag

SEQ ID NO: 184616 - protein, 1038 aa, Artificial Sequence
  derived and/or modified sequence
MSAAKENPCRKFQANIFNKSKCQNCFKPRESHLLNDEDLTQAKPIYGGWLLLAPDGTDFDNPVHRSRKWQRRFFILYEHGLLRYALDEMPTTLPQGTINMNQCTDVVDGEGRTGQKFSLCILTPEKEHFIRAETKEIVSGWLEMLMVYPRTNKQNQKKKRKVEPPTPQEPGPAKVAVTSSSSSSSSSSSIPSAEKVPTTKSTLWQEEMRTKDQPDGSSLSPAQSPSQSQPPAASSLREPGLESKEEESAMSSDRMDCGRKVRVESGYFSLEKTKQDLKAEEQQLPPPLSPPSPSTPNHRRSQVIEKFEALDIEKAEHMETNAVGPSPSSDTRQGRSEKRAFPRKRDFTNEAPPAPLPDASASPLSPHRRAKSLDRRSTEPSVTPDLLNFKKGWLTKQYEDGQWKKHWFVLADQSLRYYRDSVAEEAADLDGEIDLSACYDVTEYPVQRNYGFQIHTKEGEFTLSAMTSGIRRNWIQTIMKHVHPTTAPDVTSSLPEEKNKSSCSFETCPRPTEKQEAELGEPDPEQKRSRARERRREGRSKTFDWAEFRPIQQALAQERVGGVGPADTHEPLRPEAEPGELERERARRREERRKRFGMLDATDGPGTEDAALRMEVDRSPGLPMSDLKTHNVHVEIEQRWHQVETTPLREEKQVPIAPVHLSSEDGGDRLSTHELTSLLEKELEQSQKEASDLLEQNRLLQDQLRVALGREQSAREGYVLQATCERGFAAMEETHQKKIEDLQRQHQRELEKLREEKDRLLAEETAATISAIEAMKNAHREEMERELEKSQRSQISSVNSDVEALRRQYLEELQSVQRELEVLSEQYSQKCLENAHLAQALEAERQALRQCQRENQELNAHNQELNNRLAAEITRLRTLLTGDGGGEATGSPLAQGKDAYELEVLLRVKESEIQYLKQEISSLKDELQTALRDKKYASDKYKDIYTELSIAKAKADCDISRLKEQLKAATEALGEKSPDSATVSGYDIMKSKSNPDFLKKDRSCVTRQLRNIRSKSLKEGLTVQERLKLFESRDLKKD

SEQ ID NO: 184617 - DNA, 3117 bp, Artificial Sequence
  derived and/or modified sequence
atgagtgccgcaaaagaaaacccttgtcgtaaatttcaagctaacatctttaacaagagcaagtgtcaaaattgctttaaacccagggaaagccacctcctgaatgatgaggacctgacacaggcaaagccaatttatggtggatggctactgctggccccggatggaacagatttcgataatcccgtccacaggtcccgcaagtggcagcgcagattctttatactttatgaacacgggcttcttcgatatgctcttgacgagatgcctaccactttaccccagggaacaattaacatgaaccagtgcacggacgtggtggacggcgaagggagaacaggacagaaattttcactgtgcatcctaacccccgaaaaagagcactttataagggctgaaacaaaggaaattgtttctggatggttggaaatgctcatggtttacccaagaacaaacaaacaaaaccagaagaaaaagcgcaaggtggagccacctactccacaagaacccggcccagcgaaagtggctgtgacatcaagtagttcaagttcgtcctcatctagcagtataccaagcgccgagaaagttcctaccactaaaagcaccctgtggcaagaggaaatgcgcacaaaggaccagcccgatgggtcttcactttccccagctcagagtccctcgcagtcccaaccacccgccgcatcatcgcttagagaacccggactggaatccaaagaggaagagagtgccatgtctagcgatcgcatggattgcggaagaaaggtgagggttgaaagcggctacttcagtctggagaagaccaagcaggacctaaaggctgaagaacagcaacttccacctcctctgtctccgcctagtcctagtacacctaaccacagaagaagccaagtcattgaaaaatttgaggctctggatatcgaaaaggcagagcatatggaaaccaacgcggtgggccctagcccttccagtgacacaaggcagggcaggtccgaaaagagagccttcccaaggaagcgggacttcactaacgaagcaccgcctgcaccactaccagacgcatctgcatcccctcttagtccacaccggagagccaagagcctggacagaagatctaccgaaccctcagtaacgcctgatctactcaattttaaaaaaggatggctgaccaaacagtacgaagacggacagtggaagaagcactggtttgtgctggctgaccagagtctgcgctactacagagacagtgtggcagaagaagcggccgatcttgacggggagatagacctcagtgcatgttatgatgtgacagaataccctgtgcagaggaactacggatttcagattcacaccaaagagggtgagttcacattatcagccatgactagtggaattcgcaggaattggattcaaaccatcatgaaacacgtgcaccctacaactgcaccagacgtaacttctagtctccccgaagagaagaacaagtcttcttgttctttcgaaacttgcccaagacccactgaaaaacaggaagcggagttaggagagccagatcctgagcagaagcgatctcgcgcaagggagagacgtagagaaggtagaagcaaaacattcgattgggcagagtttcggccaattcagcaggccctggcccaggagagggtcggtggtgtggggcctgccgacacccatgagcctttgaggcccgaagccgaaccaggtgagctggagagggagagggccaggcggagagaggagcgtagaaaacggtttggtatgctggacgccaccgacggtcccggaacagaagacgccgcactgcgaatggaggtagacaggagtcccgggctaccaatgtccgatctgaagactcataacgtgcacgtggagatcgagcagaggtggcaccaagtagaaaccacccctctccgggaggaaaagcaagtgcccatcgcaccagttcacctgtctagtgaggatggaggtgatcggctctcgacacacgaactgacctccctgcttgagaaggagctggagcaatcacagaaggaggcatctgacctgcttgaacagaaccggctcctgcaggatcaactaagagtggcgctcgggcgcgagcagagtgcacgagaggggtacgtgcttcaggctacatgcgagcgcgggttcgcagctatggaagagacgcatcagaagaaaatagaggacctccagaggcagcaccagcgggaactcgagaagctgcgtgaagagaaggatcgactcctcgcagaagaaacagcagcaactatcagtgctatcgaggctatgaagaacgcccatcgcgaggaaatggagcgcgaacttgaaaagagccaaaggtctcagataagctctgtaaactcggatgttgaggccctccgcaggcagtacctggaggagctgcagtccgtgcaacgcgagctggaggttttaagcgagcagtacagccagaagtgtctcgagaacgctcaccttgcccaagctctggaggctgaaaggcaagcacttcgccaatgccagcgcgaaaaccaggagctgaatgcgcataatcaggaactcaacaaccgattagccgctgaaattacacggctccgaaccctgctgacgggcgatggaggtggggaagccactggaagtccccttgcccagggaaaggacgcctacgagctggaggtgctcctgagggtgaaggagtcggagatccaatatttgaagcaggaaatttcatccttgaaggatgaacttcagaccgctttaagggacaagaagtatgcctctgacaagtataaagatatttacacggagctttccatcgcaaaggccaaggcggattgtgatatctcgagactgaaggaacaattgaaagccgctaccgaggccctgggggaaaaatctccagactcagccactgtgagcgggtacgacattatgaaaagtaagagcaatccagactttctgaagaaggatcggagctgtgtcaccaggcagttacgtaacatacgcagtaagtccctcaaggaaggcttaacggtgcaggaacgcctcaagctgtttgagtcccgggaccttaagaaggattag

SEQ ID NO: 184618 - DNA, 3117 bp, Artificial Sequence
  derived and/or modified sequence
atgtctgctgccaaggagaacccctgcaggaagttccaggccaacatcttcaacaagagcaagtgccagaactgcttcaagccccgggagagccacctgctgaatgatgaggacctgacccaggccaagcccatctacggcggctggctgctgctggccccagatggaacagactttgacaaccctgtgcacaggagcaggaagtggcagaggcgcttcttcatcctgtatgaacatggcctgctgcgctatgccctggatgagatgcccaccaccctgccccagggcaccatcaacatgaaccagtgcacagatgtggtggatggagagggccgcacaggccagaagttcagcctgtgcatcctgaccccagagaaggagcacttcatccgggcagagaccaaggagatcgtgtctggctggctggagatgctgatggtgtaccccaggaccaacaagcagaaccagaagaagaagaggaaggtggagccccccaccccccaggagcccggccctgccaaggtggccgtgaccagcagcagcagcagcagcagcagcagcagcagcatccccagcgctgagaaggtgcccaccaccaagagcaccctgtggcaggaggagatgaggaccaaggaccagccagatggcagcagcctgagccctgcccagagccccagccagagccagcccccagctgccagcagcctgcgggagcccggcctggagagcaaggaggaggagagcgccatgagcagtgacaggatggactgtggcaggaaggtgcgggtggagagcggctacttcagcctggagaagaccaagcaggacctgaaggccgaggagcagcagctgcccccacccctgagcccccccagccccagcacccccaaccacagaagaagccaggtgattgagaagtttgaggccctggacatcgagaaggccgagcacatggagaccaatgctgtgggccccagccccagcagtgacacccggcagggccgctctgagaagagggccttccccaggaagagggacttcaccaatgaggcccccccagcccccctgcctgatgccagcgccagccccctgagcccccaccggcgggccaagagcctggacagaagaagcacagagcccagcgtgaccccagacctgctgaacttcaagaagggctggctgaccaagcagtatgaagatggccagtggaagaagcactggtttgtgctggccgaccagagcctgcgctactacagagattctgtggccgaggaggccgctgacctggatggagaaattgacctgagcgcctgctatgatgtgacagagtaccctgtgcagaggaactacggcttccagatccacaccaaggagggggagttcaccctgagcgccatgaccagcggcatcagaagaaactggatccagaccatcatgaagcacgtgcaccccaccacagccccagatgtgaccagcagcctgcctgaggagaagaacaagagcagctgcagctttgagacctgcccccggcccacagagaagcaggaggccgagctgggggagccagaccctgagcagaagaggagccgggcccgggagaggagaagagagggccgcagcaagacctttgactgggccgagttccggcccatccagcaggccctggcccaggagcgggtgggcggcgtgggccctgctgacacccatgagcccctgcggcctgaggccgagcccggggagctggagcgggagcgggcccggcggcgggaggagaggaggaagcgcttcggcatgctggatgccacagatggccctggaacagaagatgctgccctgaggatggaggtggacaggagccctggcctgcccatgtctgacctgaagacccacaacgtgcacgtggagattgagcagcgctggcaccaggtggagaccacccccctgcgggaggagaagcaggtgcccatcgcccctgtgcacctgagcagtgaagatggaggagaccggctgagcacccatgagctgaccagcctgctggagaaggagctggagcagagccagaaggaggccagtgacctgctggagcagaaccggctgctgcaggaccagctgcgggtggccctgggccgggagcagagcgcccgggagggctacgtgctgcaggccacctgtgagcggggctttgctgccatggaggagacccaccagaagaagattgaggacctgcagaggcagcaccagcgggagctggagaagctgcgggaggagaaggaccggctgctggccgaggagacagctgccaccatcagcgccatcgaggccatgaagaatgcccaccgggaggagatggagcgggagctggagaagagccagaggagccagatcagctctgtgaacagtgatgtggaggccctgcggcggcagtacctggaggagctgcagagcgtgcagcgggagctggaggtgctgtctgagcagtacagccagaagtgcctggagaatgcccacctggcccaggccctggaggccgagcggcaggccctgcggcagtgccagcgggagaaccaggagctgaatgcccacaaccaggagctgaacaaccggctggccgctgagatcacccggctgcggaccctgctgactggagatggcggcggggaggccaccggcagccccctggcccagggcaaggatgcctatgagctggaggtgctgctgcgggtgaaggagagcgagatccagtacctgaagcaggagatcagcagcctgaaggatgagctgcagacagccctgcgggacaagaagtatgccagtgacaagtacaaggacatctacacagagctgagcatcgccaaggccaaggctgactgtgacatcagccggctgaaggagcagctgaaggccgccacagaggccctgggggagaagagcccagacagcgccaccgtgtctggctatgacatcatgaagagcaagagcaacccagacttcctgaagaaggacaggagctgtgtgacccggcagctgaggaacatccgcagcaagagcctgaaggagggcctgactgtgcaggagcggctgaagctgtttgagagccgggacctgaagaaggactag

SEQ ID NO: 184619 - DNA, 3846 bp, Artificial Sequence
  derived and/or modified sequence
atgtcggcagccaaggagaacccgtgcaggaaattccaggccaacatcttcaacaagagcaagtgtcagaactgcttcaagccccgcgagtcgcatctgctcaacgacgaggacctgacgcaggcaaaacccatttatggcggttggctgctcctggctccagatgggaccgactttgacaacccagtgcaccggtctcggaaatggcagcgacggttcttcatcctttacgagcacggcctcttgcgctacgccctggatgagatgcccacgacccttcctcagggcaccatcaacatgaaccagtgcacagatgtggtggatggggagggccgcacgggccagaagttctccctgtgtattctgacgcctgagaaggagcatttcatccgggcggagaccaaggagatcgtcagtgggtggctggagatgctcatggtctatccccggaccaacaagcagaatcagaagaagaaacggaaagtggagccccccacaccacaggagcctgggcctgccaaggtggctgttaccagcagcagcagcagcagcagcagcagcagcagcatccccagtgctgagaaagtccccaccaccaagtccacactctggcaggaagaaatgaggaccaaggaccagccagatggcagcagcctgagtccagctcagagtcccagccagagccagcctcctgctgccagctccctgcgggaacctgggctagagagcaaagaagaggagagcgccatgagtagcgaccgcatggactgtggccgcaaagtccgggtggagagcggctacttctctctggagaagaccaaacaggacttgaaggctgaagaacagcagctgcccccgccgctctcccctcccagccccagcacccccaaccacaggaggtcccaggtgattgaaaagtttgaggccttggacattgagaaggcagagcacatggagaccaatgcagtggggccctcaccatccagcgacacacgccagggccgcagcgagaagagggcgttccctaggaagcgggacttcaccaatgaagcccccccagctcctctcccagacgcctcggcttcccccctgtctccacaccgaagagccaagtcactggacaggaggtccacggagccctccgtgacgcccgacctgctgaatttcaagaaaggctggctgactaagcagtatgaggacggccagtggaagaaacactggtttgtcctcgccgatcaaagcctgagatactacagggattcagtggctgaggaggcagccgacttggatggagaaattgacttgtccgcatgttacgatgtcacagagtatccagttcagagaaactatggcttccagatacatacaaaggagggcgagtttaccctgtcggccatgacatctgggattcggcggaactggatccagaccatcatgaagcacgtgcacccgaccactgccccggatgtgaccagctcgttgccagaggaaaaaaacaagagcagctgctcttttgagacctgcccgaggcctactgagaagcaagaggcagagctgggggagccggaccctgagcagaagaggagccgcgcacgggagcggaggcgagagggccgctccaagacctttgactgggctgagttccgtcccatccagcaggccctggctcaggagcgggtgggcggcgtggggcctgctgacacccacgagcccctgcgccctgaggcggagcctggggagctggagcgggagcgtgcacggaggcgggaggagcgccgcaagcgcttcgggatgctcgacgccacagacgggccaggcactgaggatgcagccctgcgcatggaggtggaccggagcccagggctgcctatgagcgacctcaaaacgcataacgtccacgtggagattgagcagcggtggcatcaggtggagaccacacctctccgggaagagaagcaggtgcccatcgcccccgtccacctgtcttctgaagatgggggtgaccggctctccacacacgagctgacctctctgctcgagaaggagctggagcagagccagaaggaggcctcagaccttctggagcagaaccggctcctgcaggaccagctgagggtggccctgggccgggagcagagcgcccgtgagggctacgtgctgcaggccacgtgcgagcgagggtttgcagcaatggaagaaacgcaccagaagaagattgaagatctccagaggcagcaccagcgggagctagagaaacttcgagaagagaaagaccgcctcctagccgaggagacagcggccaccatctcagccatcgaagccatgaagaacgcccaccgggaggaaatggagcgggagctggagaagagccagcggtcccagatcagcagcgtcaactcggatgttgaggccctgcggcgccagtacctggaggagctgcagtcggtgcagcgggaactggaggtcctctcggagcagtactcgcagaagtgcctggagaatgcccatctggcccaggcgctggaggccgagcggcaggccctgcggcagtgccagcgtgagaaccaggagctcaatgcccacaaccaggagctgaacaaccgcctggctgcagagatcacacggttgcggacgctgctgactggggacggcggtggggaggccactgggtcaccccttgcacagggcaaggatgcctatgaactagaggtcttattgcgggtaaaggaatcggaaatacagtacctgaaacaggagattagctccctcaaggatgagctgcagacggcactgcgggacaagaagtacgcaagtgacaagtacaaagacatctacacagagctcagcatcgcgaaggctaaggctgactgtgacatcagcaggttgaaggagcagctcaaggctgcaacggaagcactgggggagaagtcccctgacagtgccacggtgtccggatatgatataatgaaatctaaaagcaaccctgacttcttgaagaaagacagatcctgtgtcacccggcaactcagaaacatcaggtccaagtccgtaattgagcaggtctcgtgggatacctgaaatgcacccgcttcccggcccatgcaggagagtctgaaggaaggcctgacggtgcaagaacggttgaagctctttgaatccagggacttgaagaaagactaggtgtgtcccatccaagttgagcacgcgccttccccagcttgcagcagcacaccccaagcgctgcttttcacctgtacctttgttttattattattattattattgctgttgttgtcatcgttaactgtgggcatggaatgcgtgaggctggcttctgggttgtccacaccactctctgctgtgttgacttcctgttgtcttcatcaaagcttttttccgtggtattctaaaattaggccagcagtgggggctgggagggcatctgtgttagtcctttcctggctgtgacccgccacactcactgtcagtattaaggcccagcagcctgttgataagctaccctgtctcaccatgtgctggtgtggaaacggggcccagccagcacgcctcaaggtagatggaatccccactggtcagagaaaaagctatgcggacactccagcttggcctgggtcacagcactgactcctcacccgctagtctggctgttaagaggagaaagtgcactgccttccagcccaggaggaggacagcattttgtatttgttccactgatgcagcttagaaccacacccctgagagtcgtggcaaacctttcacaacctggaaaatgttgaaagcaaccattcctatttttgtttgttttttattaaatcttgcacaaaa

SEQ ID NO: 184620 - DNA, 3839 bp, Artificial Sequence
  derived and/or modified sequence
gccaggccggccaggcctgcgccgccgccgccgccgccgtcgccgccgcgccgaccatgtcggcagccaaggagaacccgtgcaggaaattccaggccaacatcttcaacaagagcaagtgtcagaactgcttcaagccccgcgagtcgcatctgctcaacgacgaggacctgacgcaggcaaaacccatttatggcggttggctgctcctggctccagatgggaccgactttgacaacccagtgcaccggtctcggaaatggcagcgacggttcttcatcctttacgagcacggcctcttgcgctacgccctggatgagatgcccacgacccttcctcagggcaccatcaacatgaaccagtgcacagatgtggtggatggggagggccgcacgggccagaagttctccctgtgtattctgacgcctgagaaggagcatttcatccgggcggagaccaaggagatcgtcagtgggtggctggagatgctcatggtctatccccggaccaacaagcagaatcagaagaagaaacggaaagtggagccccccacaccacaggagcctgggcctgccaaggtggctgttaccagcagcagcagcagcagcagcagcagcagcagcatccccagtgctgagaaagtccccaccaccaagtccacactctggcaggaagaaatgaggaccaaggaccagccagatggcagcagcctgagtccagctcagagtcccagccagagccagcctcctgctgccagctccctgcgggaacctgggctagagagcaaagaagaggagagcgccatgagtagcgaccgcatggactgtggccgcaaagtccgggtggagagcggctacttctctctggagaagaccaaacaggacttgaaggctgaagaacagcagctgcccccgccgctctcccctcccagccccagcacccccaaccacaggaggtcccaggtgattgaaaagtttgaggccttggacattgagaaggcagagcacatggagaccaatgcagtggggccctcaccatccagcgacacacgccagggccgcagcgagaagagggcgttccctaggaagcgggacttcaccaatgaagcccccccagctcctctcccagacgcctcggcttcccccctgtctccacaccgaagagccaagtcactggacaggaggtccacggagccctccgtgacgcccgacctgctgaatttcaagaaaggctggctgactaagcagtatgaggacggccagtggaagaaacactggtttgtcctcgccgatcaaagcctgagatactacagggattcagtggctgaggaggcagccgacttggatggagaaattgacttgtccgcatgttacgatgtcacagagtatccagttcagagaaactatggcttccagatacatacaaaggagggcgagtttaccctgtcggccatgacatctgggattcggcggaactggatccagaccatcatgaagcacgtgcacccgaccactgccccggatgtgaccagctcgttgccagaggaaaaaaacaagagcagctgctcttttgagacctgcccgaggcctactgagaagcaagaggcagagctgggggagccggaccctgagcagaagaggagccgcgcacgggagcggaggcgagagggccgctccaagacctttgactgggctgagttccgtcccatccagcaggccctggctcaggagcgggtgggcggcgtggggcctgctgacacccacgagcccctgcgccctgaggcggagcctggggagctggagcgggagcgtgcacggaggcgggaggagcgccgcaagcgcttcgggatgctcgacgccacagacgggccaggcactgaggatgcagccctgcgcatggaggtggaccggagcccagggctgcctatgagcgacctcaaaacgcataacgtccacgtggagattgagcagcggtggcatcaggtggagaccacacctctccgggaagagaagcaggtgcccatcgcccccgtccacctgtcttctgaagatgggggtgaccggctctccacacacgagctgacctctctgctcgagaaggagctggagcagagccagaaggaggcctcagaccttctggagcagaaccggctcctgcaggaccagctgagggtggccctgggccgggagcagagcgcccgtgagggctacgtgctgcaggccacgtgcgagcgagggtttgcagcaatggaagaaacgcaccagaagaagattgaagatctccagaggcagcaccagcgggagctagagaaacttcgagaagagaaagaccgcctcctagccgaggagacagcggccaccatctcagccatcgaagccatgaagaacgcccaccgggaggaaatggagcgggagctggagaagagccagcggtcccagatcagcagcgtcaactcggatgttgaggccctgcggcgccagtacctggaggagctgcagtcggtgcagcgggaactggaggtcctctcggagcagtactcgcagaagtgcctggagaatgcccatctggcccaggcgctggaggccgagcggcaggccctgcggcagtgccagcgtgagaaccaggagctcaatgcccacaaccaggagctgaacaaccgcctggctgcagagatcacacggttgcggacgctgctgactggggacggcggtggggaggccactgggtcaccccttgcacagggcaaggatgcctatgaactagaggtcttattgcgggtaaaggaatcggaaatacagtacctgaaacaggagattagctccctcaaggatgagctgcagacggcactgcgggacaagaagtacgcaagtgacaagtacaaagacatctacacagagctcagcatcgcgaaggctaaggctgactgtgacatcagcaggttgaaggagcagctcaaggctgcaacggaagcactgggggagaagtcccctgacagtgccacggtgtccggatatgatataatgaaatctaaaagcaaccctgacttcttgaagaaagacagatcctgtgtcacccggcaactcagaaacatcaggtccaagagtctgaaggaaggcctgacggtgcaagaacggttgaagctctttgaatccagggacttgaagaaagactaggtgtgtcccatccaagttgagcacgcgccttccccagcttgcagcagcacaccccaagcgctgcttttcacctgtacctttgttttattattattattattattgctgttgttgtcatcgttaactgtgggcatggaatgcgtgaggctggcttctgggttgtccacaccactctctgctgtgttgacttcctgttgtcttcatcaaagcttttttccgtggtattctaaaattaggccagcagtgggggctgggagggcatctgtgttagtcctttcctggctgtgacccgccacactcactgtcagtattaaggcccagcagcctgttgataagctaccctgtctcaccatgtgctggtgtggaaacggggcccagccagcacgcctcaaggtagatggaatccccactggtcagagaaaaagctatgcggacactccagcttggcctgggtcacagcactgactcctcacccgctagtctggctgttaagaggagaaagtgcactgccttccagcccaggaggaggacagcattttgtatttgttccactgatgcagcttagaaccacacccctgagagtcgtggcaaacctttcacaacctggaaaatgttgaaagcaaccattcctatttttgtttgttttttattaaatcttgcacaaaa

SEQ ID NO: 184621 - DNA, 3117 bp, Artificial Sequence
  derived and/or modified sequence
atgagcgccgccaaggagaacccctgccggaagttccaggccaacatcttcaataaaagtaaatgccagaactgcttcaagccgcgagagtctcaccttcttaacgatgaggaccttacacaggccaagccgatttatggcggatggctgttgttagcgcccgacggtactgacttcgataatcccgtccatcgttctcggaagtggcagcgaagatttttcattctgtacgagcatggcctattgaggtacgctctcgacgaaatgccaaccactctcccccagggtactattaatatgaaccagtgcaccgatgtcgtcgacggagaaggaaggaccggccaaaagttctcattgtgcattctgacaccagaaaaagagcattttattagggccgaaaccaaggagattgtctcgggctggctcgaaatgctgatggtgtatccgcgaacgaataaacagaaccaaaaaaaaaagcgcaaggtcgagcctccaacgccccaagagcccggtcctgccaaggttgcagttacaagcagctcctcaagttcgagctcaagctcatctattccctcagcagaaaaggtgccgactaccaagagtacgctctggcaggaggagatgagaacaaaagatcagcctgatggcagcagcttgtcacctgcacagagtcctagccagtcgcaacctcccgcagcttcgagcctcagggagcctggcctggagagcaaggaggaggagtccgctatgagtagtgatcgtatggactgcggaagaaaagtcagagtcgagagcggttattttagccttgaaaagactaaacaggacttgaaagcagaagagcagcagctcccccctcccctgagccctcctagtccctcaactccaaaccataggagatctcaggtcattgagaagtttgaagctctcgatattgaaaaagctgaacatatggagactaacgccgtcggtccctccccatcatccgataccagacagggacgttccgagaagcgggctttcccccgcaagcgtgatttcaccaatgaggcacccccagctcccctgccagatgcctctgcaagccccttgtcaccccacaggcgcgccaagtcactggaccgcagaagcaccgagcctagcgttaccccagacctgttgaattttaaaaagggatggctcacaaagcagtacgaagatggccagtggaaaaagcactggtttgtgctcgccgatcagtctcttaggtactacagggactccgtagctgaagaggccgccgacctggatggggaaatcgatctgtctgcctgttacgatgtcaccgagtatcccgtgcaaaggaattatggatttcaaatacacacaaaagagggagagtttactctcagcgctatgacatccggcatacgtagaaactggattcagaccattatgaaacatgtccacccaactacagcgcctgacgtaacaagttcgctacctgaagaaaagaacaaaagctcatgctcattcgaaacctgtccccgacctacagaaaaacaagaagcagaattgggagagcctgatcctgagcagaagaggtctagggcacgggagcgccggagggaaggaaggtcaaagaccttcgactgggcggaattcagacccatccagcaggccctggctcaggagagggtgggcggcgttggccccgctgatacccacgaaccgttgcgcccggaagccgagcctggggagcttgagcgggagcgggcaaggcgaagagaggaacgcaggaagagatttggaatgttggatgccactgacggacctggcaccgaggacgcggctttaagaatggaggttgaccggtctcccggactcccaatgtctgacctcaagactcacaacgtgcacgtggagatcgagcagagatggcatcaagtggagacaacaccccttcgggaagagaaacaggttccaatcgctccagtgcatctgtccagcgaagatggcggcgataggctgtccacgcatgagctgacatcactattggagaaagaactggagcagtcgcagaaagaggcttctgatttattagaacagaacagattactgcaggaccaactgcgtgtggccctgggtagagagcagtctgcccgcgaaggctatgtcctccaagcaacttgcgagcgaggctttgccgcgatggaggaaactcaccagaaaaagattgaagacctacagagacagcaccagcgcgaactggaaaaactgagggaagaaaaggatcggctactggccgaggagaccgccgctactatctcagcgatcgaggcaatgaaaaatgcacatagggaggaaatggagagggaactggagaagagtcagagatcccaaatttcgtcggtcaattcagacgtggaagcactccggcggcagtatctggaggaattgcagagcgttcagcgggagctggaggtcctgtctgaacagtactcccagaaatgtcttgagaatgctcatctcgcgcaggcactggaagcggagcggcaggctctcaggcagtgccaacgagagaatcaggagctgaatgcccataaccaagaattgaataacagactggccgccgagataacaagactgcgcacattgctgaccggcgatggaggtggtgaggccaccggttcacctcttgcacaaggcaaggacgcttatgaactggaggtcctgcttcgggtgaaggaaagtgaaatccagtacctcaaacaggagatatccagcctcaaagatgaactgcagactgcactcagggataaaaagtacgcttcggacaagtataaggatatctataccgagctgtctatcgccaaggccaaggctgattgtgatatctcgagactgaaggaacagcttaaagctgcaactgaggccctcggagaaaaatctcccgatagcgctactgtgagcggctacgacatcatgaagagcaagtcaaatcccgacttcctgaaaaaggataggagttgtgtaacacgccagctgagaaacattcggtctaaatctcttaaggaaggcctgacggtgcaagagcggcttaagctgttcgagagccgcgacctgaagaaggactag

SEQ ID NO: 184622 - DNA, 3117 bp, Artificial Sequence
  derived and/or modified sequence
atgagcgctgccaaggagaacccgtgcagaaagttccaagccaatattttcaataagagcaagtgccagaattgtttcaaacctcgtgaatctcacctacttaatgacgaggacctgacccaagccaagccaatatacggtggctggctgctcctggcaccagatgggacagacttcgacaatcccgtccaccggtccagaaaatggcagaggcgatttttcatcctgtacgagcacggtctacttcggtacgccctcgatgagatgccaacgacactgccacaaggcacaatcaacatgaatcagtgtactgacgtcgtggatggtgaggggcgtaccggccagaaattctccctctgcatactgacacctgagaaagagcatttcatccgggctgaaacgaaagagattgttagcggatggcttgagatgctcatggtataccctaggacaaataagcaaaatcagaaaaaaaaacggaaagtggagcccccaaccccacaagaaccgggtcctgccaaggtggccgtcacttcttcttcaagctcatcctcgtcttcaagctccattccatctgccgaaaaggtgcccacaacaaagagtacactatggcaagaggaaatgcggacaaaagatcagcccgatggtagttcccttagcccggctcagtctcctagccaaagccaaccacccgctgctagttctctgagagagcccggattagagagcaaggaggaggaatcagccatgagcagtgaccggatggactgtggtagaaaagtcagggtcgaatccgggtacttttcactggagaagaccaaacaagatttgaaggccgaggagcagcagctccctcccccactatctccgccatcgccctctacgcccaatcacaggcgcagccaggtgatcgagaaatttgaggcactcgacatcgagaaggcggaacatatggaaaccaacgcagttggtccaagcccgtcttccgacacaaggcagggcagatctgagaagagagcgttcccacgcaagagggacttcactaatgaagccccacccgctcctctgcccgacgcttctgccagtcccttatcgccacatcgccgagcaaagagtttggatagacggtccacggagcctagtgtgacaccagatttattgaacttcaagaaggggtggctcacgaagcagtacgaggatggccagtggaaaaaacactggtttgtcttggctgaccaatctctccggtactacagggacagcgtagcagaggaagctgccgatctcgatggcgagatcgacctgtctgcctgttacgacgttactgaatacccagttcaacgcaattacggctttcagatccacacaaaggaaggcgagtttaccttaagcgccatgacgtctggcattcggaggaactggattcagacgattatgaaacacgtgcatccgaccacggcgccagacgtgaccagctctctccctgaagagaaaaacaagagttcttgcagcttcgaaacttgtccccgtccaaccgaaaagcaggaggctgagctgggcgagcccgatcctgaacagaaaagaagcagggcgagagagcgcaggcgggaggggaggtctaaaacgttcgactgggccgagttccgtcctatccagcaggccctagcacaagagcgagtaggtggcgtcggcccagcagatactcacgaaccgctcaggccggaagcagagccaggcgagctggagcgggagagagccaggcggagggaagagagaaggaagcggtttggcatgctggacgcgaccgatggccctggaacggaggatgcagctttaagaatggaagtcgacagaagcccaggcctccctatgtcggaccttaagacccacaacgtgcacgtggaaattgaacagcgttggcatcaggtagagacaacccccctccgagaagaaaagcaggtgcccatagccccagtgcacctatccagtgaggatggtggggacagactttctactcacgagttgaccagcttgctcgagaaagaactagagcagagccagaaggaggcaagcgatctcctagaacagaaccgcctgcttcaggatcaactccgagtggctcttggtcgagaacaaagcgccagagagggatatgtgttgcaggcaacctgtgaaagaggattcgcagctatggaagagactcatcagaagaaaatcgaagacctacagcgacagcaccagcgggagttggaaaagctgagagaggagaaggacagactgttagctgaggagactgctgctaccatctcagcaatagaggctatgaagaacgcacatcgagaagaaatggaacgtgaactggagaaaagccagaggagccagatcagctccgtgaactctgatgtagaggccctgagaaggcagtacctcgaagagttgcagtcagtccagcgagaactcgaggtcctcagcgagcaatacagccaaaagtgcctcgaaaatgcccatcttgcccaggcactggaagccgaaaggcaggccctccgccagtgccagagggagaaccaagagctgaatgcacacaaccaggaattaaacaacaggctggcagcggagataacgaggttgcgaacccttctcacaggcgatggtggcggtgaagcaaccggcagcccattggcccagggaaaggacgcctacgaactggaggtgcttctgcgggtgaaggagtccgagattcagtatctgaaacaggagataagctcactgaaagatgagctgcagactgctctgcgagataagaaatatgccagtgacaagtataaggacatctatactgagctgtccattgcgaaggccaaagccgattgcgacataagcagattgaaagaacaattaaaggcagcgaccgaggctctcggcgagaagtccccggacagtgcaactgtgtctggttatgacattatgaagtcaaagtctaaccccgactttctcaagaaagacagatcatgtgtgacgaggcaactgcggaacatcaggtccaaatctcttaaagaggggctgactgtccaagagaggctcaagctgtttgagagtcgcgatctgaagaaagattag

SEQ ID NO: 184623 - DNA, 3117 bp, Artificial Sequence
  derived and/or modified sequence
atgagcgccgccaaggagaacccctgcagaaagttccaggccaacatcttcaacaagagcaagtgccagaactgcttcaagcccagagagagccacctgctgaacgacgaggacctgacccaggccaagcccatctacggcggctggctgctgctggcccccgacggcaccgacttcgacaaccccgtgcacagaagcagaaagtggcagagaagattcttcatcctgtacgagcacggcctgctgagatacgccctggacgagatgcccaccaccctgccccagggcaccatcaacatgaaccagtgcaccgacgtggtggacggcgagggcagaaccggccagaagttcagcctgtgcatcctgacccccgagaaggagcacttcatcagagccgagaccaaggagatcgtgagcggctggctggagatgctgatggtgtaccccagaaccaacaagcagaaccagaagaagaagagaaaggtggagccccccaccccccaggagcccggccccgccaaggtggccgtgaccagcagcagcagcagcagcagcagcagcagcagcatccccagcgccgagaaggtgcccaccaccaagagcaccctgtggcaggaggagatgagaaccaaggaccagcccgacggcagcagcctgagccccgcccagagccccagccagagccagccccccgccgccagcagcctgagagagcccggcctggagagcaaggaggaggagagcgccatgagcagcgacagaatggactgcggcagaaaggtgagagtggagagcggctacttcagcctggagaagaccaagcaggacctgaaggccgaggagcagcagctgcccccccccctgagcccccccagccccagcacccccaaccacagaagaagccaggtgatcgagaagttcgaggccctggacatcgagaaggccgagcacatggagaccaacgccgtgggccccagccccagcagcgacaccagacagggcagaagcgagaagagagccttccccagaaagagagacttcaccaacgaggccccccccgcccccctgcccgacgccagcgccagccccctgagcccccacagaagagccaagagcctggacagaagaagcaccgagcccagcgtgacccccgacctgctgaacttcaagaagggctggctgaccaagcagtacgaggacggccagtggaagaagcactggttcgtgctggccgaccagagcctgagatactacagagacagcgtggccgaggaggccgccgacctggacggcgagatcgacctgagcgcctgctacgacgtgaccgagtaccccgtgcagagaaactacggcttccagatccacaccaaggagggcgagttcaccctgagcgccatgaccagcggcatcagaagaaactggatccagaccatcatgaagcacgtgcaccccaccaccgcccccgacgtgaccagcagcctgcccgaggagaagaacaagagcagctgcagcttcgagacctgccccagacccaccgagaagcaggaggccgagctgggcgagcccgaccccgagcagaagagaagcagagccagagagagaagaagagagggcagaagcaagaccttcgactgggccgagttcagacccatccagcaggccctggcccaggagagagtgggcggcgtgggccccgccgacacccacgagcccctgagacccgaggccgagcccggcgagctggagagagagagagccagaagaagagaggagagaagaaagagattcggcatgctggacgccaccgacggccccggcaccgaggacgccgccctgagaatggaggtggacagaagccccggcctgcccatgagcgacctgaagacccacaacgtgcacgtggagatcgagcagagatggcaccaggtggagaccacccccctgagagaggagaagcaggtgcccatcgcccccgtgcacctgagcagcgaggacggcggcgacagactgagcacccacgagctgaccagcctgctggagaaggagctggagcagagccagaaggaggccagcgacctgctggagcagaacagactgctgcaggaccagctgagagtggccctgggcagagagcagagcgccagagagggctacgtgctgcaggccacctgcgagagaggcttcgccgccatggaggagacccaccagaagaagatcgaggacctgcagagacagcaccagagagagctggagaagctgagagaggagaaggacagactgctggccgaggagaccgccgccaccatcagcgccatcgaggccatgaagaacgcccacagagaggagatggagagagagctggagaagagccagagaagccagatcagcagcgtgaacagcgacgtggaggccctgagaagacagtacctggaggagctgcagagcgtgcagagagagctggaggtgctgagcgagcagtacagccagaagtgcctggagaacgcccacctggcccaggccctggaggccgagagacaggccctgagacagtgccagagagagaaccaggagctgaacgcccacaaccaggagctgaacaacagactggccgccgagatcaccagactgagaaccctgctgaccggcgacggcggcggcgaggccaccggcagccccctggcccagggcaaggacgcctacgagctggaggtgctgctgagagtgaaggagagcgagatccagtacctgaagcaggagatcagcagcctgaaggacgagctgcagaccgccctgagagacaagaagtacgccagcgacaagtacaaggacatctacaccgagctgagcatcgccaaggccaaggccgactgcgacatcagcagactgaaggagcagctgaaggccgccaccgaggccctgggcgagaagagccccgacagcgccaccgtgagcggctacgacatcatgaagagcaagagcaaccccgacttcctgaagaaggacagaagctgcgtgaccagacagctgagaaacatcagaagcaagagcctgaaggagggcctgaccgtgcaggagagactgaagctgttcgagagcagagacctgaagaaggactag

SEQ ID NO: 184624 - protein, 2012 aa, Artificial Sequence
  derived and/or modified sequence
MATPLAVNSAASLWGPYKDIWHKVGNALWRRQPEAVHLLDKILKKHKPDFISLFKNPPKNVQQHEKVQKASTEGVAIQGQQGTRLLPEQLIKEAFILSDLFDIGELAAVELLLAGEHQQPHFPGLTRGLVAVLLYWDGKRCIANSLKALIQSRRGKTWTLELSPELASMTTRFTDELMEQGLTYKVLTLVSQIDVNNEFEKLQRERGLGSEKHRKEVSDLIKECRQSLAESLFAWACQSPLGKEDTLLLIGHLERVTVEANGSLDAVNLALLMALLYCFDISFIEQSTEERDDMIHQLPLLTEKQYIATIHSRLQDSQLWKLPGLQATVRLAWALALRGISQLPDVTALAEFTEADEAMAELAIADNVFLFLMESVVVSEYFYQEEFYIRRVHNLITDFLALMPMKVKQLRNRADEDARMIHMSMQMGNEPPISLRRDLEHLMLLIGELYKKNPFHLELALEYWCPTEPLQTPTIMGSYLGVAHQRPPQRQVVLSKFVRQMGDLLPPTIYIPYLKMLQGLANGPQCAHYCFSLLKVNGSSHVENIQGAGGSPVSWEHFFHSLMLYHEHLRKDLPSADSVQYRHLPSRGITQKEQDGLIAFLQLTSTIITWSENARLALCEHPQWTPVVVILGLLQCSIPPVLKAELLKTLAAFGKSPEIAASLWQSLEYTQILQTVRIPSQRQAIGIEVELNEIESRCEEYPLTRAFCQLISTLVESSFPSNLGAGLRPPGFDPYLQFLRDSVFLRFRTRAYRRAAEKWEVAEVVLEVFYKLLRDYEPQLEDFVDQFVELQGEEIIAYKPPGFSLMYHLLNESPMLELALSLLEEGVKQLDTYAPFPGKKHLEKAVQHCLALLNLTLQKENLFMDLLRESQLALIVCPLEQLLQGINPRTKKADNVVNIARYLYHGNTNPELAFESAKILCCISCNSNIQIKLVGDFTHDQSISQKLMAGFVECLDCEDAEEFVRLEEGSELEKKLVAIRHETRIHILNLLITSLECNPPNLALYLLGFELKKPVSTTNLQDPGVLGCPRTCLHAILNILEKGTEGRTGPVAVRESPQLAELCYQVIYQLCACSDTSGPTMRYLRTSQDFLFSQLQYLPFSNKEYEISMLNQMSWLMKTASIELRVTSLNRQRSHTQRLLHLLLDDMPVKPYSDGEGGIEDENRSVSGFLHFDTATKVRRKILNILDSIDFSQEIPEPLQLDFFDRAQIEQVIANCEHKNLRGQTVCNVKLLHRVLVAEVNALQGMAAIGQRPLLMEEISTVLQYVVGRNKLLQCLHAKRHALESWRQLVEIILTACPQDLIQAEDRQLIIRDILQDVHDKILDDEAAQELMPVVAGAVFTLTAHLSQAVLTEQKETSVLGPAEAHYAFMLDSCFTSPPPEENPLVGFASIGDSSLYIILKKLLDFILKTGGGFQRVRTHLYGSLLYYLQIAQRPDEPDTLEAAKKTMWERLTAPEDVFSKLQRENIAIIESYGAALMEVVCRDACDGHEIGRMLALALLDRIVSVDKQQQWLLYLSNSGYLKVLVDSLVEDDRTLQSLLTPQPPLLKALYTYESKMAFLTRVAKIQQGALELLRSGVIVRLAQCQVYDMRPETDPQSMFGMRDPPMFIPTPVDRYRQILLPALQLCQVILTSSMAQHLQAAGQVLQFLISHSDTIQAILRCQDVSAGSLQELALLTGIISKAALPGILSELDVDVNEGSLMELQGHIGRFQRQCLGLLSRFGGSDRLRQFKFQDDNVEGDKVSKKDEIELAMQQICANVMEYCQSLMLQSSPTFQHAVCLFTPSLSETVNRDGPRQDTQAPVVPYWRLPGLGIIIYLLKQSANDFFSYYDSHRQSVSKLQNVEQLPPDEIKELCQSVMPAGVDKISTAQKYVLARRRLVKVINNRAKLLSLCSFIIETCLFILWRHLEYYLLHCMPTDSQDSLFASRTLFKSRRLQDSFASETNLDFRSGLAIVSQHDLDQLQADAINAFGESLQKKLLDIEGLYSKVRSRYSFIQALVRRIRGLLRISRN

SEQ ID NO: 184625 - protein, 249 aa, Artificial Sequence
  derived and/or modified sequence
MSLRNYSEREVSDLIKECRQSLAESLFAWACQSPLGKEDTLLLIGHLERVTVEANGSLDAVNLALLMALLYCFDISFIEQSTEERDDMIHQLPLLTEKQYIATIHSRLQDSQLWKLPGLQATVRLAWALALRGISQLPDVTALAEFTEADEAMAELAIADNVFLFLMESVVVSEYFYQEEFYIRRVHNLITDFLALMPMKVKQLRNRADEDARMIHMSMQMGNEPPISLRRDLEHLMLLVSKLLVLRLN

SEQ ID NO: 184626 - DNA, 6039 bp, Artificial Sequence
  derived and/or modified sequence
atggcaacacctcttgccgtgaattcagccgcatctctgtggggcccctataaggacatctggcataaggttggtaacgcactctggaggcgccagccggaggccgtgcatctgctggataagattctcaagaagcacaaacctgacttcatatccttgttcaagaatccaccaaaaaatgttcaacagcatgagaaagtacagaaggcgtctacagagggcgtggctattcagggacagcaggggactagattgctgcctgaacagcttattaaagaggctttcattttatccgatttgttcgatattggcgaactagctgcagtggagctgctgcttgccggcgagcatcagcagccccacttcccaggcctcaccagggggctggtggctgtgcttctctactgggacggaaagcgatgtatagccaactcactgaaggctttgatccagtctagaaggggaaaaacatggactctggaattgagtcctgaactcgcctcaatgaccacacggttcacggatgagcttatggaacaggggctgacctacaaagtgctgactctcgtatctcagattgatgtaaacaatgaatttgaaaaactgcagcgcgagaggggccttggatcagaaaaacaccggaaggaggtttcagacctgatcaaggaatgtaggcagagtttggccgagagtttatttgcttgggcctgccagtctcctctgggcaaggaggatacactgctgcttatcgggcatctggagagagtgaccgtcgaggccaacggatcacttgatgctgtcaacctggcgcttctgatggctttattgtattgcttcgatatctccttcatcgaacagagcaccgaggagcgagatgacatgatccaccagctgcccctcctgaccgaaaagcaatacattgcgactatccacagccgccttcaggactcccaactgtggaagcttcccgggcttcaagccacagtgaggctggcctgggcactcgcactacgtggaatatcccagcttcccgatgtgacagctctggccgagttcaccgaggctgacgaggccatggcggagctggcaatcgccgacaacgtattcttgttcctgatggaatcagtggtggtttcggaatatttctatcaagaggaattttatatccgccgtgtgcacaacctcataacagacttcttggccctcatgccaatgaaagtaaaacagctccgcaaccgcgccgacgaagacgcacggatgatccatatgtccatgcagatgggcaatgagccacccatttctctcagacgggacttagagcaccttatgctgttaatcggtgaactgtataaaaagaatcccttccacctggaactggctctagaatattggtgcccaacagaacctctccagacccctacaatcatgggctcttacctgggcgtggcccaccaaaggccccctcagcgacaggtggtcctgagcaagtttgtcaggcaaatgggcgatcttttgccgccaacgatctacatcccctatctgaagatgctccagggactggccaatgggccacaatgcgctcattattgtttttctcttctgaaagtgaacgggagcagccacgtggaaaatatccagggtgctgggggatcgcctgtgagttgggagcactttttccacagtctaatgctgtatcacgaacacttgcggaaggacctaccctcagccgactccgtgcagtatcggcatctgcctagccgcggaatcacccaaaaagaacaggacggactgattgcttttctgcaactgaccagcacaatcattacctggtctgaaaatgcccgtctggccctgtgtgagcatccccagtggacaccggttgtcgttattctgggtcttttgcaatgcagtataccaccagttctgaaggccgaactgctgaagacactggctgccttcggcaagtccccagagattgcagcctcactttggcaatcgctcgaatatactcagatcctacaaaccgtacgaatcccctctcagcgtcaagcgataggtatagaggttgaactgaacgaaattgaaagccgatgtgaggagtatcccctgacacgcgctttctgtcagctcatttccaccctggttgagagctccttccctagcaatctgggtgccgggttgcggcctcccggctttgacccttaccttcagtttcttcgcgactccgtcttcctgcgattccgcacacgggcttaccggcgagctgcagaaaagtgggaagtcgcagaagtggtccttgaagttttctataagctcctgcgcgattatgagccacaactcgaggatttcgtggatcagttcgtcgagctccagggggaggaaatcatcgcctacaaacctcctggattcagtttgatgtaccatctgctgaacgaatccccaatgctggaacttgctctgtctctgctggaggaaggagtgaagcagctagacacctatgcccccttcccagggaagaaacatcttgagaaagcagtgcaacactgcttggccttactcaatttgaccctgcagaaggagaacctgttcatggatctgctgagggagtcccagctggcactgattgtgtgcccgctagagcaactgttacagggaataaatcctaggactaaaaaggccgacaacgtcgtaaatattgcgcgatatctataccatgggaacactaacccagagctcgcttttgagagcgccaaaatcctctgctgcatttcttgcaatagtaacattcaaattaagcttgtgggagattttacccacgaccagtcaatttctcaaaaactgatggccggatttgttgagtgtttggattgtgaggacgccgaggagttcgtccggctggaggagggttctgagctcgaaaagaagcttgtcgccatccgtcatgaaacacgcattcatatcttgaacttgctgatcacaagcttggagtgtaatccccctaacttggctctgtacctgctggggttcgagctgaagaagcctgtgtctaccaccaatttgcaagatccgggggtactcggctgtcctagaacatgtctgcatgctattttgaacatcctggaaaaaggcacagaggggagaaccgggccagttgctgtcagggaatctccgcagctcgccgaactgtgttaccaagtgatttatcagctctgtgcttgcagcgacacgagtggtcctacgatgcggtatctccgtacatcgcaggatttcctgttcagccagctacagtatctgcccttttctaataaggaatatgagatcagcatgctcaatcagatgtcttggctgatgaagactgccagtattgaactgcgtgtcaccagtttaaacagacagaggagtcacacacagagacttctgcacctcctcttggatgatatgcccgttaaaccatattctgacggcgaaggcggcatagaagacgaaaacaggagcgtctccggcttcttacactttgatacagcaacgaaagttcgcaggaaaatactgaacatactagattcaattgacttctctcaggaaataccagagccactccaactcgacttcttcgacagggcccagatagagcaggtgattgccaactgcgagcataagaatctccgaggtcagacagtatgcaacgtgaagttgctgcatagggtgctcgtggctgaggtgaacgccctgcagggtatggcagcgattggacagagacccctccttatggaagaaatctcaaccgtgctgcagtacgtggtgggccgcaacaagctgctgcaatgcctgcacgctaagcggcatgcacttgagagctggcgtcagcttgtggagataatcctgaccgcctgcccccaggatctgatccaggccgaggacagacaacttatcataagggacattcttcaagatgtccatgacaaaattctggacgatgaggctgctcaggaacttatgcccgtagtcgccggtgcggtctttacactgacagcacacctgagccaggcagtgctgaccgagcagaaggagacttcagtcctggggcctgctgaagctcactacgcttttatgttggattcatgctttacatctcctcctccagaggagaacccactcgtaggcttcgcatccatcggcgattcatcactgtatattatccttaagaaactgctggactttatcctgaagaccgggggcggctttcaacgtgtgcggacacatctctacggtagcttactttattacctacagatcgcacagcggcctgatgaacccgatacactagaagcggcaaagaagaccatgtgggagcggctcaccgctcccgaggatgtgttctccaagttgcagagggaaaacatagcaattattgagtcttatggtgctgcactgatggaagtggtctgccgcgacgcctgtgatggccacgagatagggagaatgttagctttggctctgttggacagaatcgtatccgtggataaacagcagcagtggctcttgtacctcagtaattccggctaccttaaagtcttagttgattcactcgtcgaggatgaccggaccctgcagtctctactgacccctcagcccccgttgctgaaagctctctatacatacgagtctaaaatggcatttctgactagggtggcaaaaattcagcagggggccctagagttgttaagatctggggtcattgtgagactggctcaatgtcaggtgtacgacatgagaccagagaccgatccccagagtatgtttggaatgcgtgacccacctatgtttatccctacccctgttgatcgttaccgccagattttactgcccgctctgcagctatgccaggtgatcctgacatcttcaatggctcaacatctgcaggccgccggccaagtcttgcagttcctgatatcacattccgataccatccaggcgatcttgcgatgtcaagatgtgtctgcgggttctcttcaggagctggccctgctgacagggatcatttctaaggccgcgttaccaggaatcctgtccgaactggatgtcgacgtaaatgaggggagtttgatggagctgcagggacatattggacgcttccagaggcaatgcctgggcctattgtccaggtttgggggctcagatcgcttacgccagtttaagttccaggacgataacgtcgaaggagataaggtgagcaaaaaggacgaaatcgagttggccatgcaacagatctgtgcgaacgtgatggaatactgccaatcattaatgttacagtcttcaccaaccttccagcatgccgtgtgtctgttcactcccagcttgagtgaaacagtaaatcgcgatggtccccggcaagatacccaggcacctgtagttccctactggaggctgccaggccttgggattattatctatctcctgaagcaatcggctaacgacttcttcagttactacgactcacatagacagtcagtgtccaagctccagaatgtcgagcagttgcccccggatgagatcaaggaattatgtcagtcggtaatgccggctggggtggataaaatctcaacagctcagaaatacgtgctagcccgccggagattagtgaaggtcatcaataaccgggcaaagcttttatctctttgttcattcataattgaaacatgcctctttatcttatggcggcacctggaatattacctgctccactgtatgccaactgacagccaagacagcctctttgcaagtcgcaccctctttaaaagtaggcgattacaggacagcttcgcatccgaaaccaatcttgatttccgaagcggcctggccattgtatcacagcacgacttggaccagttgcaggccgatgccatcaatgcctttggcgagtcccttcagaagaagctgttggacattgaaggactttactccaaagttcggtctagatactcctttatccaggccttggtccgaagaattagggggctgcttcgcatctctcggaattag

SEQ ID NO: 184627 - DNA, 750 bp, Artificial Sequence
  derived and/or modified sequence
atgagccttagaaattattctgagagggaggtcagtgaccttatcaaagagtgcagacagtctttggcagaatccctgttcgcctgggcttgccagtccccacttggtaaagaagacacactactgctgattggacacctggagagagtgaccgtcgaggccaatggaagtctcgatgccgtaaatctcgcactgctgatggcgctgctatattgctttgatatttcttttatagagcagtcaaccgaggagagagacgatatgatccaccaactgccgctgctgactgaaaaacagtacattgccactattcatagccgcctacaggattcacagctttggaaactgccaggactacaggccactgtgaggctggcctgggccctggcccttagagggatttctcagctgcccgatgtgaccgctctggcagaatttacagaggccgatgaagccatggccgagttagctattgccgacaacgtcttcctgtttttaatggagtccgtcgtcgtttctgagtatttctaccaggaagagttttacatccggcgggtgcacaacttgattactgattttttggccctgatgccgatgaaggtaaagcagctgcggaatcgagccgacgaggatgccaggatgattcatatgagcatgcagatggggaacgaaccacccatttctcttaggcgcgacctggagcacctgatgttactggtgtcaaaacttttggtgctgagactcaactag

SEQ ID NO: 184628 - DNA, 6039 bp, Artificial Sequence
  derived and/or modified sequence
atggccacccccctggccgtgaacagcgctgccagcctgtggggcccctacaaggacatctggcacaaggtgggcaatgccctgtggaggcggcagcctgaggccgtgcacctgctggacaagatcctgaagaagcacaagccagacttcatcagcctcttcaagaacccccccaagaatgtgcagcagcacgagaaggtgcagaaggccagcacagagggcgtggccatccagggccagcagggcacccggctgctgcctgagcagctgatcaaggaggccttcatcctgagtgacctgtttgatattggagagctggccgctgtggagctgctgctggccggggagcaccagcagccccacttccctggcctgacccggggcctggtggccgtgctgctgtactgggatggcaagcgctgcatcgccaacagcctgaaggccctgatccagagcagaagaggcaagacctggaccctggagctgagccctgagctggcctccatgaccacccgcttcacagatgagctgatggagcagggcctgacctacaaggtgctgaccctggtgtcccagattgatgtgaacaatgaatttgagaagctgcagcgggagcggggcctgggcagcgagaagcacaggaaggaggtgtctgacctgatcaaggaatgtcggcagagcctggccgagagcctgtttgcctgggcctgccagagccccctgggcaaggaggacaccctgctgctgattggccacctggagcgggtgacagtggaggccaacggcagcctggatgctgtgaacctggccctgctgatggccctgctgtactgctttgacatctccttcatcgagcagagcacagaggagagagatgacatgatccaccagctgcccctgctgacagagaagcagtacatcgccaccatccacagccggctgcaggacagccagctgtggaagctgcccggcctgcaggccaccgtgcggctggcctgggccctggccctgcggggcatcagccagctgcctgatgtgacagccctggccgagttcacagaagcagatgaggccatggccgagctggccatcgctgacaacgtgttcctgttcctgatggagagcgtggtggtgtctgagtacttctaccaggaggagttctacatccggcgggtgcacaacctgatcacagacttcctggccctgatgcccatgaaggtgaagcagctgaggaacagagcagatgaagatgccaggatgatccacatgtccatgcagatgggaaatgaaccacccatcagcctgcggcgggacctggagcacctgatgctgctgattggagagctgtacaagaagaaccccttccacctggagctggccctggagtactggtgccccacagagcccctgcagacccccaccatcatgggcagctacctgggcgtggcccaccagaggcctccccagaggcaggtggtgctgagcaagtttgtgcggcagatgggagacctgctgccccccaccatctacatcccctacctgaagatgctgcagggcctggccaacggcccccagtgtgcccactactgcttcagcctgctgaaggtgaatggcagcagccacgtggagaacatccagggcgctgggggcagccctgtgtcctgggagcacttcttccacagcctgatgctgtaccacgagcacctgaggaaggacctgcccagcgctgacagcgtgcagtaccgccacctgcccagccggggcatcacccagaaggagcaggacggcctcatcgccttcctgcagctgaccagcaccatcatcacctggagcgaaaatgcccggctggccctgtgtgagcacccccagtggacccctgtggtggtgatcctgggcctgctgcagtgcagcatcccccctgtgctgaaggccgagctgctgaagaccctggccgccttcggcaagagccctgagattgctgccagcctgtggcagagcctggagtacacccagatcctgcagacagtgcgcatccccagccagaggcaggccatcggcatcgaggtggagctgaatgaaattgagagccgctgtgaggagtaccccctgacccgggccttctgccagctgatcagcaccctggtggagagcagcttccccagcaacctgggcgccggcctgcggcccccaggctttgacccctacctgcagttcctgcgggacagcgtcttcctgcgcttccgcacccgggcctacagaagagctgctgagaagtgggaggtggccgaggtggtgctggaggtgttctacaagctgctgcgggactatgagccccagctggaggactttgtggaccagtttgtggagctgcagggcgaggagatcatcgcctacaagcccccaggcttcagcctgatgtaccacctgctgaatgaaagccccatgctggagctggccctgagcctgctggaggagggcgtgaagcagctggacacctacgcccccttccctgggaagaagcacctggagaaggctgtgcagcactgcctggccctgctgaacctgaccctgcagaaggagaacctcttcatggacctgctgcgggagagccagctggccctgattgtgtgccccctggagcagctgctgcagggcatcaaccccaggaccaagaaggctgacaacgtggtgaacatcgcccgctacctgtaccacggcaacaccaaccctgagctggcctttgagagcgccaagatcctgtgctgcatcagctgcaacagcaacatccagatcaagctggtgggggacttcacccatgaccagagcatcagccagaagctgatggccggctttgtggagtgcctggactgtgaagatgctgaggagtttgtgcggctggaggagggcagcgagctggagaagaagctggtggccatcagacatgagacccgcatccacatcctgaacctgctgatcaccagcctggagtgcaacccccccaacctggccctgtacctgctgggctttgagctgaagaagcctgtgtccaccaccaacctgcaggaccccggggtgctgggctgccccaggacctgcctgcacgccatcctgaacatcctggagaagggcacagagggccgcacaggccctgtggccgtgcgggagagcccccagctggccgagctgtgctaccaggtgatctaccagctgtgtgcctgcagcgacaccagcggccccaccatgagatacctgcggaccagccaggacttcctgttcagccagctgcagtacctgcccttcagcaacaaggagtatgagatctccatgctgaaccagatgtcctggctgatgaagacagccagcattgagctgcgggtgaccagcctgaaccggcagaggagccacacccagaggctgctgcacctgctgctggatgacatgcctgtgaagccctacagtgatggagagggcggcattgaagatgagaacagatctgtgtctggcttcctgcactttgacacagccaccaaggtgcggaggaagatcctgaacatcctggacagcattgacttcagccaggagatccctgagcccctgcagctggacttctttgaccgggcccagatcgagcaggtgattgccaactgtgagcacaagaacctgcggggccagacagtgtgcaatgtgaagctgctgcaccgggtgctggtggccgaggtgaatgccctgcagggcatggccgccatcggccagaggcccctgctgatggaggagatcagcacagtgctgcagtatgtggtgggcaggaacaagctgctgcagtgcctgcacgccaagagacatgccctggagagctggaggcagctggtggagatcatcctgacagcctgcccccaggacctgatccaggctgaagatcggcagctgatcatccgggacatcctgcaggatgtgcatgacaagatcctggatgatgaagctgcccaggagctgatgcctgtggtggccggggctgtgttcaccctgacagcccacctgagccaggccgtgctgacagagcagaaggagacctctgtgctgggccctgctgaggcccactacgccttcatgctggacagctgcttcaccagccccccacctgaggagaaccccctggtgggctttgccagcattggagacagcagcctgtacatcatcctgaagaagctgctggacttcatcctgaagacaggaggcggcttccagagggtgaggacccacctgtatggcagcctgctgtactacctgcagatcgcccagaggccagatgagccagacaccctggaggccgccaagaagaccatgtgggagcggctgacagccccagaagatgtgttcagcaagctgcagagagaaaatattgccatcatcgagagctatggagctgccctgatggaggtggtgtgcagagatgcctgtgatggccatgaaattggaaggatgctggccctggccctgctggacagaattgtgtctgtggacaagcagcagcagtggctgctgtacctgagcaacagcggctacctgaaggtgctggtggacagcctggtggaggatgacaggaccctgcagagcctgctgaccccccagccccccctgctgaaggccctgtacacctatgagagcaagatggccttcctgaccagggtggccaagatccagcagggcgccctggagctgctgcggtctggagtgattgtgcggctggcccagtgccaggtgtatgacatgaggcctgagacagacccccagagcatgtttggcatgagggacccccccatgttcatccccacccctgtggaccgctaccggcagatcctgctgcctgccctgcagctgtgccaggtgatcctgaccagctccatggcccagcacctgcaggccgccggccaggtgctgcagttcctgatcagccacagcgacaccatccaggccatcctgcgctgccaggatgtgtctgctggcagcctgcaggagctggccctgctgaccggcatcatcagcaaggccgccctgcccggcatcctgtctgagctggatgtggatgtgaatgaaggcagcctgatggagctgcagggccacatcggccgcttccagaggcagtgcctgggcctgctgagcagatttggaggcagtgaccggctgcggcagttcaagttccaggatgacaacgtggagggggacaaggtgtccaagaaggatgaaattgagctggccatgcagcagatctgtgccaacgtgatggagtactgccagagcctgatgctgcagagcagccccaccttccagcacgctgtgtgcctcttcacccccagcctgtctgaaacagtgaacagagatggcccccggcaggacacccaggcccctgtggtgccctactggaggctgcccggcctgggcatcatcatctacctgctgaagcagagcgccaatgacttcttctcctactatgacagccaccggcagagcgtgtccaagctgcagaatgtggagcagctgcccccagatgagatcaaggagctgtgccagagcgtgatgcctgctggggtggacaagatcagcacagcccagaagtatgtgctggcccggcggcggctggtgaaggtgatcaacaacagagccaagctgctgagcctgtgcagcttcatcatcgagacctgcctcttcatcctgtggaggcacctggagtactacctgctgcactgcatgcccacagacagccaggacagcctgtttgccagcaggaccctcttcaagagccggcggctgcaggacagctttgccagcgagaccaacctggacttccgcagcggcctggccatcgtgtcccagcacgacctggaccagctgcaggctgatgccatcaatgcctttggagagagcctgcagaagaagctgctggacatcgagggcctgtacagcaaggtgcgcagccgctacagcttcatccaggccctggtgcggcgcatccggggcctgctgcgcatcagcagaaattag

SEQ ID NO: 184629 - DNA, 750 bp, Artificial Sequence
  derived and/or modified sequence
atgagcctgaggaactacagcgagcgggaggtgtctgacctgatcaaggaatgtcggcagagcctggccgagagcctgtttgcctgggcctgccagagccccctgggcaaggaggacaccctgctgctgattggccacctggagcgggtgacagtggaggccaacggcagcctggatgctgtgaacctggccctgctgatggccctgctgtactgctttgacatctccttcatcgagcagagcacagaggagagagatgacatgatccaccagctgcccctgctgacagagaagcagtacatcgccaccatccacagccggctgcaggacagccagctgtggaagctgcccggcctgcaggccaccgtgcggctggcctgggccctggccctgcggggcatcagccagctgcctgatgtgacagccctggccgagttcacagaagcagatgaggccatggccgagctggccatcgctgacaacgtgttcctgttcctgatggagagcgtggtggtgtctgagtacttctaccaggaggagttctacatccggcgggtgcacaacctgatcacagacttcctggccctgatgcccatgaaggtgaagcagctgaggaacagagcagatgaagatgccaggatgatccacatgtccatgcagatgggaaatgaaccacccatcagcctgcggcgggacctggagcacctgatgctgctggtgtccaagctgctggtgctgcggctgaactag

SEQ ID NO: 184630 - DNA, 6039 bp, Artificial Sequence
  derived and/or modified sequence
atggccacccccctggccgtgaacagcgccgccagcctgtggggcccttacaaggacatctggcataaggtcggcaatgcactctggaggcggcagcctgaggccgtccaccttctggacaaaattctcaagaagcacaagcccgatttcatttcgttgtttaaaaatcctccgaagaatgtgcagcaacacgaaaaggtccaaaaggcttccacagagggggtggcaatacagggccagcaaggaactagactgctccccgagcaactaattaaagaagctttcatactttctgacttgttcgatattggcgagctggccgccgtagaattgctgcttgctggtgagcaccaacagccccactttcctggtttgactagaggccttgtcgcggtcctgctgtattgggatgggaagaggtgtattgccaactccttaaaggccttgatacaatccagacgtgggaagacctggacactggagctatctccagagctggcatctatgacaactcggttcacagatgagctgatggaacaggggctgacctacaaggtgctaacgctggtttcccagattgacgtgaacaacgagttcgagaaattacagcgcgaacgcggcttaggatctgagaagcacagaaaagaagtttctgaccttatcaaagaatgccgtcagagtctggcggaaagtctctttgcctgggcctgccagtccccactgggcaaggaggacacgttgcttcttataggacatcttgagcgagtcacggttgaagctaacggctctctggatgctgtgaacttggccttacttatggccctcttgtattgcttcgatatctcttttatcgaacagagcacagaagagcgagacgatatgatccaccagctgccactccttactgagaagcaatatatcgcgaccattcattctcggcttcaggactctcagctgtggaagctccccggacttcaggccactgtgcggctcgcatgggccctcgcactaagaggcattagccagctgccagatgtcactgccctcgctgaattcaccgaagccgatgaggccatggctgagctcgctattgccgacaacgtgtttcttttcctcatggagtccgtggtggtatccgagtacttttaccaggaagagttctatataaggcgcgtgcacaatctgattacagacttcttggcactgatgcctatgaaagtcaagcagctgcgcaaccgggcagatgaggacgctcggatgattcatatgtccatgcagatgggtaacgaaccccccatcagtttgagaagagacctcgagcatcttatgctgctgataggtgaactgtacaaaaaaaacccatttcacctcgagcttgctctggaatactggtgtcccacagaacctctgcagaccccgacaattatgggatcatatttgggtgttgcccaccagcgccctccccaaagacaagtggtacttagtaaattcgttcgacagatgggagatcttctaccccccacaatttacattccatacctcaagatgctgcagggactcgccaatggtccacagtgcgcccactattgcttctctctgttgaaagtgaacggctcctcccatgtggaaaatatccagggcgcgggcgggtcacccgtgtcctgggagcatttcttccacagtctcatgctttatcacgagcatctgcggaaggacctaccaagtgcagacagtgtccagtatagacatcttcctagtagaggcatcacacaaaaagaacaggacgggttgattgcctttctacaactgacaagcacgattatcacctggagcgagaatgcccgccttgccctgtgcgagcacccccagtggacccccgtggtcgtcatattgggactgttacaatgttccattccaccggtgttaaaagccgaactgctgaaaacactcgctgcctttggaaaatcccctgagattgcggcctccctttggcagagtctagagtacactcagattttgcagacagtgaggattccatcccagagacaggcaattggaatcgaagtcgagttgaacgagatagaatcgcggtgtgaggagtatccattgactcgggccttctgtcaattaatcagcactctcgtggaatctagttttcccagtaacctgggagctggcctgcgaccacccgggttcgatccttacttgcagtttcttcgcgactccgtgttcctgcgcttccggaccagggcctaccgccgggccgcggagaaatgggaggtggccgaggtggtgctcgaagttttctataaactgcttcgcgattatgagccccagctcgaagactttgtggaccaattcgtggaactacagggagaagaaattatagcgtacaaacctcccggcttttctctgatgtatcacctcctaaacgagagccctatgttggaactggcactgtctcttctggaagagggcgtgaaacagctggatacctacgctccttttccaggtaagaagcacttagagaaagccgtacagcactgtctggctctgctgaacctgacactgcaaaaggaaaatctatttatggacctcctgagagagtcacaactggccctcatcgtttgcccgctcgaacaacttctccaaggcattaacccccgcacaaaaaaggctgataatgtagttaatatagccaggtacctgtaccatggcaacactaaccccgaactggcatttgaatcagcgaaaatcctgtgttgtatctcatgtaatagtaacatacagatcaagctggtcggggatttcactcatgatcaatccatatcacagaaactgatggcaggcttcgtagaatgcttagattgtgaagacgctgaggagttcgtaaggctggaggagggatcagagctggagaagaagctcgtagcaataagacacgaaacccgcatccacatcctgaacctgcttatcaccagcttggaatgcaaccctcctaatctggccctgtatctcctgggctttgagctgaagaagcctgtgtcgactaccaacctccaggacccgggcgtgctgggctgcccccgaacctgtctgcatgccatcctcaatatcttggagaaggggaccgagggccgcacaggccccgtggcggtgcgagaaagtcctcaacttgctgagctgtgttatcaggtaatctatcaactctgcgcttgcagcgatacgagtgggcccactatgagatacctgcggacatcgcaggattttctgttctcccagttgcagtacctgccctttagcaataaggagtatgaaatatcgatgctgaatcagatgtcatggctcatgaaaacagcctccatcgaacttagagtgactagcctgaaccgacagcggtcccacacgcagaggctcctgcacctgcttctcgatgacatgcccgtcaagccctactccgacggcgagggcggcatagaagatgagaaccggtccgtgagtggattcctgcactttgatacagctaccaaagtgcgcagaaaaattctgaatattctggacagcatcgacttcagccaggaaatacccgagcccctccagcttgactttttcgaccgggcccaaatcgagcaggtgatcgcgaactgtgaacataagaatcttcgtggtcaaacagtgtgcaatgtgaaactactgcaccgggtcctcgtcgcggaggttaatgccctgcagggcatggcagccattggtcagcggcccttgcttatggaagaaatctcaaccgtgttacagtatgtggtgggacgcaacaagctgctgcagtgccttcacgccaaacgccacgccctggaaagttggagacaactggtagagattatcctgaccgcctgtcctcaggatctcatccaagcagaggacaggcagctgatcattagggacattctgcaggacgtgcacgataaaatcctcgacgacgaagctgcgcaggagcttatgcctgtggtggccggggcagtcttcaccctgactgctcatttgagccaagccgtgctgaccgagcagaaggaaactagcgtcctgggacccgcggaagcccattatgcgtttatgttggactcttgcttcacctctccgccgcccgaggagaatcctttagtggggtttgccagcataggcgattcatctctgtacattattttaaaaaagctgcttgactttatcctcaagacaggcggcggatttcagagagtgcgaactcacctctacggtagtcttctgtactatctccagattgcacaacgtccagatgagcctgacaccttggaagctgccaaaaaaaccatgtgggaacggctgacggcccccgaggatgtgttcagcaagctccaacgggagaacatagcaatcatcgaatcttacggcgccgcattaatggaggtggtgtgtagggacgcttgcgacggacatgaaattggacgcatgctcgcccttgccctgcttgatagaatagtttcagttgacaagcagcaacagtggctgctctatctatccaacagcggctatctgaaggtgctagtcgatagcctcgtggaagacgatcggaccctgcagtcccttttgacaccacaacctcccttgctgaaggccttgtacacttatgagtccaagatggcatttctaacccgggtggccaaaattcagcagggagccctagagctcctgcgatctggggtcatcgtccgactggcccagtgtcaggtgtatgacatgcggccggagacggacccccagtcaatgtttgggatgagggatcctccgatgtttattccaaccccagtggacagataccgccagatcttactgcctgccttacagctctgccaagtgatcctgacctcctctatggcccaacacctgcaggccgcaggacaagtgctgcaattcttaatctcccattctgacacaatccaggccatcctgaggtgtcaggacgtgtctgctgggagcttgcaagagctggctctgctcaccgggattatctcaaaggcagccctcccaggaattctgtctgagctagacgtggatgtgaacgaagggagcctcatggagctccaaggccacatcgggagattccagcgtcagtgcctgggcctcctgtccagatttggaggttcagatcgcctgaggcagtttaagttccaggacgataatgtagaaggagataaggtctcaaagaaggatgagatagagctcgccatgcagcagatttgcgctaatgtgatggagtattgccaaagcctgatgctgcagtctagcccaacgtttcagcacgctgtgtgcctgtttacccccagcttgagtgagacagtaaacagggacggccctagacaagatactcaggcacctgtggtgccttactggagattgccaggtctgggaataatcatctacctattgaagcagtccgccaacgattttttctcttattacgactcccatcggcagtctgtcagcaaactgcagaatgtggagcagttgccccctgacgaaatcaaggagctgtgccagtcggttatgcccgccggagtggataagatctcgaccgctcagaaatatgtgctcgctaggaggaggctggtgaaagtgataaataatcgggcaaagctcctgtctctgtgctccttcattattgaaacgtgcctgttcattctatggcggcatttagaatattatctcttgcactgcatgccgactgactctcaggattccctctttgcctcccgcactttgtttaaatcccggcggctgcaggatagcttcgcaagcgaaacaaatctagattttcgtagtggtctcgccattgtcagtcaacatgacctggatcagctccaggctgacgccattaacgcattcggtgaatccctccagaagaagttactggacattgagggactgtactccaaggtccgttcccgctacagctttattcaagcgctcgtgcgccggataagaggattactccggataagccgtaattag

SEQ ID NO: 184631 - DNA, 750 bp, Artificial Sequence
  derived and/or modified sequence
atgagcctgcggaactacagcgagcgggaggtgagcgacctgatcaaggagtgtagacagagtctcgccgaatcactgtttgcgtgggcctgtcaatctcccctcggcaaagaagatacgctgttgctgatcggtcatctggagagagttaccgttgaagccaatgggtcattagacgcagtcaacctggctctccttatggcgctgctgtattgcttcgacattagtttcatcgaacagtccactgaagagcgcgacgatatgatccatcagctgccactgctgacggaaaagcagtatatcgccactattcactcgcggctgcaggatagccagctctggaaattgcctgggctccaggcaacggtccggttagcctgggccttggcgttgcggggtattagtcagttgccggacgtgaccgcgctggctgagttcacggaagcagacgaggccatggctgagctggctattgcagataacgtttttctgtttctcatggagagcgtagttgtcagcgagtacttctaccaggaggagttctacatacgacgcgtccacaatttgatcacggacttcctcgcacttatgcctatgaaggtaaagcagctgcgcaaccgagccgacgaggatgcgaggatgattcatatgtcaatgcagatgggaaatgagccacctatctcactgcgccgggaccttgagcatcttatgcttttagtttcgaaattactggtgctgagactcaattag

SEQ ID NO: 184632 - DNA, 6266 bp, Artificial Sequence
  derived and/or modified sequence
aagggctctgttagtgcgcctctaagatggcgacgcctttggcggtaaattcggctgctagtctatggggtccttacaaagacatttggcataaagtgggaaatgctctttggagaagacaacctgaagctgttcaccttcttgataagattttgaagaaacacaaacctgacttcatctcattgttcaaaaatccgccaaaaaatgttcaacagcatgagaaggttcagaaagccagtacagagggagtcgccattcagggtcaacagggaactcgacttcttcctgaacagctcattaaagaagcctttattctcagtgacctttttgatattggagaattggcagctgttgagcttcttcttgctggagagcatcaacagccacattttcctggccttaccagaggattagtagctgttcttctgtactgggatggaaagcgatgcattgcgaattccttgaaagccttgatacagtctagacggggaaagacatggaccctagaactcagtccagagctggcttccatgacaacacgctttacagatgagctgatggagcaaggattgacttataaagttcttacgctggtgtcacagattgatgtgaataatgagtttgagaaactacagcgagagagaggtttgggcagtgaaaaacatcgcaaagaggtttctgatctcattaaggagtgcaggcagtctcttgcagaaagcctttttgcctgggcttgccagtcacctttaggcaaagaagacactctcctcctcattggacatttggaaagagtgacagttgaggctaatggctcactggatgcagtgaatctggctcttcttatggcgcttctatactgttttgatatcagttttatagagcaaagcacagaggaacgagatgatatgattcatcaacttccactgttgacagaaaaacagtacattgcaacaattcactctcgtcttcaggactcacagctttggaaactgcctgggctccaagccactgttagacttgcctgggcgctggcattgaggggaatatcccagctacctgatgtgacagctctggcagaattcacagaggcagatgaagcaatggcagaactcgcaattgctgacaacgttttcctgttcctcatggaatctgtagtggtatcagaatacttttatcaggaagaattttatattcgcagagtccataatctcatcacagatttccttgcacttatgccaatgaaggtgaaacagctgaggaatcgggcagatgaagatgctcgaatgattcacatgagtatgcagatgggtaatgaaccccccatttcacttagaagggacctggaacacttaatgcttttgattggcgagctatataaaaagaacccttttcatctggagcttgctctagaatattggtgtcccacagagcctcttcagactccgactatcatgggctcttatctaggggtggctcatcagcggccccctcaacgccaggttgtcttgtcaaagtttgttaggcaaatgggtgacctgttgcctccaactatttatattccttatttgaagatgctccagggattggccaatgggcctcagtgtgcccactactgtttcagcctgctcaaagtcaatggtagtagtcatgttgaaaatattcagggagcaggtggcagtcctgtttcctgggaacatttctttcactccttgatgctttaccacgaacaccttcggaaggatcttccaagtgcagatagtgtccagtaccgtcaccttccttcccgtggcatcacccagaaggagcaagatggattgattgcttttttgcagctcacgtctaccatcattacttggagtgaaaatgctcgcttggcactctgtgaacaccctcagtggacccctgttgtggtgattctgggactcctccaatgcagtattccccctgtcctaaaagctgagctactgaagacactcgcagcttttggaaaatctcctgaaattgctgcttccctctggcagtcattggaatacactcagatactgcagaccgtgaggattccaagccaaaggcaagctattggtattgaggttgaactaaatgaaatagaatcccggtgtgaagaatacccattgactcgggccttttgccagcttattagtactctggtggagagctcatttccttctaatttgggtgctggactgcggccccctggctttgacccttatttgcagttccttagagactctgtgtttctacgattccgtacaagagcttaccggagagcagctgaaaagtgggaagttgctgaggtggttttggaggtgttttataaattgctcagagattatgagcctcagcttgaagattttgtagaccagtttgtggaactacaaggagaagaaatcatagcctataagccacctggatttagtctgatgtatcatctgctgaatgagtcaccaatgttggagcttgctctcagtttactggaagaaggagttaagcagcttgacacctatgccccctttcctgggaaaaaacacctggagaaagcagtacagcattgccttgcacttctcaatcttactctgcaaaaggaaaatctttttatggaccttctaagagagagtcaactggctctaatagtctgtcctttagaacagcttttgcagggaattaatcccagaactaagaaggcagataatgtggtaaacattgccagatacctatatcatggcaatactaatccagaattggcttttgaaagtgccaagatcctctgttgtatctcttgcaactctaatattcagataaagttggttggagatttcacacatgaccagagtataagtcagaaactaatggctggatttgtggagtgtttggattgtgaagatgcagaagaatttgtacgtctggaagagggatcagaacttgaaaagaaattagttgcaattcgtcatgaaacaagaatccacatcttgaatcttctcattacctctctggaatgcaatccacccaatcttgctctctacctgttgggctttgaattgaaaaaacctgtcagtactacaaacctacaagatccaggagtgttaggttgccctcggacatgccttcacgccattctaaacatcttggagaaaggaacggaagggagaacaggcccagtggcggtgcgagaatctcctcagctggctgagctatgttaccaggtcatatatcagttatgtgcatgctctgatacatctggtcctactatgaggtacttgagaaccagccaggatttcttattttcccagttgcagtatctaccattttctaacaaagaatatgaaatatctatgctgaaccagatgtcatggcttatgaaaactgcctcaatagagctaagggtaacctctctgaatcgtcagcggtcacatacccagaggctcctacacctcttactggatgacatgccagtgaaaccatactcagatggtgaaggaggaatagaagatgaaaacaggtctgtttctgggttccttcactttgacactgctacaaaagtacgtcgaaaaattctaaatattcttgactcgattgacttcagtcaggagatccctgagcctttgcagttggatttttttgatcgggcccagattgaacaagttattgctaactgtgaacacaagaatttacggggacagacagtctgcaatgtcaagcttcttcatagggttcttgtagctgaagtaaatgcccttcagggtatggcagccataggacagagacctctactaatggaggaaatcagcactgtacttcagtatgtggtaggaagaaataaattgctgcagtgtcttcatgcaaaacgtcatgctctggagtcgtggaggcaactagtagaaattatactgacagcttgtccccaggacctcattcaggcagaggatcgacaactgattattcgtgatattttacaagatgtgcatgataagatactggatgatgaagctgcgcaagagttaatgcctgtggtcgccggggcagtgttcacactgactgctcacctaagccaggccgtcctcactgaacagaaggaaacatcagtcttgggaccagcagaggcccattacgcttttatgcttgatagttgcttcacctcacctcctcctgaagagaacccattagtgggttttgcttctattggagattcttcactttacatcatattgaagaaactgttagacttcattttgaagacaggtggtggattccaacgagtgaggactcacttgtatggctctctgctttattacttacagattgcccagagacctgatgaaccagacaccttagaagcagccaagaaaaccatgtgggaaaggctgacagcccctgaagatgtatttagcaaattacagcgagaaaacatagccattattgaaagttatggcgccgccctcatggaagtggtctgtcgagatgcttgtgatggtcatgagattggaaggatgctggccctggctctacttgatagaattgtctccgtggataaacagcagcagtggcttttgtatctttctaacagtggctacttgaaggtcctcgtagacagcttggtagaagatgaccgtactttgcagagcttactcaccccacagcctccccttttaaaagcactttatacttatgaatctaaaatggcatttctcacaagagtggcaaagatacagcagggtgcattagagctgctaagatcaggggtgattgtgagactagctcaatgccaagtctatgacatgcgcccagaaacggacccgcagagcatgtttggcatgagagaccctccaatgttcatccctaccccagtggatcgctaccgccagattctcctcccagctctccagctgtgccaggtcatcctcacatctagtatggcccagcacttgcaggcagcagggcaggtattgcagtttcttatttcacattctgataccatacaagcaattctgcgctgtcaggatgttagtgctgggtctttgcaggaattggctctgctgacaggaattataagtaaagcagcacttcctggaatattaagtgaacttgacgttgatgtaaatgaagggtctctaatggagctacagggacatattggaagattccagcgccagtgcttaggactactaagtcgctttggtggctctgacagactgcgtcagtttaaatttcaagacgataatgtggagggagataaagtaagcaagaaagatgagattgaactggctatgcagcagatttgtgccaatgtaatggaatattgccagtcactcatgttacagagttcccctaccttccagcatgctgtgtgtctcttcactcctagcctttcagaaacagttaatagagatggaccgcggcaagatacccaagctccagtggttccatactggcgcctgcctggtttaggcattatcatctacctgctgaaacagagtgctaatgatttcttcagctattatgacagtcatcgacagagtgtcagcaagctacaaaatgtagagcagcttcccccagatgagataaaagagttgtgtcagtctgtgatgcctgctggtgttgataaaatctccactgctcagaaatatgttctagcaagacggcgcttggtgaaggtgatcaacaatcgagctaaactgctttccctttgttcttttatcatagagacctgcctatttattctttggcgccatctggagtactacttgttacattgcatgcccacggattctcaagattccttatttgcctcgagaaccttgtttaaaagcagaagactgcaagattccttcgcctcagaaaccaatctagattttagaagtgggctggctatagtgagccaacatgatttagaccagcttcaggctgatgcaatcaacgcttttggagaatcactacaaaagaaacttctggacattgaaggattatattcaaaagttcgatctcgatatagtttcatacaggctcttgtcagacgtatccgtggcctcttgaggatatcaaggaactgagagcccgtgcttatgctcttctatgagagagatgaattggggagaattgtctccattttatagattagtttctttctaaattatgaccaaaaatattttgctatttctttctttgtatatggacatcttttctgtaaacttcttcccctagttccatcctcactagtaaaaaataaatactttttaaaaaaacaaaacaaa

SEQ ID NO: 184633 - DNA, 1638 bp, Artificial Sequence
  derived and/or modified sequence
agtgcgcctctaagatggcgacgcctttggcggtaaattcggctgctagtctatggggtccttacaaagacatttggcataaagtgggaaatgctctttggagaagacaacctgaagctgttcaccttcttgataagattttgaagaaacacaaacctgacttcatctcattgttcaaaaatccgccaaaaaatgttcaacagcatgagaaggttcagaaagccagtacagagggagtcgccattcagggtcaacagggaactcgacttcttcctgaacagctcattaaagaagcctttattctcagtgacctttttgatattggagaattggcagctgttgagcttcttcttgctggagagcatcaacagccacattttcctggccttaccagaggattagtagctgttcttctgtactgggatggaaagcgatgcattgcgaattccttgaaagccttgatacagtctagacggggaaagacatggaccctagaactcagtccagagctggcttccatgacaacacgctttacagatgagctgatggagcaaggattgacttataaagttcttacgctggtgtcacagattgatgtgaataatgagtttgagaaactacagcgagagagaggtttctgatctcattaaggagtgcaggcagtctcttgcagaaagcctttttgcctgggcttgccagtcacctttaggcaaagaagacactctcctcctcattggacatttggaaagagtgacagttgaggctaatggctcactggatgcagtgaatctggctcttcttatggcgcttctatactgttttgatatcagttttatagagcaaagcacagaggaacgagatgatatgattcatcaacttccactgttgacagaaaaacagtacattgcaacaattcactctcgtcttcaggactcacagctttggaaactgcctgggctccaagccactgttagacttgcctgggcgctggcattgaggggaatatcccagctacctgatgtgacagctctggcagaattcacagaggcagatgaagcaatggcagaactcgcaattgctgacaacgttttcctgttcctcatggaatctgtagtggtatcagaatacttttatcaggaagaattttatattcgcagagtccataatctcatcacagatttccttgcacttatgccaatgaaggtgaaacagctgaggaatcgggcagatgaagatgctcgaatgattcacatgagtatgcagatgggtaatgaaccccccatttcacttagaagggacctggaacacttaatgcttttggtaagcaagctattggtattgaggttgaactaaatgaaatagaatcccggtgtgaagaatacccattgactcgggccttttgccagcttattagtactctggtggagagctcatttccttctaatttgggtgctggactgcggccccctggctttgacccttatttgcagttccttagagactctgtgtttctacgattccgtacaagagcttaccggagagcagctgaaaagtgggaagttgctgaggtggttttggaggtgttttataaattgctcagagattatgagcctcagcttgaagattttgtagaccagt

SEQ ID NO: 184634 - DNA, 6039 bp, Artificial Sequence
  derived and/or modified sequence
atggcaacgcctctcgcagttaatagcgccgctagcttgtggggcccttataaagacatatggcataaggtgggaaacgcgctgtggcggagacagcctgaggcagtccatctgctggacaagatcctgaaaaagcacaagccagacttcatcagcttatttaaaaatccacccaaaaatgttcaacagcatgaaaaagttcaaaaggctagcactgagggggtcgccattcaggggcagcagggaactcggttgttgcccgagcaactgatcaaggaagcctttatactgagtgacctctttgatattggcgagttggctgccgtcgaattgcttctagccggagagcaccagcagccgcactttccgggtctgactcggggtttagttgccgtgttactctactgggacggcaaaaggtgtattgctaacagcctgaaagcactgatccagtctcgacgcggtaaaacctggacactggagttgtcccctgagctggcctctatgactacgcggttcaccgatgaattgatggaacaggggctgacctacaaggttcttacgctggtctctcaaattgacgtgaataatgagttcgaaaagctccaacgggagagaggtcttggctccgagaaacatagaaaggaggtctctgacctgattaaagagtgtcgacaaagtctggccgaaagtctgtttgcctgggcctgccagagcccactcggcaaggaagacactttactattgattggccatctcgaacgggtgaccgtcgaggcaaatggcagcctggatgccgtgaatctggcactgctgatggcccttctgtattgcttcgatatctcctttatcgagcagtcaacagaagagagggatgacatgatacatcagctgcctctgttgactgagaagcagtatatcgccacgattcactcacgcttgcaagattcccaactgtggaagctgccgggattgcaggcaacggtccggttagcatgggcccttgcacttcgagggattagtcagctacccgacgtcaccgcactggctgaattcaccgaggcagatgaggccatggcagagttggccatcgccgataacgtgttcctgtttctaatggaaagcgtcgtagttagcgagtacttttaccaggaggagttctatataaggcgggtgcacaatcttattaccgattttcttgccctcatgcctatgaaggtgaagcagctgagaaacagagcagacgaagacgcccgaatgattcatatgagcatgcaaatgggaaacgaacctcccattagtcttcgaagagacttagagcatctgatgctgctgattggagaattatacaagaagaaccccttccatctggaactggctctggaatattggtgcccaactgagccacttcagacgccaaccattatggggtcctatctgggtgtggcccaccagcgaccccctcaaagacaggttgtgttgtcaaaattcgtgcggcagatgggagatctcctgcctcccaccatttatatcccttacctgaaaatgttacagggtctggccaacggtcctcagtgcgcacactactgcttctctttgctaaaggtgaatggttcatctcatgtggagaatatacaaggtgctggcggttcccccgtcagctgggagcatttttttcactcgctgatgctctatcacgaacacctccgcaaggacctgccatccgccgactctgttcaatacagacacttaccctccagggggatcacccaaaaagaacaagatggtctgattgcgtttctgcagctcactagcacaatcattacatggagcgaaaacgcaagactggccttgtgtgaacacccgcagtggactccggtggtagtcatcctcggtctgttgcagtgtagcatacctcctgtgcttaaagccgagttgctcaagacccttgctgctttcggcaaatctccagagattgctgcaagtctgtggcagagcctggagtacactcagatcctgcagactgtgcgcataccaagtcagagacaggctatcgggatcgaagtcgaacttaatgaaattgagagtcgatgtgaggagtacccactcacacgagcgttctgccagcttatttccactcttgttgagagctccttcccttccaatctgggagcagggctgcgaccacccggatttgacccctatctacagttcctgcgagatagtgtgtttttacgcttccgtacccgcgcatatagaagagccgctgagaagtgggaagttgccgaggttgttcttgaggtgttttacaaacttctccgagactatgagccacaactggaagacttcgtggaccagtttgtggagctgcagggggaagaaattattgcatacaaacctccaggcttctctttgatgtaccacctgctcaacgaaagccctatgctggagctcgcactgagtttattggaagaaggagtaaaacaacttgacacctacgccccattccccggtaagaagcatctcgagaaggctgtccagcactgtttagccttgttaaatttgaccctgcagaaagaaaatttgttcatggatctgctaagagagtcccagcttgccttaattgtttgcccactggaacagcttctccaaggcataaaccccagaaccaagaaagctgataatgtggttaacatcgcccgttacctctatcatggtaacaccaatcctgagctggcctttgagtccgccaagatcttgtgctgcattagctgcaattccaacattcaaattaaactggttggggacttcacacacgaccagtcaatttcccagaagttaatggctggcttcgtggaatgcctggactgcgaagacgcggaggagtttgtgagactggaggaaggtagcgagctggaaaagaagctcgtggctattaggcacgaaacaagaatccacattctcaatttactgattacgtcgttggaatgtaaccccccaaatctggcgctctacctgttgggcttcgaactaaagaagccggtttcaacaacaaacttgcaagaccctggcgttctgggttgtcctagaacctgcctgcacgccattttaaacatactagagaaagggacagaaggcaggaccggccctgtggcagtgcgggaatcaccccaactggccgagttatgctaccaggttatctaccaactctgcgcatgcagcgatacatccggtccaaccatgagatacctcagaacttcccaggactttctgtttagtcagctgcagtaccttcccttttccaataaagagtatgagattagtatgcttaaccagatgagttggttgatgaaaaccgcttccatagaactgcgggtgacctcactgaatcggcaaagatctcacactcaacgcttgttgcacctcctgctcgacgacatgccagttaagccatactccgacggagaaggagggatagaagatgagaaccggtccgtttctggcttcctccatttcgacaccgcaaccaaggtacggagaaagatactgaacatcctggattctatcgatttttctcaggagatcccggaacctcttcagcttgatttttttgaccgagcccagatcgagcaggtcatcgcaaactgcgaacacaagaatctaagggggcaaacggtgtgtaatgttaaactgctccacagggttttagtagctgaggtgaatgccttacaaggaatggctgctattgggcagagaccactgcttatggaagagatctccaccgtgctgcagtacgttgtagggaggaacaagctgttacagtgtctgcacgcaaaacgtcacgccctcgagtcctggcgacagctggttgaaataatcctgacagcatgtccacaggacctcattcaggctgaagatcgccagttgattattagggacattctgcaggatgtgcatgataagatattggacgacgaagccgcacaggaactgatgcccgtagtcgccggtgccgttttcactctgacggctcacctttcccaggccgtgctgacagaacagaaagagaccagtgttttaggccctgccgaagcccactacgcctttatgctagacagttgtttcactagcccgcctccagaggagaacccgttggttgggtttgccagcattggagacagctccctgtacatcatcttgaagaaacttttagactttattcttaagaccggcggaggtttccagcgtgtgagaacccatctgtacggtagcctcctgtactacctgcaaatcgcccagcgtcctgatgagcccgatacattggaagcggcaaaaaagacgatgtgggagcgactaacagccccagaggacgtgtttagtaagctccaacgggagaatatcgcaatcatcgagagctatggggctgccctcatggaagtcgtatgtagggatgcatgtgatggtcacgagatcggcaggatgctcgctcttgcccttctggatagaatcgtctctgttgataaacagcagcagtggctgctgtacctgtctaattccggatatcttaaagttctggtcgactccctggtcgaggacgatagaaccttacagtctctgttaaccccccaaccacccttgctcaaggctctttacacttatgagtctaagatggcgtttttgacacgagtagcgaagattcagcagggagcgctggagcttctcagaagtggcgtgatcgtgcgcctggcgcagtgtcaggtgtatgacatgcgccctgagactgatccacaaagcatgtttggcatgcgagaccctcctatgtttatccctacgcctgtggacaggtatcggcaaattctcctcccagcactgcagctttgccaagtcatcttgacatccagtatggcacagcatttgcaggcagccggtcaggtgctgcagtttctgatctcccactccgataccatacaggccatactgagatgccaagacgtgagcgctggctctttacaggaactcgcactgcttactgggataatcagtaaggctgccctgcccggaatactgtctgagttggacgtcgatgtgaacgagggttcacttatggagttgcaaggacacatcggacgttttcagagacagtgcctggggctgcttagccgctttggagggtccgacagacttcggcagttcaagtttcaggacgacaacgtcgaaggagataaggtctccaaaaaagacgaaatcgaactcgcaatgcaacaaatttgcgccaacgtcatggaatactgccagtctctcatgctccagagttctccgaccttccagcatgccgtgtgcctgttcacaccttccctgtctgagacagtgaaccgcgatggaccgcgtcaagatacacaggcaccggtggtgccttactggaggctgcctggccttggcattatcatctatctactcaaacagagcgctaatgactttttctcctattatgactcacacaggcaaagcgtatctaaattgcagaacgttgaacaattgccgcctgacgaaattaaggagctgtgtcagtcagttatgccagcgggagtcgacaagatcagcaccgcgcagaagtatgtgctcgccagacggaggctggtaaaggtcatcaataaccgggcaaagctactcagcctgtgtagctttattatcgagacttgcctgtttattctgtggcgccatttagaatactacctgctgcattgcatgcctaccgatagtcaagattctttgttcgcatcaaggaccctgttcaagagtcgcaggctgcaggattcattcgcctccgagacaaacctggactttcggtccggacttgccatcgtgtcacagcacgacttggatcagctgcaggccgacgctattaatgcgttcggggagtcgctgcaaaagaaactgctcgatatagaaggcctgtatagcaaggtaaggagtcgctatagcttcatacaggcgctggtccggagaatcagggggctcctgcgaatatcaaggaactac

SEQ ID NO: 184635 - DNA, 750 bp, Artificial Sequence
  derived and/or modified sequence
atgtcactgcgcaactactccgaaagggaggtttcggaccttatcaaggaatgccgccagtcccttgcagagtcactgtttgcctgggcctgtcagagcccactaggcaaggaggacacacttcttctcatcggacatctggaacgcgtgacggttgaggcaaacggaagcctcgatgccgtgaacctcgcactcctgatggcactcctatactgttttgacatctcctttatcgaacaaagtacagaagagcgggacgacatgattcatcagctcccactgttaaccgaaaagcaatatatcgcaaccattcactctcgcctccaggattcacagttatggaaacttccgggtctgcaagccacggtgcgcctggcatgggctctggcactacgcggtatttcacaactcccagatgttactgccctggctgagtttacggaggcagacgaggctatggccgaacttgccatagctgataatgtgttcttgtttctgatggagagcgtagtggtgtccgagtatttttatcaggaggagttctatattaggcgagttcataatttaataacggatttcctcgctctcatgccaatgaaggtgaagcagctgaggaatcgcgctgacgaagacgcccgtatgatacacatgagcatgcagatggggaatgagcctcctattagtcttcgccgtgaccttgagcacttaatgctgctggtatcaaagctgctggtcctgcggcttaattag

SEQ ID NO: 184636 - DNA, 6039 bp, Artificial Sequence
  derived and/or modified sequence
atggccacccccctggccgtgaacagcgccgccagcctgtggggcccctacaaggacatctggcacaaggtgggcaacgccctgtggagaagacagcccgaggccgtgcacctgctggacaagatcctgaagaagcacaagcccgacttcatcagcctgttcaagaacccccccaagaacgtgcagcagcacgagaaggtgcagaaggccagcaccgagggcgtggccatccagggccagcagggcaccagactgctgcccgagcagctgatcaaggaggccttcatcctgagcgacctgttcgacatcggcgagctggccgccgtggagctgctgctggccggcgagcaccagcagccccacttccccggcctgaccagaggcctggtggccgtgctgctgtactgggacggcaagagatgcatcgccaacagcctgaaggccctgatccagagcagaagaggcaagacctggaccctggagctgagccccgagctggccagcatgaccaccagattcaccgacgagctgatggagcagggcctgacctacaaggtgctgaccctggtgagccagatcgacgtgaacaacgagttcgagaagctgcagagagagagaggcctgggcagcgagaagcacagaaaggaggtgagcgacctgatcaaggagtgcagacagagcctggccgagagcctgttcgcctgggcctgccagagccccctgggcaaggaggacaccctgctgctgatcggccacctggagagagtgaccgtggaggccaacggcagcctggacgccgtgaacctggccctgctgatggccctgctgtactgcttcgacatcagcttcatcgagcagagcaccgaggagagagacgacatgatccaccagctgcccctgctgaccgagaagcagtacatcgccaccatccacagcagactgcaggacagccagctgtggaagctgcccggcctgcaggccaccgtgagactggcctgggccctggccctgagaggcatcagccagctgcccgacgtgaccgccctggccgagttcaccgaggccgacgaggccatggccgagctggccatcgccgacaacgtgttcctgttcctgatggagagcgtggtggtgagcgagtacttctaccaggaggagttctacatcagaagagtgcacaacctgatcaccgacttcctggccctgatgcccatgaaggtgaagcagctgagaaacagagccgacgaggacgccagaatgatccacatgagcatgcagatgggcaacgagccccccatcagcctgagaagagacctggagcacctgatgctgctgatcggcgagctgtacaagaagaaccccttccacctggagctggccctggagtactggtgccccaccgagcccctgcagacccccaccatcatgggcagctacctgggcgtggcccaccagagacccccccagagacaggtggtgctgagcaagttcgtgagacagatgggcgacctgctgccccccaccatctacatcccctacctgaagatgctgcagggcctggccaacggcccccagtgcgcccactactgcttcagcctgctgaaggtgaacggcagcagccacgtggagaacatccagggcgccggcggcagccccgtgagctgggagcacttcttccacagcctgatgctgtaccacgagcacctgagaaaggacctgcccagcgccgacagcgtgcagtacagacacctgcccagcagaggcatcacccagaaggagcaggacggcctgatcgccttcctgcagctgaccagcaccatcatcacctggagcgagaacgccagactggccctgtgcgagcacccccagtggacccccgtggtggtgatcctgggcctgctgcagtgcagcatcccccccgtgctgaaggccgagctgctgaagaccctggccgccttcggcaagagccccgagatcgccgccagcctgtggcagagcctggagtacacccagatcctgcagaccgtgagaatccccagccagagacaggccatcggcatcgaggtggagctgaacgagatcgagagcagatgcgaggagtaccccctgaccagagccttctgccagctgatcagcaccctggtggagagcagcttccccagcaacctgggcgccggcctgagaccccccggcttcgacccctacctgcagttcctgagagacagcgtgttcctgagattcagaaccagagcctacagaagagccgccgagaagtgggaggtggccgaggtggtgctggaggtgttctacaagctgctgagagactacgagccccagctggaggacttcgtggaccagttcgtggagctgcagggcgaggagatcatcgcctacaagccccccggcttcagcctgatgtaccacctgctgaacgagagccccatgctggagctggccctgagcctgctggaggagggcgtgaagcagctggacacctacgcccccttccccggcaagaagcacctggagaaggccgtgcagcactgcctggccctgctgaacctgaccctgcagaaggagaacctgttcatggacctgctgagagagagccagctggccctgatcgtgtgccccctggagcagctgctgcagggcatcaaccccagaaccaagaaggccgacaacgtggtgaacatcgccagatacctgtaccacggcaacaccaaccccgagctggccttcgagagcgccaagatcctgtgctgcatcagctgcaacagcaacatccagatcaagctggtgggcgacttcacccacgaccagagcatcagccagaagctgatggccggcttcgtggagtgcctggactgcgaggacgccgaggagttcgtgagactggaggagggcagcgagctggagaagaagctggtggccatcagacacgagaccagaatccacatcctgaacctgctgatcaccagcctggagtgcaacccccccaacctggccctgtacctgctgggcttcgagctgaagaagcccgtgagcaccaccaacctgcaggaccccggcgtgctgggctgccccagaacctgcctgcacgccatcctgaacatcctggagaagggcaccgagggcagaaccggccccgtggccgtgagagagagcccccagctggccgagctgtgctaccaggtgatctaccagctgtgcgcctgcagcgacaccagcggccccaccatgagatacctgagaaccagccaggacttcctgttcagccagctgcagtacctgcccttcagcaacaaggagtacgagatcagcatgctgaaccagatgagctggctgatgaagaccgccagcatcgagctgagagtgaccagcctgaacagacagagaagccacacccagagactgctgcacctgctgctggacgacatgcccgtgaagccctacagcgacggcgagggcggcatcgaggacgagaacagaagcgtgagcggcttcctgcacttcgacaccgccaccaaggtgagaagaaagatcctgaacatcctggacagcatcgacttcagccaggagatccccgagcccctgcagctggacttcttcgacagagcccagatcgagcaggtgatcgccaactgcgagcacaagaacctgagaggccagaccgtgtgcaacgtgaagctgctgcacagagtgctggtggccgaggtgaacgccctgcagggcatggccgccatcggccagagacccctgctgatggaggagatcagcaccgtgctgcagtacgtggtgggcagaaacaagctgctgcagtgcctgcacgccaagagacacgccctggagagctggagacagctggtggagatcatcctgaccgcctgcccccaggacctgatccaggccgaggacagacagctgatcatcagagacatcctgcaggacgtgcacgacaagatcctggacgacgaggccgcccaggagctgatgcccgtggtggccggcgccgtgttcaccctgaccgcccacctgagccaggccgtgctgaccgagcagaaggagaccagcgtgctgggccccgccgaggcccactacgccttcatgctggacagctgcttcaccagccccccccccgaggagaaccccctggtgggcttcgccagcatcggcgacagcagcctgtacatcatcctgaagaagctgctggacttcatcctgaagaccggcggcggcttccagagagtgagaacccacctgtacggcagcctgctgtactacctgcagatcgcccagagacccgacgagcccgacaccctggaggccgccaagaagaccatgtgggagagactgaccgcccccgaggacgtgttcagcaagctgcagagagagaacatcgccatcatcgagagctacggcgccgccctgatggaggtggtgtgcagagacgcctgcgacggccacgagatcggcagaatgctggccctggccctgctggacagaatcgtgagcgtggacaagcagcagcagtggctgctgtacctgagcaacagcggctacctgaaggtgctggtggacagcctggtggaggacgacagaaccctgcagagcctgctgaccccccagccccccctgctgaaggccctgtacacctacgagagcaagatggccttcctgaccagagtggccaagatccagcagggcgccctggagctgctgagaagcggcgtgatcgtgagactggcccagtgccaggtgtacgacatgagacccgagaccgacccccagagcatgttcggcatgagagacccccccatgttcatccccacccccgtggacagatacagacagatcctgctgcccgccctgcagctgtgccaggtgatcctgaccagcagcatggcccagcacctgcaggccgccggccaggtgctgcagttcctgatcagccacagcgacaccatccaggccatcctgagatgccaggacgtgagcgccggcagcctgcaggagctggccctgctgaccggcatcatcagcaaggccgccctgcccggcatcctgagcgagctggacgtggacgtgaacgagggcagcctgatggagctgcagggccacatcggcagattccagagacagtgcctgggcctgctgagcagattcggcggcagcgacagactgagacagttcaagttccaggacgacaacgtggagggcgacaaggtgagcaagaaggacgagatcgagctggccatgcagcagatctgcgccaacgtgatggagtactgccagagcctgatgctgcagagcagccccaccttccagcacgccgtgtgcctgttcacccccagcctgagcgagaccgtgaacagagacggccccagacaggacacccaggcccccgtggtgccctactggagactgcccggcctgggcatcatcatctacctgctgaagcagagcgccaacgacttcttcagctactacgacagccacagacagagcgtgagcaagctgcagaacgtggagcagctgccccccgacgagatcaaggagctgtgccagagcgtgatgcccgccggcgtggacaagatcagcaccgcccagaagtacgtgctggccagaagaagactggtgaaggtgatcaacaacagagccaagctgctgagcctgtgcagcttcatcatcgagacctgcctgttcatcctgtggagacacctggagtactacctgctgcactgcatgcccaccgacagccaggacagcctgttcgccagcagaaccctgttcaagagcagaagactgcaggacagcttcgccagcgagaccaacctggacttcagaagcggcctggccatcgtgagccagcacgacctggaccagctgcaggccgacgccatcaacgccttcggcgagagcctgcagaagaagctgctggacatcgagggcctgtacagcaaggtgagaagcagatacagcttcatccaggccctggtgagaagaatcagaggcctgctgagaatcagcagaaactag

SEQ ID NO: 184637 - DNA, 750 bp, Artificial Sequence
  derived and/or modified sequence
atgagcctgagaaactacagcgagagagaggtgagcgacctgatcaaggagtgcagacagagcctggccgagagcctgttcgcctgggcctgccagagccccctgggcaaggaggacaccctgctgctgatcggccacctggagagagtgaccgtggaggccaacggcagcctggacgccgtgaacctggccctgctgatggccctgctgtactgcttcgacatcagcttcatcgagcagagcaccgaggagagagacgacatgatccaccagctgcccctgctgaccgagaagcagtacatcgccaccatccacagcagactgcaggacagccagctgtggaagctgcccggcctgcaggccaccgtgagactggcctgggccctggccctgagaggcatcagccagctgcccgacgtgaccgccctggccgagttcaccgaggccgacgaggccatggccgagctggccatcgccgacaacgtgttcctgttcctgatggagagcgtggtggtgagcgagtacttctaccaggaggagttctacatcagaagagtgcacaacctgatcaccgacttcctggccctgatgcccatgaaggtgaagcagctgagaaacagagccgacgaggacgccagaatgatccacatgagcatgcagatgggcaacgagccccccatcagcctgagaagagacctggagcacctgatgctgctggtgagcaagctgctggtgctgagactgaactag

SEQ ID NO: 184638 - protein, 2570 aa, Artificial Sequence
  derived and/or modified sequence
MAGPRGLLPLCLLAFCLAGFSFVRGQVLFKGCDVKTTFVTHVPCTSCAAIKKQTCPSGWLRELPDQITQDCRYEVQLGGSMVSMSGCRRKCRKQVVQKACCPGYWGSRCHECPGGAETPCNGHGTCLDGMDRNGTCVCQENFRGSACQECQDPNRFGPDCQSVCSCVHGVCNHGPRGDGSCLCFAGYTGPHCDQELPVCQELRCPQNTQCSAEAPSCRCLPGYTQQGSECRAPNPCWPSPCSLLAQCSVSPKGQAQCHCPENYHGDGMVCLPKDPCTDNLGGCPSNSTLCVYQKPGQAFCTCRPGLVSINSNASAGCFAFCSPFSCDRSATCQVTADGKTSCVCRESEVGDGRACYGHLLHEVQKATQTGRVFLQLRVAVAMMDQGCREILTTAGPFTVLVPSVSSFSSRTMNASLAQQLCRQHIIAGQHILEDTRTQQTRRWWTLAGQEITVTFNQFTKYSYKYKDQPQQTFNIYKANNIAANGVFHVVTGLRWQAPSGTPGDPKRTIGQILASTEAFSRFETILENCGLPSILDGPGPFTVFAPSNEAVDSLRDGRLIYLFTAGLSKLQELVRYHIYNHGQLTVEKLISKGRILTMANQVLAVNISEEGRILLGPEGVPLQRVDVMAANGVIHMLDGILLPPTILPILPKHCSEEQHKIVAGSCVDCQALNTSTCPPNSVKLDIFPKECVYIHDPTGLNVLKKGCASYCNQTIMEQGCCKGFFGPDCTQCPGGFSNPCYGKGNCSDGIQGNGACLCFPDYKGIACHICSNPNKHGEQCQEDCGCVHGLCDNRPGSGGVCQQGTCAPGFSGRFCNESMGDCGPTGLAQHCHLHARCVSQEGVARCRCLDGFEGDGFSCTPSNPCSHPDRGGCSENAECVPGSLGTHHCTCHKGWSGDGRVCVAIDECELDMRGGCHTDALCSYVGPGQSRCTCKLGFAGDGYQCSPIDPCRAGNGGCHGLATCRAVGGGQRVCTCPPGFGGDGFSCYGDIFRELEANAHFSIFYQWLKSAGITLPADRRVTALVPSEAAVRQLSPEDRAFWLQPRTLPNLVRAHFLQGALFEEELARLGGQEVATLNPTTRWEIRNISGRVWVQNASVDVADLLATNGVLHILSQVLLPPRGDVPGGQGLLQQLDLVPAFSLFRELLQHHGLVPQIEAATAYTIFVPTNRSLEAQGNSSHLDADTVRHHVVLGEALSMETLRKGGHRNSLLGPAHWIVFYNHSGQPEVNHVPLEGPMLEAPGRSLIGLSGVLTVGSSRCLHSHAEALREKCVNCTRRFRCTQGFQLQDTPRKSCVYRSGFSFSRGCSYTCAKKIQVPDCCPGFFGTLCEPCPGGLGGVCSGHGQCQDRFLGSGECHCHEGFHGTACEVCELGRYGPNCTGVCDCAHGLCQEGLQGDGSCVCNVGWQGLRCDQKITSPQCPRKCDPNANCVQDSAGASTCACAAGYSGNGIFCSEVDPCAHGHGGCSPHANCTKVAPGQRTCTCQDGYMGDGELCQEINSCLIHHGGCHIHAECIPTGPQQVSCSCREGYSGDGIRTCELLDPCSKNNGGCSPYATCKSTGDGQRTCTCDTAHTVGDGLTCRARVGLELLRDKHASFFSLRLLEYKELKGDGPFTIFVPHADLMSNLSQDELARIRAHRQLVFRYHVVGCRRLRSEDLLEQGYATALSGHPLRFSEREGSIYLNDFARVVSSDHEAVNGILHFIDRVLLPPEALHWEPDDAPIPRRNVTAAAQGFGYKIFSGLLKVAGLLPLLREASHRPFTMLWPTDAAFRALPPDRQAWLYHEDHRDKLAAILRGHMIRNVEALASDLPNLGPLRTMHGTPISFSCSRTRAGELMVGEDDARIVQRHLPFEGGLAYGIDQLLEPPGLGARCDHFETRPLRLNTCSICGLEPPCPEGSQEQGSPEACWRFYPKFWTSPPLHSLGLRSVWVHPSLWGRPQGLGRGCHRNCVTTTWKPSCCPGHYGSECQACPGGPSSPCSDRGVCMDGMSGSGQCLCRSGFAGTACELCAPGAFGPHCQACRCTVHGRCDEGLGGSGSCFCDEGWTGPRCEVQLELQPVCTPPCAPEAVCRAGNSCECSLGYEGDGRVCTVADLCQDGHGGCSEHANCSQVGTMVTCTCLPDYEGDGWSCRARNPCTDGHRGGCSEHANCLSTGLNTRRCECHAGYVGDGLQCLEESEPPVDRCLGQPPPCHSDAMCTDLHFQEKRAGVFHLQATSGPYGLNFSEAEAACEAQGAVLASFPQLSAAQQLGFHLCLMGWLANGSTAHPVVFPVADCGNGRVGIVSLGARKNLSERWDAYCFRVQDVACRCRNGFVGDGISTCNGKLLDVLAATANFSTFYGMLLGYANATQRGLDFLDFLDDELTYKTLFVPVNEGFVDNMTLSGPDLELHASNATLLSANASQGKLLPAHSGLSLIISDAGPDNSSWAPVAPGTVVVSRIIVWDIMAFNGIIHALASPLLAPPQPQAVLAPEAPPVAAGVGAVLAAGALLGLVAGALYLRARGKPMGFGFSAFQAEDDADDDFSPWQEGTNPTLVSVPNPVFGSDTFCEPFDDSLLEEDFPDTQRILTVK

SEQ ID NO: 184639 - DNA, 7713 bp, Artificial Sequence
  derived and/or modified sequence
atggccggccccagaggcctgctgcccctgtgcctgctggccttctgcctggccggcttcagcttcgtgagaggccaggtgctgttcaagggctgcgacgtgaagaccaccttcgtgacccacgtgccctgcaccagctgcgccgccatcaagaagcagacctgccccagcggctggctgagagagctgcccgaccagatcacccaggactgcagatacgaggtgcagctgggcggcagcatggtgagcatgagcggctgcagaagaaagtgcagaaagcaggtggtgcagaaggcctgctgccccggctactggggcagcagatgccacgagtgccccggcggcgccgagaccccctgcaacggccacggcacctgcctggacggcatggacagaaacggcacctgcgtgtgccaggagaacttcagaggcagcgcctgccaggagtgccaggaccccaacagattcggccccgactgccagagcgtgtgcagctgcgtgcacggcgtgtgcaaccacggccccagaggcgacggcagctgcctgtgcttcgccggctacaccggcccccactgcgaccaggagctgcccgtgtgccaggagctgagatgcccccagaacacccagtgcagcgccgaggcccccagctgcagatgcctgcccggctacacccagcagggcagcgagtgcagagcccccaacccctgctggcccagcccctgcagcctgctggcccagtgcagcgtgagccccaagggccaggcccagtgccactgccccgagaactaccacggcgacggcatggtgtgcctgcccaaggacccctgcaccgacaacctgggcggctgccccagcaacagcaccctgtgcgtgtaccagaagcccggccaggccttctgcacctgcagacccggcctggtgagcatcaacagcaacgccagcgccggctgcttcgccttctgcagccccttcagctgcgacagaagcgccacctgccaggtgaccgccgacggcaagaccagctgcgtgtgcagagagagcgaggtgggcgacggcagagcctgctacggccacctgctgcacgaggtgcagaaggccacccagaccggcagagtgttcctgcagctgagagtggccgtggccatgatggaccagggctgcagagagatcctgaccaccgccggccccttcaccgtgctggtgcccagcgtgagcagcttcagcagcagaaccatgaacgccagcctggcccagcagctgtgcagacagcacatcatcgccggccagcacatcctggaggacaccagaacccagcagaccagaagatggtggaccctggccggccaggagatcaccgtgaccttcaaccagttcaccaagtacagctacaagtacaaggaccagccccagcagaccttcaacatctacaaggccaacaacatcgccgccaacggcgtgttccacgtggtgaccggcctgagatggcaggcccccagcggcacccccggcgaccccaagagaaccatcggccagatcctggccagcaccgaggccttcagcagattcgagaccatcctggagaactgcggcctgcccagcatcctggacggccccggccccttcaccgtgttcgcccccagcaacgaggccgtggacagcctgagagacggcagactgatctacctgttcaccgccggcctgagcaagctgcaggagctggtgagataccacatctacaaccacggccagctgaccgtggagaagctgatcagcaagggcagaatcctgaccatggccaaccaggtgctggccgtgaacatcagcgaggagggcagaatcctgctgggccccgagggcgtgcccctgcagagagtggacgtgatggccgccaacggcgtgatccacatgctggacggcatcctgctgccccccaccatcctgcccatcctgcccaagcactgcagcgaggagcagcacaagatcgtggccggcagctgcgtggactgccaggccctgaacaccagcacctgcccccccaacagcgtgaagctggacatcttccccaaggagtgcgtgtacatccacgaccccaccggcctgaacgtgctgaagaagggctgcgccagctactgcaaccagaccatcatggagcagggctgctgcaagggcttcttcggccccgactgcacccagtgccccggcggcttcagcaacccctgctacggcaagggcaactgcagcgacggcatccagggcaacggcgcctgcctgtgcttccccgactacaagggcatcgcctgccacatctgcagcaaccccaacaagcacggcgagcagtgccaggaggactgcggctgcgtgcacggcctgtgcgacaacagacccggcagcggcggcgtgtgccagcagggcacctgcgcccccggcttcagcggcagattctgcaacgagagcatgggcgactgcggccccaccggcctggcccagcactgccacctgcacgccagatgcgtgagccaggagggcgtggccagatgcagatgcctggacggcttcgagggcgacggcttcagctgcacccccagcaacccctgcagccaccccgacagaggcggctgcagcgagaacgccgagtgcgtgcccggcagcctgggcacccaccactgcacctgccacaagggctggagcggcgacggcagagtgtgcgtggccatcgacgagtgcgagctggacatgagaggcggctgccacaccgacgccctgtgcagctacgtgggccccggccagagcagatgcacctgcaagctgggcttcgccggcgacggctaccagtgcagccccatcgacccctgcagagccggcaacggcggctgccacggcctggccacctgcagagccgtgggcggcggccagagagtgtgcacctgcccccccggcttcggcggcgacggcttcagctgctacggcgacatcttcagagagctggaggccaacgcccacttcagcatcttctaccagtggctgaagagcgccggcatcaccctgcccgccgacagaagagtgaccgccctggtgcccagcgaggccgccgtgagacagctgagccccgaggacagagccttctggctgcagcccagaaccctgcccaacctggtgagagcccacttcctgcagggcgccctgttcgaggaggagctggccagactgggcggccaggaggtggccaccctgaaccccaccaccagatgggagatcagaaacatcagcggcagagtgtgggtgcagaacgccagcgtggacgtggccgacctgctggccaccaacggcgtgctgcacatcctgagccaggtgctgctgccccccagaggcgacgtgcccggcggccagggcctgctgcagcagctggacctggtgcccgccttcagcctgttcagagagctgctgcagcaccacggcctggtgccccagatcgaggccgccaccgcctacaccatcttcgtgcccaccaacagaagcctggaggcccagggcaacagcagccacctggacgccgacaccgtgagacaccacgtggtgctgggcgaggccctgagcatggagaccctgagaaagggcggccacagaaacagcctgctgggccccgcccactggatcgtgttctacaaccacagcggccagcccgaggtgaaccacgtgcccctggagggccccatgctggaggcccccggcagaagcctgatcggcctgagcggcgtgctgaccgtgggcagcagcagatgcctgcacagccacgccgaggccctgagagagaagtgcgtgaactgcaccagaagattcagatgcacccagggcttccagctgcaggacacccccagaaagagctgcgtgtacagaagcggcttcagcttcagcagaggctgcagctacacctgcgccaagaagatccaggtgcccgactgctgccccggcttcttcggcaccctgtgcgagccctgccccggcggcctgggcggcgtgtgcagcggccacggccagtgccaggacagattcctgggcagcggcgagtgccactgccacgagggcttccacggcaccgcctgcgaggtgtgcgagctgggcagatacggccccaactgcaccggcgtgtgcgactgcgcccacggcctgtgccaggagggcctgcagggcgacggcagctgcgtgtgcaacgtgggctggcagggcctgagatgcgaccagaagatcaccagcccccagtgccccagaaagtgcgaccccaacgccaactgcgtgcaggacagcgccggcgccagcacctgcgcctgcgccgccggctacagcggcaacggcatcttctgcagcgaggtggacccctgcgcccacggccacggcggctgcagcccccacgccaactgcaccaaggtggcccccggccagagaacctgcacctgccaggacggctacatgggcgacggcgagctgtgccaggagatcaacagctgcctgatccaccacggcggctgccacatccacgccgagtgcatccccaccggcccccagcaggtgagctgcagctgcagagagggctacagcggcgacggcatcagaacctgcgagctgctggacccctgcagcaagaacaacggcggctgcagcccctacgccacctgcaagagcaccggcgacggccagagaacctgcacctgcgacaccgcccacaccgtgggcgacggcctgacctgcagagccagagtgggcctggagctgctgagagacaagcacgccagcttcttcagcctgagactgctggagtacaaggagctgaagggcgacggccccttcaccatcttcgtgccccacgccgacctgatgagcaacctgagccaggacgagctggccagaatcagagcccacagacagctggtgttcagataccacgtggtgggctgcagaagactgagaagcgaggacctgctggagcagggctacgccaccgccctgagcggccaccccctgagattcagcgagagagagggcagcatctacctgaacgacttcgccagagtggtgagcagcgaccacgaggccgtgaacggcatcctgcacttcatcgacagagtgctgctgccccccgaggccctgcactgggagcccgacgacgcccccatccccagaagaaacgtgaccgccgccgcccagggcttcggctacaagatcttcagcggcctgctgaaggtggccggcctgctgcccctgctgagagaggccagccacagacccttcaccatgctgtggcccaccgacgccgccttcagagccctgccccccgacagacaggcctggctgtaccacgaggaccacagagacaagctggccgccatcctgagaggccacatgatcagaaacgtggaggccctggccagcgacctgcccaacctgggccccctgagaaccatgcacggcacccccatcagcttcagctgcagcagaaccagagccggcgagctgatggtgggcgaggacgacgccagaatcgtgcagagacacctgcccttcgagggcggcctggcctacggcatcgaccagctgctggagccccccggcctgggcgccagatgcgaccacttcgagaccagacccctgagactgaacacctgcagcatctgcggcctggagcccccctgccccgagggcagccaggagcagggcagccccgaggcctgctggagattctaccccaagttctggaccagcccccccctgcacagcctgggcctgagaagcgtgtgggtgcaccccagcctgtggggcagaccccagggcctgggcagaggctgccacagaaactgcgtgaccaccacctggaagcccagctgctgccccggccactacggcagcgagtgccaggcctgccccggcggccccagcagcccctgcagcgacagaggcgtgtgcatggacggcatgagcggcagcggccagtgcctgtgcagaagcggcttcgccggcaccgcctgcgagctgtgcgcccccggcgccttcggcccccactgccaggcctgcagatgcaccgtgcacggcagatgcgacgagggcctgggcggcagcggcagctgcttctgcgacgagggctggaccggccccagatgcgaggtgcagctggagctgcagcccgtgtgcacccccccctgcgcccccgaggccgtgtgcagagccggcaacagctgcgagtgcagcctgggctacgagggcgacggcagagtgtgcaccgtggccgacctgtgccaggacggccacggcggctgcagcgagcacgccaactgcagccaggtgggcaccatggtgacctgcacctgcctgcccgactacgagggcgacggctggagctgcagagccagaaacccctgcaccgacggccacagaggcggctgcagcgagcacgccaactgcctgagcaccggcctgaacaccagaagatgcgagtgccacgccggctacgtgggcgacggcctgcagtgcctggaggagagcgagccccccgtggacagatgcctgggccagccccccccctgccacagcgacgccatgtgcaccgacctgcacttccaggagaagagagccggcgtgttccacctgcaggccaccagcggcccctacggcctgaacttcagcgaggccgaggccgcctgcgaggcccagggcgccgtgctggccagcttcccccagctgagcgccgcccagcagctgggcttccacctgtgcctgatgggctggctggccaacggcagcaccgcccaccccgtggtgttccccgtggccgactgcggcaacggcagagtgggcatcgtgagcctgggcgccagaaagaacctgagcgagagatgggacgcctactgcttcagagtgcaggacgtggcctgcagatgcagaaacggcttcgtgggcgacggcatcagcacctgcaacggcaagctgctggacgtgctggccgccaccgccaacttcagcaccttctacggcatgctgctgggctacgccaacgccacccagagaggcctggacttcctggacttcctggacgacgagctgacctacaagaccctgttcgtgcccgtgaacgagggcttcgtggacaacatgaccctgagcggccccgacctggagctgcacgccagcaacgccaccctgctgagcgccaacgccagccagggcaagctgctgcccgcccacagcggcctgagcctgatcatcagcgacgccggccccgacaacagcagctgggcccccgtggcccccggcaccgtggtggtgagcagaatcatcgtgtgggacatcatggccttcaacggcatcatccacgccctggccagccccctgctggcccccccccagccccaggccgtgctggcccccgaggccccccccgtggccgccggcgtgggcgccgtgctggccgccggcgccctgctgggcctggtggccggcgccctgtacctgagagccagaggcaagcccatgggcttcggcttcagcgccttccaggccgaggacgacgccgacgacgacttcagcccctggcaggagggcaccaaccccaccctggtgagcgtgcccaaccccgtgttcggcagcgacaccttctgcgagcccttcgacgacagcctgctggaggaggacttccccgacacccagagaatcctgaccgtgaagtag

SEQ ID NO: 184640 - DNA, 7713 bp, Artificial Sequence
  derived and/or modified sequence
atggcaggtccccggggccttctccctctgtgcttgcttgccttctgcctggcaggcttcagttttgtcaggggccaagttctgtttaaagggtgtgatgtcaagaccacctttgtgactcatgtcccttgtacaagctgcgctgccataaagaaacagacctgccccagcggatggctgcgggaattgcccgaccagattacccaagattgtcgttacgaggtgcagttggggggttctatggtgtctatgtctggctgtcgcagaaaatgccgcaagcaggttgtgcagaaagcatgctgcccagggtattggggctcaaggtgccacgagtgtcccggcggggcggagactccttgcaatggccacggaacgtgtttggatggcatggatcgcaatgggacttgtgtatgccaggagaatttcaggggctctgcctgccaggagtgtcaggatccaaaccgttttggccctgactgccagagcgtgtgttcttgcgttcacggcgtgtgcaatcacggccctcgaggcgacggctcctgcctctgctttgccggttatactggccctcattgcgaccaggagttacccgtatgccaagaactgcggtgcccacagaacacacaatgttcagccgaggcgccatcttgcaggtgtcttcctgggtacacccagcaggggtccgaatgccgagcgcctaatccctgctggcctagcccctgctctctcctggcacagtgttccgtgagcccaaaaggtcaggcacaatgccactgtcccgagaactaccacggcgacgggatggtttgtcttcccaaagatccctgtaccgataatcttggcggatgtccctccaactccaccctgtgtgtataccaaaagcccggacaggccttctgtacgtgtcgacccggtctggtttccatcaatagcaacgccagcgccgggtgcttcgctttctgtagcccctttagctgcgaccgttccgccacctgtcaggttacggctgacgggaagaccagctgcgtttgtcgtgagagcgaagtaggagacggtagagcgtgctatgggcacctcctccacgaggtgcagaaggccacccaaacaggacgggtgttcctccagctccgggtggccgttgccatgatggatcagggctgtagggagattttaaccacagccgggccatttactgtccttgtcccttccgtgtctagtttctcatcccgcactatgaatgcttctctggcacagcagctgtgtcgccaacacataattgccggtcagcacattttggaagacactcgcactcagcaaacgaggaggtggtggacgctcgctggacaggaaataacggtaactttcaaccaatttaccaagtactcctacaagtataaggatcagccacagcaaactttcaatatatataaggccaataatatcgccgcaaacggagtctttcatgtggttacaggactgaggtggcaagcgcctagcggaacacctggggatccaaagcgcacaattggacagatccttgcttcgacggaggcgttcagcaggttcgagactattctggaaaattgcggcctcccatcaattctggatggtcctggcccattcacggtatttgctcctagtaatgaggccgtggactctttacgcgacggccgactgatttatctttttactgctggccttagtaagctgcaagagcttgtcaggtaccacatttacaatcacgggcaactgacagtagagaagctgattagtaaaggtcgcatcctcaccatggcaaaccaggtattggccgtgaacatttccgaggaaggacgtatcctcttagggccagaaggtgtcccactacagcgggttgatgtgatggctgccaacggcgtcatccatatgctggatgggatcctgcttccccccactattttacctatactccccaaacactgttccgaggagcaacacaagatcgttgccggctcttgcgtggactgccaggcgctgaacacctccacctgcccacccaactcagtcaagttggacattttcccaaaggagtgtgtgtatatccacgatcccacaggcctcaacgtcttaaagaaaggatgcgccagctactgcaatcagactattatggaacaaggctgttgcaaaggattttttggaccagactgcacacagtgcccagggggtttcagcaatccttgctacgggaaagggaactgctcggacggtatccaaggtaacggagcttgtctctgcttcccagattacaagggaattgcctgccacatctgctccaatcctaacaaacacggcgagcagtgtcaggaggattgcggttgtgttcatgggttgtgtgataaccggcccgggtctgggggggtgtgtcagcagggcacgtgcgctcccggctttagtgggaggttttgtaatgaatccatgggggactgtggtcctacaggcttagcacagcattgtcatctccacgccagatgtgtgtcacaggaaggtgtggccaggtgtcgctgtcttgacggtttcgaaggagacggcttttcgtgcacaccctccaatccgtgctctcaccccgaccgaggagggtgctctgagaatgctgagtgcgtcccggggtcacttgggacccatcactgtacctgtcacaaaggctggagtggagatggccgtgtgtgcgtggcaatagacgaatgcgagctagacatgagaggcggctgccatacggacgctttgtgttcatatgtgggccccggccagtcgcgctgtacgtgcaagttgggcttcgctggcgacggctatcagtgcagccctatagacccttgcagagccggcaatggcggttgccacggccttgctacatgccgcgcagtgggtgggggccagcgggtgtgtacttgcccccccgggtttggaggagatgggttttcttgttacggggatatctttagagagctggaggctaacgcccacttttccatcttctaccagtggttaaaaagtgcaggaattaccctgcccgcggataggcgcgtcaccgccctcgtcccaagcgaggcggccgtgagacagctgagtccagaggatcgggccttctggctccagccacgcacacttcctaacttggttcgggcgcatttcctccaaggcgcactgttcgaagaagagctggctaggctgggcggacaggaggttgcaacactgaaccctaccacacgctgggagatccggaatattagcgggcgggtgtgggttcagaatgcctctgtggatgtggcagacctgctggcaacaaacggcgttctccatatcttgtctcaggttctccttccacctagaggagatgtgccaggcggccagggactattacagcaactcgacttggttcctgctttcagcctgttccgcgagctgctgcaacaccatgggcttgtcccacagatcgaggccgccacagcctatacaatctttgtaccaaccaatcggtccctggaggcccaggggaactcgtcacacctggatgcagacactgtgagacatcacgttgtgctgggagaagctctaagtatggaaacccttcgaaagggcggccatcgcaactcactcttagggcctgcccattggattgtcttttataatcactcaggacagccggaggtcaaccatgtcccactcgagggccccatgctagaagctccaggaagaagtctcattggtctaagtggggtcttgactgtgggttcctcccgctgcctccactcacatgcagaagctctgagagagaagtgcgtgaattgtacacggcgttttcgttgtacacagggtttccaactgcaggacactccacggaaaagttgtgtgtatcggtctgggttttctttttcccgagggtgctcatatacatgcgccaagaagattcaggttcccgattgctgtcctgggtttttcggcacgctctgtgagccctgcccaggagggttgggcggggtgtgcagtggccacggacaatgtcaggataggtttctgggatccggcgagtgtcattgtcatgaaggattccacggcactgcatgcgaagtgtgtgagcttgggcggtatgggcctaactgtaccggcgtctgtgactgtgcacacggcttgtgccaagagggcttgcagggggacggttcctgcgtgtgtaacgttggatggcaaggattgaggtgtgaccagaagatcacctcaccccagtgcccgcgtaagtgcgatcccaatgctaactgtgtgcaagactcagccggagcctctacatgcgcctgtgctgctggctatagtggtaatgggattttctgtagtgaggtcgatccatgcgcccacggacacggggggtgcagtccccacgcgaactgcaccaaagttgcacccgggcagaggacctgcacctgtcaggatggctatatgggcgacggcgagctgtgccaggagatcaattcatgccttatccaccacggcggctgtcacatccatgccgagtgtattcctactggaccccagcaggtgagctgctcgtgccgtgagggctattcaggcgatgggatccggacatgcgagctgttagatccttgttctaaaaataacggcggatgctcgccatacgccacttgcaagtcgacgggcgatggacaacggacctgcacttgcgatacagcacacactgtcggcgatgggctgacctgtagagcgagggtgggattggaacttctgagagacaaacatgcaagcttcttcagcctgcggcttcttgaatacaaagagctgaaaggagatggacccttcacaatcttcgtcccacacgccgacctaatgtctaacctgtcacaagatgaactcgctcgtattagggcgcatcgacagctggttttccggtatcacgtggtggggtgcagacggttgcgctccgaggatctgctggagcaaggctacgccaccgcactcagcggacaccccttgcggttctccgagcgcgaaggcagcatatacctgaatgatttcgcacgggtcgtgagcagtgatcacgaggccgttaacggaattcttcattttattgatcgtgttctgcttcctcctgaggctctgcattgggagcctgacgatgcccccatccctcggcggaatgtaaccgctgccgcacagggatttggttacaaaatttttagcgggctgctgaaggttgcggggctgctaccacttcttcgggaagcttctcataggccatttacaatgctctggccgacagacgccgccttccgtgcactgccccctgacaggcaggcttggctatatcatgaggaccatagggacaagctggccgccattctacggggacacatgatcagaaatgttgaggcactggccagtgacttgcccaatctgggtcctttacggaccatgcatggcacgccgatatcattctcctgctcccggacgcgggcaggcgaattgatggtcggagaggatgatgcaaggatagttcagcggcatctcccgtttgaaggcggactggcctatggcatcgatcagctcctggaacctcccggcttgggggctcggtgcgatcactttgaaactcgacccctgcggctcaatacttgctcaatctgtggtctggaacctccctgcccggagggctctcaggaacaggggagcccagaagcctgttggaggttttatcccaagttttggacctcgccgccactccactccctgggtctgcggagcgtttgggtgcatccaagtctatgggggcggcctcaggggctgggtagaggctgccaccggaactgcgtgactacaacctggaagccgagttgttgcccaggacactacggcagcgaatgtcaggcctgtccaggcggcccctcttccccctgcagtgatcggggcgtctgcatggatggtatgtccggatcgggtcagtgcctgtgccgcagcggattcgcagggactgcctgcgagctctgcgcaccgggtgctttcggaccacattgccaggcttgtaggtgcacggtccacgggcgctgcgacgagggccttgggggttcagggtcatgcttctgcgatgagggatggacaggtcctagatgcgaggtacagttggaactgcagccagtgtgcactcccccttgcgcaccagaagcggtctgtcgggccggcaatagctgcgagtgcagcctggggtacgagggagacggtcgggtatgtaccgtggccgacttatgccaagacgggcacgggggctgcagcgagcatgctaactgcagccaggtgggcaccatggtcacctgtacatgcctccctgattacgagggtgacgggtggtcctgccgcgcccgcaacccttgcacagacggtcaccgcggagggtgttctgagcacgctaattgtctttctaccggcttgaacactcgtcggtgcgaatgccatgcgggatatgtgggagacgggctgcagtgtttagaagagagcgagcctccagtggaccggtgcttggggcagcctccaccgtgccatagcgacgcaatgtgtaccgatcttcactttcaagaaaaacgcgcaggagtcttccatctgcaggcgacctctggtccatatggccttaactttagcgaggctgaagcagcttgtgaggcccagggcgccgttctggcgtcattcccccaactatctgcagctcagcagctgggatttcacttgtgcctcatggggtggctggctaatggatcaacagcacacccagttgtatttcccgtggcggattgtggcaacggtagggtggggatagtgtccctgggcgctaggaagaacctgtcagaaaggtgggacgcttactgcttcagggtgcaggacgtggcctgccgctgtaggaatggctttgtaggggatggtatttctacgtgtaatgggaaactcctcgatgttcttgctgccaccgccaacttcagcaccttctacggcatgctgctcggatatgcgaacgctactcagagaggcctggatttcctcgacttcctcgatgacgagctcacttataagaccctcttcgtcccagtcaacgaggggttcgttgataacatgactttgtccggtccggacttggagcttcatgcctctaacgccacactgctgagcgccaatgcctcgcagggaaaacttctccccgcacattccgggctcagtcttatcatctccgacgctggacctgacaatagctcttgggcacccgtcgcccccggtaccgtcgtggtctccagaatcatcgtttgggatatcatggcatttaatggcatcatccacgcactagcatctccactcctggctccgccgcaaccccaagcagtattggctcctgaggcacctccagtggcagccggggtgggggccgttctcgccgccggtgcccttctcgggctagtggctggggcactgtatctgcgggctcgcggtaagcccatgggttttgggttctctgcattccaagccgaggatgatgcagacgatgactttagcccatggcaagaggggacgaatccgaccctggtctctgttccaaatcctgtcttcggcagtgacacgttctgcgagccttttgatgacagcttactcgaggaggatttccctgatactcagaggattctgactgtcaagtag

SEQ ID NO: 184641 - DNA, 7713 bp, Artificial Sequence
  derived and/or modified sequence
atggccggcccccggggcctgctgcccctgtgcctgctggccttctgcctggccggcttctcctttgtgcggggccaggtgctcttcaagggctgtgatgtgaagaccacctttgtgacccacgtgccctgcaccagctgtgccgccatcaagaagcagacctgccccagcggctggctgcgggagctgcctgaccagatcacccaggactgccgctatgaggtgcagctgggcggctccatggtgtccatgagcggctgcaggaggaagtgcaggaagcaggtggtgcagaaggcctgctgccccggctactggggcagccgctgccatgaatgtcctggaggagctgagaccccctgcaatggacatggcacctgcctggatggcatggacagaaatggcacctgtgtgtgccaggagaacttccggggcagcgcctgccaggagtgccaggaccccaaccgcttcggccctgactgccagagcgtgtgcagctgtgtgcacggcgtgtgcaaccacggccccagaggagatggcagctgcctgtgctttgctggctacacaggcccccactgtgaccaggagctgcctgtgtgccaggagctgcgctgcccccagaacacccagtgcagcgctgaggcccccagctgccgctgcctgcccggctacacccagcagggctctgaatgtcgggcccccaacccctgctggcccagcccctgcagcctgctggcccagtgcagcgtgagccccaagggccaggcccagtgccactgcccagagaactaccatggagatggcatggtgtgcctgcccaaggacccctgcacagacaacctgggcggctgccccagcaacagcaccctgtgtgtgtaccagaagccaggccaggccttctgcacctgccggcccggcctggtgtccatcaacagcaatgccagcgctggctgctttgccttctgcagccccttcagctgtgacagaagtgccacctgccaggtgacagcagatggcaagaccagctgtgtgtgccgggagagcgaggtgggagatggccgggcctgctacggccacctgctgcacgaggtgcagaaggccacccagacaggccgggtcttcctgcagctgcgggtggccgtggccatgatggaccagggctgccgggagatcctgaccacagctggccccttcaccgtgctggtgcccagcgtgagcagcttcagcagcaggaccatgaatgccagcctggcccagcagctgtgccggcagcacatcatcgccggccagcacatcctggaggacaccaggacccagcagacccggcgctggtggaccctggccggccaggagatcaccgtgaccttcaaccagttcaccaagtacagctacaagtacaaggaccagccccagcagaccttcaacatctacaaggccaacaacattgctgccaacggggtcttccacgtggtgacaggcctgcgctggcaggcccccagcggcacccctggggaccccaagaggaccatcggccagatcctggccagcacagaggccttcagcagatttgagaccatcctggagaactgtggcctgcccagcatcctggatggccctggccccttcaccgtgtttgcccccagcaatgaggccgtggacagcctgagagatggccgcctcatctacctgttcaccgctggcctgagcaagctgcaggagctggtgcgctaccacatctacaaccacggccagctgactgtggagaagctgatcagcaagggccgcatcctgaccatggccaaccaggtgctggccgtgaacatcagcgaggagggccgcatcctgctgggccctgagggcgtgcccctgcagagggtggatgtgatggccgccaatggagtcatccacatgctggatggcatcctgctgccccccaccatcctgcccatcctgcccaagcactgcagcgaggagcagcacaagatcgtggccggcagctgtgtggactgccaggccctgaacaccagcacctgcccccccaacagcgtgaagctggacatcttccccaaggaatgtgtgtacatccatgaccccaccggcctgaatgtgctgaagaagggctgtgccagctactgcaaccagaccatcatggagcagggctgctgcaagggcttctttggaccagactgcacccagtgccctgggggcttcagcaacccctgctatggaaaaggaaactgcagtgatggcatccagggcaatggagcctgcctgtgcttcccagactacaagggcatcgcctgccacatctgcagcaaccccaacaagcacggggagcagtgccaggaggactgtggctgtgtgcacggcctgtgtgacaacagacctggcagcggaggagtgtgccagcagggcacctgtgcccctggcttcagcggccgcttctgcaatgaatccatgggagactgtggccccaccggcctggcccagcactgccacctgcacgcccgctgtgtgtcccaggagggcgtggcccgctgccgctgcctggatggctttgaaggagatggcttcagctgcacccccagcaacccctgcagccacccagacagaggaggctgcagtgaaaatgcagaatgtgtgcccggcagcctgggcacccaccactgcacctgccacaagggctggagcggagatggccgggtgtgtgtggccattgatgaatgtgagctggacatgaggggcggctgccacacagatgccctgtgcagctatgtgggccctggccagagccgctgcacctgcaagctgggctttgctggagatggctaccagtgcagccccatcgacccctgcagagctggaaatggaggctgccacggcctggccacctgcagagctgtgggcggcggccagagggtgtgcacctgccccccaggctttggaggagatggcttcagctgctacggggacatcttccgggagctggaggccaatgcccacttcagcatcttctaccagtggctgaagtctgctggcatcaccctgcctgctgacagaagagtgacagccctggtgcccagcgaggccgctgtgcggcagctgagcccagaagatcgggccttctggctgcagcccaggaccctgcccaacctggtgcgggcccacttcctgcagggcgccctgtttgaggaggagctggcccggctgggcggccaggaggtggccaccctgaaccccaccacccgctgggagatccggaacatcagcggccgggtgtgggtgcagaatgcctctgtggatgtggccgacctgctggccaccaacggggtgctgcacatcctgagccaggtgctgctgcccccaagaggagatgtgcctgggggccagggcctgctgcagcagctggacctggtgcctgccttcagcctcttccgggagctgctgcagcaccacggcctggtgccccagattgaagctgccacagcctacaccatctttgtgcccaccaacagaagcctggaggcccagggcaacagcagccacctggatgctgacacagtgcgccaccacgtggtgctgggggaggccctgtccatggagaccctgaggaagggcggccacaggaacagcctgctgggccctgcccactggatcgtgttctacaaccacagcggccagcctgaggtgaaccacgtgcccctggagggccccatgctggaggcccctggccgcagcctgattggcctgagcggcgtgctgactgtgggcagcagccgctgcctgcacagccatgctgaggccctgcgggagaagtgtgtgaactgcacccggcgcttccgctgcacccagggcttccagctgcaggacacccccaggaagagctgtgtgtacagaagtggcttctccttcagccggggctgcagctacacctgtgccaagaagatccaggtgcctgactgctgccccggcttcttcggcaccctgtgtgagccctgccctgggggcctgggcggcgtgtgcagcggccacggccagtgccaggaccgcttcctgggcagcggggagtgccactgccacgagggcttccatggaacagcctgtgaggtgtgtgagctgggccgctatggccccaactgcaccggggtgtgtgactgtgcccacggcctgtgccaggagggcctgcagggagatggcagctgtgtgtgcaatgtgggctggcagggcctgcgctgtgaccagaagatcaccagcccccagtgccccaggaaatgtgaccccaatgccaactgtgtgcaggacagcgctggggccagcacctgtgcctgtgccgccggctacagcggaaatggcatcttctgcagcgaggtggacccctgtgcccacggccatggaggctgcagcccccacgccaactgcaccaaggtggcccctggccagaggacctgcacctgccaggacggctacatgggagatggagagctgtgccaggagatcaacagctgcctgatccaccacggcggctgccacatccacgccgagtgcatccccaccggcccccagcaggtgtcctgcagctgccgggagggctacagcggagatggcatccgcacctgtgagctgctggacccctgcagcaagaacaacggcggctgcagcccctatgccacctgcaagagcactggagatggccagaggacctgcacctgtgacacagcccacacagtgggagatggcctgacctgccgggcccgggtgggcctggagctgctgcgggacaagcacgccagcttcttcagcctgcggctgctggagtacaaggagctgaagggagatggccccttcaccatctttgtgccccatgctgacctgatgagcaacctgagccaggatgagctggcccgcatccgggcccaccggcagctggtgttccgctaccacgtggtgggctgccggcggctgcggtctgaggacctgctggagcagggctacgccacagccctgagcggccaccccctgcgcttcagcgagcgggagggcagcatctacctgaatgactttgcccgggtggtgtccagtgaccacgaggccgtgaatggcatcctgcacttcatcgacagagtgctgctgcccccagaggccctgcactgggagccagatgatgcccccatccccaggagaaatgtgacagctgctgcccagggcttcggctacaagatcttcagcggcctgctgaaggtggccggcctgctgcccctgctgcgggaggccagccaccggcccttcaccatgctgtggcccacagatgctgccttccgggccctgcccccagaccggcaggcctggctgtaccacgaggaccaccgggacaagctggccgccatcctgcggggccacatgatcagaaatgtggaggccctggccagtgacctgcccaacctgggccccctgcggaccatgcacggcacccccatctccttcagctgcagcaggaccagggctggggagctgatggtgggggaggatgatgccagaattgtgcagaggcacctgccctttgagggcggcctggcctacggcatcgaccagctgctggagcccccaggcctgggcgcccgctgtgaccactttgagacccggcccctgcggctgaacacctgcagcatctgtggcctggagcccccctgcccagagggcagccaggagcagggcagccctgaggcctgctggaggttctaccccaagttctggaccagcccccccctgcacagcctgggcctgcggtctgtgtgggtgcaccccagcctgtggggccggccccagggcctgggccggggctgccacaggaactgtgtgaccaccacctggaagcccagctgctgccccggccactacggcagcgagtgccaggcctgccctgggggccccagcagcccctgcagcgacagaggagtgtgcatggatggcatgagcggcagcggccagtgcctgtgccgcagcggctttgctggaacagcctgtgagctgtgtgcccctggggccttcggcccccactgccaggcctgccgctgcaccgtgcacggccgctgtgatgagggcctgggcggcagcggcagctgcttctgtgatgagggctggacaggcccccgctgtgaggtgcagctggagctgcagcctgtgtgcaccccaccctgtgcccctgaggccgtgtgccgggccggcaacagctgtgaatgttccctgggctatgaaggagatggccgggtgtgcaccgtggccgacctgtgccaggacggccatggaggctgcagcgagcacgccaactgcagccaggtgggcaccatggtgacctgcacctgcctgcctgactatgaaggagatggctggagctgccgggccaggaacccctgcacagatggccaccggggcggctgcagcgagcacgccaactgcctgagcacaggcctgaacacccggcgctgtgaatgtcatgctggctacgtgggagatggcctgcagtgcctggaggagagcgagccccctgtggaccgctgcctgggccagcccccaccctgccacagtgatgccatgtgcacagacctgcacttccaggagaagagagctggggtcttccacctgcaggccaccagcggcccctacggcctgaacttcagcgaggccgaggccgcctgtgaggcccagggcgctgtgctggccagcttcccccagctgtctgctgcccagcagctgggcttccacctgtgcctgatgggctggctggccaacggcagcacagcccaccctgtggtgtttcctgtggccgactgtggaaatggccgggtgggcatcgtgtccctgggcgccaggaagaacctgtctgagcgctgggatgcctactgcttccgggtgcaggatgtggcctgccgctgcagaaatggatttgtgggagatggcatcagcacctgcaatggcaagctgctggatgtgctggccgccacagccaacttcagcaccttctacggcatgctgctgggctacgccaatgccacccagaggggcctggacttcctggacttcctggatgatgagctgacctacaagaccctgtttgtgcctgtgaatgaaggatttgtggacaacatgaccctgagcggccctgacctggagctgcacgccagcaatgccaccctgctgagcgccaatgccagccagggcaagctgctgcctgcccacagcggcctgagcctcatcatcagtgatgctggccctgacaacagctcctgggcccctgtggcccctggcaccgtggtggtgagccgcatcatcgtgtgggacatcatggccttcaacggcatcatccacgccctggccagccccctgctggccccaccccagccccaggccgtgctggcccctgaggcccctcctgtggccgccggcgtgggcgctgtgctggccgccggggccctgctgggcctggtggccggggccctgtacctgcgggcccggggcaagcccatgggcttcggcttcagcgccttccaggccgaggatgatgctgatgatgacttcagcccctggcaggagggcaccaaccccaccctggtgtctgtgcccaaccctgtgtttggaagtgacaccttctgtgagccctttgatgacagcctgctggaggaggacttcccagacacccagaggatcctgactgtgaagtag

SEQ ID NO: 184642 - DNA, 7713 bp, Artificial Sequence
  derived and/or modified sequence
atggccggcccccggggcctgctgcccctgtgcctgctggccttctgtttagctggcttcagtttcgtgagaggacaagtgctgtttaaggggtgtgacgtgaaaaccacattcgtcacccacgtaccatgtaccagctgcgccgccatcaagaaacagacatgtccatccgggtggctgcgagaacttccagaccagattacccaagactgccgatacgaagtacagctgggaggttcaatggtatccatgtccggctgtcgccggaagtgcaggaagcaagtagtccaaaaggcgtgttgtccaggatactggggatcacgctgccacgagtgcccaggaggagctgagaccccatgtaacggacatggcacctgccttgatggcatggatcgaaatggaacctgcgtctgccaggaaaacttccggggcagtgcatgccaagaatgccaggacccaaaccggtttgggcctgactgtcaatctgtgtgctcctgcgtccacggcgtgtgcaaccacggtccaaggggggatggatcctgtttgtgtttcgccggatacacgggaccacattgcgatcaggagctgcctgtgtgtcaggagctccgctgtccgcagaatacccagtgctcggccgaggccccatcctgcaggtgtctgcctgggtacactcagcagggaagcgaatgtcgggcccccaacccgtgttggccgtcaccatgtagtttgcttgcccagtgctccgtttcccccaagggacaggcgcagtgccactgccctgagaattaccatggcgatgggatggtgtgccttcctaaggatccatgtacggacaacctcggcggatgcccttctaattcaactctctgcgtatatcagaagccggggcaggcgttttgcacctgcagacccggtctggtgtccataaactcaaatgcatccgcagggtgttttgctttctgtagccctttttcatgcgaccgctccgccacatgccaggttaccgccgatggtaaaacctcgtgcgtctgccgggagagcgaagttggcgacggaagggcctgctatggccatctcttacacgaggtgcaaaaagctacgcagacgggcagggtgttcctgcagctgcgggttgccgtcgccatgatggatcaaggttgccgggaaatacttacaacggctgggccctttactgtgctggtgccatcagtgtcttcgtttagtagtcgaacaatgaacgcctcattagctcagcaattgtgtagacagcacatcatcgccggacagcacatattagaggatacacggacccagcagacacgacgctggtggacacttgctggacaggaaataaccgtgacattcaatcagttcactaagtattcatataagtataaagatcagccgcagcagactttcaacatctacaaggctaacaacatcgcagcgaacggggtcttccatgtggtcacgggactccggtggcaggcaccctcaggaaccccgggagaccctaaaaggaccatcggtcagattctcgctagcacagaagctttctcccgttttgagaccattctggaaaattgtggtctgccttctatccttgacgggccagggcccttcaccgtgtttgccccatcaaatgaggccgtggatagcctgagggacggacggctgatatacctctttacggctggcctcagcaagttacaagaactggtgaggtaccacatatataaccatggccaattgacagtcgagaagctaatcagcaagggcaggatcctcaccatggcaaaccaagtgctcgctgtgaatatcagtgaggagggcaggattctcttgggccctgaaggcgtacctctgcaacgagtggatgtgatggccgctaacggcgtcatacatatgctggatggaatcctgctgccacctaccatcttacccattttacctaaacactgctcagaggagcagcacaagatagtcgcagggtcctgcgtggattgtcaggcattgaatacaagcacatgtccacctaatagcgtcaagttagatatattcccaaaggaatgcgtctatatccacgatcccaccggcctcaatgtgctgaagaagggctgcgccagctattgtaaccagacaatcatggagcaaggttgttgtaagggctttttcggaccagattgcacacagtgccctggggggttcagcaatccctgctatggaaagggaaactgttccgacggcatccagggcaacggagcctgtctgtgcttcccggactataaggggatcgcctgccatatctgttccaacccaaacaaacatggagaacagtgccaggaagactgtggttgtgtgcacggcctctgcgataaccgcccagggtccggaggggtctgccagcaaggcacctgcgctcccgggtttagcggccgattttgcaacgagagcatgggcgattgcgggcctaccggcctggctcagcattgtcatctgcacgctaggtgtgtgtcccaggaaggcgtggctcgatgccgctgtttggatgggtttgaaggggacgggttctcatgcacgccctcaaatccatgctcccatccagatcgcggaggttgttccgaaaacgccgagtgtgtgcctggcagtctcggcacacaccactgtacatgccataaggggtggtccggggatgggagagtgtgtgtggccatagacgaatgtgagctggacatgaggggaggctgtcacaccgatgctctctgctcttatgtcggccccgggcagtcccggtgcacttgcaagctcggatttgccggtgatggttatcaatgtagccccattgatccatgcagggctggcaacggtggctgtcacggtctcgccacttgccgagccgtcgggggaggacagcgggtgtgtacatgtcctcctggctttggcggtgacggatttagctgctatggtgatatttttcgcgaactggaggctaatgctcatttttccatcttctatcagtggctcaagagcgctgggattactctgcccgccgataggcgggtgacagcactcgtcccaagcgaagcagctgtacgccagctgagtcctgaagatcgagctttttggctgcagccccgaacacttcccaatttagttagggctcatttcctacagggcgcgctgttcgaagaagaactggcccggctgggtggccaggaggtggcaacactcaacccaaccacccgatgggaaatcaggaacatttctggtcgcgtgtgggtacagaatgctagtgtagatgtggctgacctgctcgctaccaacggagtactgcacatactttcccaggtcctgctccctccccgaggtgacgtgccaggcggccaagggctcctgcagcagttggaccttgttccagccttttctttgtttagggaattactgcaacaccacggactggtaccccagattgaggccgccaccgcgtataccattttcgtcccgaccaacagatccctggaggcccagggcaattcatcccatctcgatgcagacactgtgagacaccacgttgtcctgggggaagcactgtcaatggaaacgctgcggaagggcggccaccgcaatagcttacttgggcccgcacactggatcgtgttttacaaccatagcggccagccagaagtgaaccatgtcccccttgaggggcccatgttagaagccccaggtcggagtttaattggcctgtccggagtcctaaccgttgggagctcaagatgtttgcattcccatgccgaggctctgcgggagaagtgcgttaactgcactaggaggtttcgctgcacccagggtttccagttgcaggacactcctagaaaaagctgcgtgtaccgcagcgggttctcattctcccgcggatgcagttacacttgtgcgaagaagatccaagtgccggattgctgccccggcttcttcgggactctgtgtgagccatgccccggcgggctgggtggcgtctgtagcggccacggacagtgccaggaccgttttctcgggagtggagagtgtcactgtcacgagggatttcacggaaccgcctgcgaagtctgtgagcttggcaggtacgggccgaactgcactggagtatgcgactgcgcccatgggctgtgccaggagggcttgcagggggatgggtcttgtgtgtgcaacgtcgggtggcagggcttgaggtgtgaccagaaaattacgagcccacagtgtcctagaaagtgcgaccctaacgcaaactgcgtccaggactcggctggggcatcaacttgtgcatgcgctgctggctacagcggcaacggaatcttctgcagcgaagtggacccatgtgcacacggacatgggggatgctccccccacgcaaactgcacaaaagtggcacccgggcagagaacttgcacctgtcaggacggctacatgggggacggcgaactctgccaggaaattaactcctgtttgatccatcatggcggctgccacattcacgcagaatgtatcccgactggaccgcagcaggtcagctgttcctgtagagaaggttatagcggcgatggcatcagaacttgcgaactgctcgacccgtgctcaaaaaataatggcggctgttctccctacgcaacatgcaagagcaccggagacggccagcgcacctgcacatgcgatactgctcacactgttggcgatggtttgacctgccgggccagggtcggtctagaacttctgcgggacaaacacgcatcgtttttttcgctgaggctgctggagtataaggaactgaagggagacggtccattcaccatattcgtgcctcacgcagatctgatgtccaacttatctcaagatgaactagctcggattagggctcaccgccaacttgttttccggtatcacgtggttgggtgccggaggctccgcagcgaggacctcttggaacaagggtatgctacagcgttatctggacatccacttcgatttagcgaaagagagggcagcatttacctgaatgactttgcaagagtggtttcctctgaccacgaggccgtgaatggaatcctgcatttcatcgatcgtgttttgctacccccagaagcccttcactgggaacctgatgatgctcctatccccagaaggaatgtgaccgcagctgcccagggcttcgggtacaaaatcttctcaggcctgttaaaagtcgctggactacttcccttgctgagagaggcctctcacaggccctttaccatgctgtggcctactgacgctgccttccgcgctttgccccccgatagacaagcctggctgtatcacgaggaccacagggataaactggctgcgattctcagaggacacatgatccggaacgtggaggctctggcttcagacctgccaaacttggggccccttcgcacgatgcacggaacacctatctcatttagctgttcccgtactagagcaggcgagctgatggtgggcgaagacgatgccagaatcgttcagagacatctcccatttgagggaggtctggcttacggcattgatcagctgctcgagccgcctggccttggggcgcgatgcgaccattttgaaactaggcccctgcggctgaacacatgcagtatctgcggcttggaacccccctgccccgagggatcgcaggagcaggggtctcccgaggcttgctggcgcttctacccgaaattctggacttccccacctctgcattcgctcggattgcgttctgtgtgggttcacccttcactatgggggcgtccccaggggctgggcagaggttgtcaccgcaactgcgtgaccacgacttggaaaccgagctgctgtccaggccactatgggtcagaatgccaagcctgccccggcgggcccagcagtccttgctcagaccggggggtgtgcatggacggtatgtccggaagcggccagtgcctgtgccgctctggctttgccggaacggcctgcgaactttgcgcccctggtgccttcggccctcattgtcaagcctgcaggtgtaccgtgcacggccgctgtgatgaaggactgggaggttccggctcctgtttttgtgatgagggttggacaggacctagatgcgaggtgcaactggagctccagccagtgtgtaccccaccatgcgccccagaggctgtgtgccgggcagggaactcatgcgagtgctcactggggtatgagggcgatggacgggtgtgcaccgtggcggatctctgccaggatggtcacgggggatgctccgaacatgctaactgcagtcaggtcggcacgatggtgacttgtacttgtctgcctgactacgagggagacggttggtcttgtcgggcaagaaatccgtgcacagatggccaccgcgggggttgtagcgagcacgccaactgtttatcaacaggcctcaacacgcgacgttgcgaatgccacgcgggctacgtcggcgacgggttgcagtgtctcgaagagtccgagccacccgtggatcgatgtttaggccagccacccccatgccactctgatgctatgtgcacagacctccattttcaagagaagcgtgcaggagtgttccacctccaggctacttccggaccctacggcctgaacttcagcgaggcagaagccgcctgtgaggcacagggcgccgtgctggcgtcatttccacagctgtccgctgctcaacaactgggatttcacttgtgcctcatgggctggctggccaacggttctacggcacaccccgtggtgttcccagtagcagattgcggaaacggccgggtgggcatcgtgtcattgggagcccggaaaaacttgagcgagcggtgggatgcgtattgcttccgggttcaagacgtggcctgtagatgccgaaacggctttgttggcgacggaatctctacatgtaacgggaagctgctggacgtcctcgccgccacagctaactttagtaccttctacggaatgctattaggctatgcaaatgccactcagcggggactggattttcttgattttctggatgacgagctgacctataagacactctttgtgccagttaacgagggattcgttgataatatgaccctgtccgggccggacctcgagctccacgcgtcaaatgccacccttctgtccgccaatgcctctcagggcaagctgctgcctgcacactccggtctgagcttaatcatctcagacgcagggcctgataattcctcttgggctcctgtggccccagggactgtggtcgtgtcccgtattatcgtctgggacatcatggcttttaatgggattatccacgcacttgcctccccactgttggcacctccacagccacaagccgtccttgcaccagaagccccgcctgtcgctgccggcgttggcgcagtgctggcagctggagctcttctcggcttggttgctggtgcactgtacctaagagcgcgcgggaagcctatgggctttgggttttcagcatttcaggccgaagatgatgcggatgatgacttctcgccatggcaggaaggaaccaaccccaccttggtctctgttccgaaccccgttttcgggagtgacacattctgcgagccctttgacgacagtcttttggaagaggactttcccgacacacagcggattcttaccgtgaagtag

SEQ ID NO: 184643 - DNA, 7712 bp, Artificial Sequence
  derived and/or modified sequence
atggccggaccacggggactcctgcctttatgtcttttggctttttgtttagctggcttcagctttgtccgtggccaggttctgttcaaaggctgcgacgtcaaaacaacttttgtcacccacgtaccttgtaccagctgtgccgcaattaagaaacagacgtgcccttccggatggctacgggagttgccggatcagatcacccaggattgccggtacgaggtacaactggggggatcaatggtttccatgagcgggtgtaggagaaaatgccggaaacaagtcgtccagaaggcgtgctgtcccggatactggggatccaggtgccacgagtgcccagggggagccgaaactccgtgtaacggccatggaacctgcctcgatggcatggatcgcaacggtacctgtgtctgccaggaaaactttagaggcagtgcctgccaggagtgtcaagaccctaatcggttcggcccagactgccagagcgtttgttcgtgcgtgcatggggtgtgtaaccatggcccacggggagacggcagttgtctgtgcttcgcgggatataccggccctcactgtgatcaggaactgcctgtgtgtcaagagctacggtgtccccagaatactcagtgctctgctgaagctccctcctgccggtgtctgccaggatatacacaacagggttctgagtgtcgggcacctaacccatgctggcccagcccttgtagcttgctggcacagtgcagcgtgtccccaaaggggcaagcacagtgccactgcccagagaattaccacggcgacgggatggtttgcttgcccaaggatccatgcaccgataacctgggaggctgtccatccaacagcactctctgtgtctatcaaaaaccgggacaggctttttgtacttgcaggcctggattagtgtccataaacagcaacgccagcgcaggctgcttcgctttctgcagtccatttagttgcgatcgatccgcaacctgtcaggtcacagccgatggaaagacctcttgcgtttgcagggagagcgaggttggggacggcagagcttgttatgggcacctcctgcatgaggtgcagaaggcaactcagacaggtagggtgttccttcagctaagagttgccgtggctatgatggaccaggggtgtcgggagattttgacgactgctggaccatttacagtgctagtgccctctgtgtcatccttctcatcccgcacaatgaacgcaagtctagcgcagcaactttgcaggcagcacattatcgcaggtcagcacatcctagaagacacgagaacgcagcagactagaaggtggtggaccttggctggccaggaaattactgtgaccttcaaccagttcaccaagtactcgtacaaatataaggatcaacctcagcagacatttaatatttacaaagctaacaatattgccgctaacggcgtcttccacgtagtgacggggctgaggtggcaagctccttctggcactcccggtgacccgaaaagaacaatcggccaaatcttagcatctacagaggccttttcccggttcgagacaattttagagaattgcggcctaccctccattttggatgggccaggccctttcacagtcttcgctcctagtaacgaggcagtcgattctcttagggacgggagactcatttacctattcaccgcgggactgagtaagcttcaggagctggttcgctaccacatttacaatcacggacagttaactgtggagaagctcatcagcaaaggcagaatccttacaatggccaaccaggtgcttgctgtcaatatttccgaggagggcagaattctgctcgggccagagggcgtgcctctgcagcgtgtcgatgtgatggctgcaaacggcgtcatccacatgctggacggcattttgttaccccctactattttgcctatactgccaaagcattgttcagaggagcaacataaaattgttgccggttcctgcgtggactgccaagctctgaatacgagtacttgcccgcctaactcagttaagctcgacatcttcccaaaggagtgtgtgtacatacacgaccctacagggctcaatgtgctgaaaaagggatgtgccagttactgcaaccagaccatcatggagcagggctgctgcaagggattcttcgggccagactgcacccagtgcccaggcggattttccaatccctgttacggtaagggcaactgttcagatgggattcagggaaatggagcctgcctgtgtttcccagattacaagggaattgcttgtcacatatgttcgaacccgaacaaacacggggagcagtgccaggaggattgtggctgtgtgcacggcctgtgcgacaatcggcctggatctggaggggtctgtcagcagggaacctgcgctccagggttctccgggaggttctgcaacgagagtatgggcgactgcggaccaacaggtctagcgcagcactgccaccttcatgccaggtgtgtttcacaggagggagttgctcgctgtcggtgcctcgacggcttcgagggagacggattctcatgtacaccttcaaatccatgttcacaccccgaccgcggaggctgcagtgaaaacgctgagtgcgtccccggatctttggggactcatcactgcacctgccataagggctggtccggggacggaagggtgtgtgtggcaatcgatgaatgtgagctcgatatgcgaggtggctgtcatactgacgctctctgcagctacgtcggacctggtcagtcccggtgcacttgcaagctgggattcgctggcgacgggtatcagtgcagcccgattgatccatgtagggccggtaatggcggatgtcatggcctcgcaacgtgtagagctgtcgggggaggacaaagggtatgtacctgtcccccaggcttcgggggtgatgggttttcttgctatggtgatattttcagggagcttgaggccaacgcgcatttttccatcttctaccaatggcttaagtctgccggtatcaccttacctgccgataggagagtgaccgcactagtgccatctgaggccgctgtaagacagctgtctccagaggaccgcgctttttggttacagccccgaacattgcccaatctagtgcgggctcattttttacagggcgctctctttgaggaggaactggcgagactcggcggtcaagaggtggccacgcttaaccctacaactcggtgggaaatacgtaatatctccggtcgggtgtgggtgcaaaacgcttctgtggacgttgcagacttactggcaacaaatggtgtgttacacattctctcacaggtgttgctaccgcctagaggcgatgtaccagggggtcaggggctgctgcaacagctcgatttggtgcctgcttttagcctgtttagggagctgctccagcatcacggtctcgtcccacagatagaggctgccaccgcttacaccatcttcgtgcctactaatcgcagtttggaagcccaaggcaattcgtcacaccttgacgccgacaccgtccgacaccacgtggtcctaggggaagccctgagtatggagacactcaggaagggcggtcaccggaacagcttgctcggcccagcacattggatcgtattctataaccatagtgggcaaccagaagtcaaccatgtgccattggaaggcccaatgttggaagcacctggcagaagtctcatcggcttgagcggcgttctgactgtaggctcgtctcggtgccttcattcacacgcagaggcgctgagggaaaagtgtgtgaactgcacaagaagatttagatgcacacaaggattccagctgcaagacacacctcggaaaagctgtgtctaccggagcggattcagcttttcaaggggctgcagctacacatgtgctaaaaagatccaagttccagattgttgcccgggtttcttcggcaccttgtgtgaaccttgtcccggtggcctgggcggagtctgctccggccacggacaatgtcaagatcgctttctgggctctggagaatgtcattgtcatgagggttttcacggcaccgcctgtgaggtctgtgaactgggacgatatggacctaattgcacgggtgtgtgtgactgtgcacatgggctctgccaggaggggctccagggggacgggtcatgcgtctgtaatgtcggatggcaggggctgcgctgcgatcagaagataacttcaccacagtgccccaggaagtgtgacccgaacgcaaactgtgtgcaagacagcgcaggtgcgagtacctgcgcatgcgctgctggctattcaggaaacggcatcttctgctctgaagtggacccttgtgcacatggtcacggtgggtgctctccccatgcgaattgcacgaaggtggctcccggacagagaacgtgtacctgtcaagatggctatatgggtgatggcgagctctgccaggagatcaacagctgtctaattcatcatggtggttgccacatccatgctgagtgcatccccacaggcccacagcaggtgagctgcagttgcagagaggggtatagcggcgatggcatccggacttgtgagctgctggatccttgcagtaagaataatgggggatgtagcccctatgcaacctgcaaaagtacaggagacggccagagaacctgcacgtgtgatacagcacacactgtaggcgatggcctgacatgcagagcacgagtcggcctagaattactccgtgataagcatgcctcctttttctcccttcgacttttggaatacaaagaactcaagggagatggtccatttaccattttcgtcccccacgcagacctcatgagtaatctcagtcaggatgagctcgctaggatacgcgcacatcgccagctggtatttcgataccacgtggtcggatgtcggcgtctaagatccgaggatctgttggagcagggctacgcaacggccctttccggccacccattacgtttctccgaaagagagggcagtatttacttaaatgatttcgcccgtgtcgtttcttcagatcacgaggcagtgaacggaatattacacttcatagatcgcgtcctgctgcctcccgaggcactccattgggaacccgatgatgcccctatccccaggaggaatgttacagccgcagcccaggggtttggttacaaaatctttagtggtctcttaaaggtcgccggactgctgccactcctgcgcgaggcgagccatcggccttttaccatgctttggccaacagacgccgcattccgtgccttgcctcctgaccgccaggcctggttataccatgaggatcaccgcgataagttggctgccattcttcgtggacatatgatccgaaatgtggaggcactcgcgagcgatcttccgaatctggggccactcagaacgatgcacggtaccccaatcagctttagttgcagtaggaccagggcaggggaactgatggtaggagaggacgacgcccgaatagttcagaggcatctgccctttgaagggggtctcgcatatggaattgaccaactgttggagcctccaggacttggagccagatgtgatcatttcgagacccgtcctcttaggttgaacacatgttccatctgtggactcgagccaccttgtcctgaggggagccaggaacaggggtccccagaggcttgctggaggttctatccaaagttctggaccagtccaccactgcactcactcggacttcggtctgtgtgggtgcatcctagcctgtggggtagacctcaggggcttggacgaggatgtcaccgcaattgtgtaacgactacttggaagccatcctgttgcccgggtcactacggaagcgagtgccaagcctgtcctgggggtccttctagcccctgttctgatcgtggcgtgtgtatggatgggatgagtgggtctggtcagtgtctttgtcgctccgggttcgccggaacggcctgcgaactatgtgctcctggagccttcgggcctcattgccaagcatgtcgctgtaccgtccacggccgatgcgacgaaggactgggtggcagtgggtcctgtttttgtgatgagggctggactgggccaagatgtgaggtacagctcgagctgcagcctgtttgcaccccgccatgcgcacccgaggctgtgtgcagagccggaaacagttgtgaatgttcactggggtacgaaggcgatgggcgagtctgtacagtagccgacctctgtcaggatgggcacggcggttgttccgagcacgccaattgttcacaggtggggaccatggttacctgcacttgtttgccagactacgaaggcgatggctggtcgtgccgcgctcgcaatccatgtacagatggccacaggggtggatgcagtgagcacgccaattgtctcagcaccggactgaatactcgcagatgcgagtgtcacgccggttacgtgggcgacggtctgcagtgcctggaagagtccgagcctcccgtcgaccggtgcttgggtcagccccctccctgtcatagcgacgctatgtgtactgaccttcactttcaggagaaacgcgctggagtgttccatctgcaggcgacttccggtccttatgggttgaatttttctgaagcagaagccgcttgtgaggctcagggggcagtgcttgcctccttcccccagctgtccgccgcacagcagctcggctttcatctgtgtctcatgggctggttggctaacggttccacagcgcatccagtcgtcttccctgttgccgattgtgggaatggccgtgtcggaatcgtcagcttaggggcaaggaaaaacctttctgagagatgggacgcgtattgtttccgggtgcaagacgtagcatgtagatgtcggaatggcttcgtgggagatggaattagcacctgcaatggcaagcttctggacgtgctggctgccacagctaatttctccactttctatggaatgctcctaggttatgcgaatgcgacccagcgtggtctcgatttcctggacttcctggatgatgaactgacatataaaaccctgttcgttccggtgaatgaagggttcgtagataatatgacattgtccgggcctgacctagagctgcacgcttccaacgccaccctcttgagtgctaatgctagtcagggaaaactgctcccggcacatagcggcctgagtttgatcatttccgacgccggacctgataacagcagctgggctccggttgcaccagggacagtagttgtgtcccgtatcatcgtttgggatatcatggcgtttaatgggatcatacatgcacttgcgagcccactcctagctcccccacagccgcaggcagtgcttgctcctgaggccccacccgtagccgcaggcgtcggcgcagtcctggcagccggagctctcttgggactggtggccggagccctttatctgcgagccagaggcaagcctatgggattcggattctctgcttttcaggctgaagatgatgccgatgacgacttcagcccctggcaagaggggaccaatcctactctggtgtccgtcccaaatccagtgtttggctccgacacgttttgtgaacctttcgatgattcgctcctggaggaagattttccagatacccagcgcattctaactgtcaaata

SEQ ID NO: 184644 - DNA, 7928 bp, Artificial Sequence
  derived and/or modified sequence
ctgcctgtgctgtgcctgcctcctagagctcattccctacgccccgactctgtcctggacagcgtgcccaccagccatggcggggccccggggcctcctcccactctgcctcctggccttctgcctggcaggcttcagcttcgtcagggggcaggtgctgttcaaaggctgtgatgtgaaaaccacgtttgtcactcatgtaccctgcacctcgtgcgcggccatcaagaagcagacgtgtccctcaggctggctgcgggagctcccggatcagataacccaggactgccgctacgaagtacagctggggggctctatggtgtccatgagcggctgcagacggaagtgccggaagcaagtggtgcagaaggcctgctgccctggctactggggttcccggtgccatgaatgccctgggggcgctgagaccccatgcaatggccacgggacctgcttggatggcatggacaggaatgggacctgtgtgtgccaggaaaacttccgcggctcagcctgccaggagtgccaagaccccaaccggttcgggcctgactgccaatcggtgtgcagctgtgtgcacggagtgtgcaaccatgggccacgtggggatggaagctgcctgtgctttgctggatacactggcccccactgtgatcaagagctgcccgtctgccaggagctgcgctgtccccagaacacccagtgctccgcagaggctcccagctgcaggtgcctgcccggctacacacagcagggcagtgaatgccgagcccccaacccctgctggccatcaccctgctcactgctggcccagtgctcggtgagccccaaggggcaggctcagtgtcactgccctgagaactaccatggcgatgggatggtgtgtctgcccaaggacccatgcactgacaaccttggtggctgccccagcaactctactttgtgtgtgtaccagaagccgggccaggccttctgcacctgccggccaggcctggtcagcatcaacagcaacgcttctgcgggctgcttcgccttctgctcccccttctcctgcgaccggtctgccacttgccaggtgaccgctgatgggaagaccagctgtgtgtgcagggaaagcgaggtgggggatgggcgtgcctgctacggacacctgctccacgaggtgcagaaggccacgcagacaggccgggtgttcctgcagctgagggtcgccgtggccatgatggaccagggctgccgggaaatccttaccacagcgggccctttcaccgtgctggtgccatccgtctcctccttctcctccaggaccatgaatgcatcccttgcccagcagctctgtagacagcacatcatcgcagggcagcacatcctggaggacacaaggacccaacaaacacgaaggtggtggacgctggccgggcaggagatcaccgtcacctttaaccaattcacgaaatactcctacaagtacaaagaccagccccagcagacgttcaacatctacaaggccaacaacatagcagctaatggcgtcttccacgtggtcactggcctgcggtggcaggccccctctgggacccctggggatcccaagagaactatcggacagatcctcgcctctaccgaggccttcagccgctttgaaaccatcctggagaactgtgggctgccctccatcctggacggacctgggcccttcacagtctttgccccaagcaatgaggctgtggacagcttgcgtgacggccgcctgatctacctcttcacagcgggtctctctaaactgcaggagttggtgcggtaccacatctacaaccacggccagctgaccgttgagaagctcatctccaagggtcggatcctcaccatggcgaaccaggtcctggctgtgaacatttctgaggaggggcgcatcctgctgggacccgagggggtcccgctgcagagggtagacgtgatggccgccaatggtgtgatccacatgctggacggcatcctgctgcccccgaccatcctgcccatcctgcccaagcactgcagcgaggagcagcacaagattgtggcgggctcctgtgtggactgccaagccctgaacaccagcacgtgtccccccaacagtgtgaagctggacatcttccccaaggagtgtgtctacatccatgacccaacggggctcaatgtgctaaagaagggctgtgccagctactgcaaccaaaccatcatggaacaaggctgctgcaaaggttttttcgggcctgactgcacgcagtgtcctgggggcttctccaacccctgctatggcaaaggcaattgcagtgatgggatccagggcaatggggcctgcctctgcttcccagactacaagggcatcgcctgccacatctgctcgaacccaaacaagcatggagagcaatgccaggaagactgcggctgtgtccatggtctctgcgacaaccgcccaggcagtgggggggtgtgccagcagggcacgtgtgcccctggcttcagtggccggttctgcaacgagtccatgggggactgtgggcccacagggctggcccagcactgccacctgcatgcccgctgtgttagccaggagggtgttgccagatgtcgctgtcttgatggctttgagggtgatggcttctcctgcacacctagcaacccctgctcccacccggaccgtggaggctgctcagagaatgctgagtgtgtccctgggtccctgggcacccaccactgcacatgccacaaaggctggagtggggatggccgcgtctgtgtggctattgacgagtgtgagctggacatgagaggtggctgccacaccgatgccctctgcagctatgtgggccccgggcagagccgatgcacctgcaagctgggctttgccggggatggctaccagtgcagccccatcgacccctgccgggcaggcaatggcggctgccacggcctggccacctgccgggcagtggggggaggtcagcgggtctgcacgtgcccccctggctttgggggtgatggcttcagctgttatggagacatcttccgggagctggaggcaaatgcccacttctccatcttctaccaatggcttaagagtgccggcatcacgcttcctgccgaccgccgagtcacagccctggtgccctccgaggctgcagtccgtcagctgagccccgaggaccgagctttctggctgcagccaaggacgctgccgaacctggtcagggcccattttctccagggtgccctcttcgaggaggagctggcccggctgggtgggcaggaagtggccaccctgaaccccaccacacgctgggagattcgcaacattagtgggagggtctgggtgcagaatgccagcgtggatgtggctgacctccttgccaccaacggtgtcctacacatcctcagccaggtcttactgcccccccgaggggatgtgcccggtgggcaggggttgctgcagcagctggacttggtgcctgccttcagcctcttccgggaattgctgcagcaccatgggttggtgccccagattgaggctgccactgcctacaccatctttgtgcccaccaaccgctccctggaggcccagggcaacagcagtcacctggacgcagacacagtgcggcaccatgtggtcctgggggaggccctctccatggaaaccctgcggaagggtggacaccgcaactccctcctgggccctgcccactggatcgtcttctacaaccacagtggccagcctgaggtgaaccatgtgccactggaaggccccatgctggaggcccctggccgctcgctgattggtctgtcgggggtcctgacggtgggctcaagtcgctgcctgcatagccacgctgaggccctgcgggagaaatgtgtaaactgcaccaggagattccgctgcactcagggcttccagctgcaggacacacccaggaagagctgtgtctaccgatctggcttctccttctcccggggctgctcttacacatgtgccaagaagatccaggtgccggactgctgccctggtttctttggcacgctgtgtgagccatgcccagggggtctagggggggtgtgctcaggccatgggcagtgccaggacaggttcctgggcagcggggagtgccactgccacgagggcttccatggaacggcctgtgaggtgtgtgagctgggccgctacgggcccaactgcaccggagtgtgtgactgtgcccatgggctgtgccaggaggggctgcaaggggacggaagctgtgtctgtaacgtgggctggcagggcctccgctgtgaccagaaaatcaccagccctcagtgccctaggaagtgcgaccccaatgccaactgcgtgcaggactcggccggagcctccacctgcgcctgtgctgcgggatactccggcaatggcatcttctgttcagaggtggacccctgcgcccacggccatgggggctgctcccctcatgccaactgtaccaaggtggcacctgggcagcggacatgcacctgccaggatggctacatgggcgacggggagctgtgccaggaaattaacagctgtctcatccaccacgggggctgccacattcacgccgagtgcatccccactggcccccagcaggtctcctgcagctgccgtgagggttacagcggggatggcatccggacctgcgagctcctggacccctgctctaagaacaatggaggatgcagcccatatgccacctgcaaaagcacaggggatggccagaggacatgtacctgcgacacagcccacaccgtgggggacggcctcacctgccgtgcccgagtcggcctggagctcctgagggataagcatgcctcattcttcagcctccgcctcctggaatataaggagctcaagggcgatgggcctttcaccatcttcgtgccgcacgcagatctaatgagcaacctgtcgcaggatgagctggcccggattcgtgcgcatcgccagctggtgtttcgctaccacgtggttggctgtcggcggctgcggagcgaggacctgctggagcaggggtacgccacggccctctcagggcacccactgcgcttcagcgagagggagggcagcatatacctcaatgacttcgcgcgcgtggtgagcagcgaccatgaggccgtgaacggcatcctgcacttcattgaccgtgtcctgctgccccccgaggcgctgcactgggagcctgatgatgctcccatcccgaggagaaatgtcaccgccgccgcccagggcttcggttacaagatcttcagcggcctcctgaaggtggccggcctcctgcccctgcttcgagaggcatcccataggcccttcacaatgctgtggcccacagacgccgcctttcgagctctgcctccggatcgccaggcctggctgtaccatgaggaccaccgtgacaagctagcagccattctgcggggccacatgattcgcaatgtcgaggccttggcatctgacctgcccaacctgggcccacttcgaaccatgcatgggacccccatctctttctcctgcagccgaacgcgggccggtgagctcatggtgggtgaggatgatgctcgcattgtgcagcggcacttgccctttgagggtggcctggcctatggcatcgaccagctgctggagccacctggccttggtgctcgctgtgaccactttgagacccggcccctgcgactgaacacctgcagcatctgtgggctggagccaccctgtcctgaggggtcacaggagcagggcagccctgaggcctgctggcgcttctacccgaagttctggacgtcccctccgctgcactctttgggattacgcagcgtctgggtccaccccagcctttggggtaggccccaaggcctgggcaggggctgccaccgcaattgtgtcaccaccacctggaagcccagctgctgccctggtcactatggcagtgagtgccaagcttgccctggcggccccagcagcccttgtagtgaccgtggcgtgtgcatggacggcatgagtggcagtgggcagtgtctgtgccgttcaggttttgctgggacagcctgtgaactctgtgctcctggtgcctttgggccccattgtcaagcctgccgctgcactgtgcatggccgctgtgatgagggccttgggggctctggctcctgcttctgtgatgaaggctggactgggccacgctgtgaggtgcaactggagctgcagcctgtgtgtaccccaccctgtgcacccgaggctgtgtgccgtgcaggcaacagctgtgagtgcagcctgggctatgaaggggatggccgtgtgtgtacagtggcagacctgtgccaggacgggcatggtggctgcagtgagcacgccaactgtagccaggtaggaacaatggtcacttgtacctgcctgcccgactacgagggtgatggctggagctgccgggcccgcaacccctgcacagatggccaccgcgggggctgcagcgagcacgccaactgcttgagcaccggcctgaacacacggcgctgtgagtgccacgcaggctacgtaggcgatggactgcagtgtctggaggagtcggaaccacctgtggaccgctgcttgggccagccaccgccctgccactcagatgccatgtgcactgacctgcacttccaggagaaacgggctggcgttttccacctccaggccaccagcggcccttatggtctgaacttttcggaggctgaggcggcatgcgaagcacagggagccgtccttgcttcattccctcagctctctgctgcccagcagctgggcttccacctgtgcctcatgggctggctggccaatggctccactgcccaccctgtggttttccctgtggcggactgtggcaatggtcgggtgggcatagtcagcctgggtgcccgcaagaacctctcagaacgctgggatgcctactgcttccgtgtgcaagatgtggcctgccgatgccgaaatggcttcgtgggtgacgggatcagcacgtgcaatgggaagctgctggatgtgctggctgccactgccaacttctccaccttctatgggatgctattgggctatgccaatgccacccagcggggtctcgacttcctggacttcctggatgatgagctcacgtataagacactcttcgtccctgtcaatgaaggctttgtggacaacatgacgctgagtggcccagacttggagctgcatgcctccaacgccaccctcctaagtgccaacgccagccaggggaagttgcttccggcccactcaggcctcagcctcatcatcagtgacgcaggccctgacaacagttcctgggcccctgtggccccagggacagttgtggttagccgtatcattgtgtgggacatcatggccttcaatggcatcatccatgctctggccagccccctcctggcacccccacagccccaggcagtgctggcgcctgaagccccacctgtggcggcaggcgtgggggctgtgcttgccgctggagcactgcttggcttggtggccggagctctctacctccgtgcccgaggcaagcccatgggctttggcttctctgccttccaggcggaagatgatgctgatgacgacttctcaccgtggcaagaagggaccaaccccaccctggtctctgtccccaaccctgtctttggcagcgacaccttttgtgaacccttcgatgactcactgctggaggaggacttccctgacacccagaggatcctcacagtcaagtgacgaggctggggctgaaagcagaagcatgcacagggaggagaccacttttattgcttgtctgggtggatggggcaggaggggctgagggcctgtcccagacaataaaggtgccctcagcggatgtgggccatgtcaccaa

SEQ ID NO: 184645 - protein, 821 aa, Artificial Sequence
  derived and/or modified sequence
MPTRVCCCCSALRPRYKRLVDNIFPEDPKDGLVKTDMEKLTFYAVSAPEKLDRIGSYLAERLSRDVVRHRSGYVLIAMEALDQLLMACHSQSIKPFVESFLHMVAKLLESGEPKLQVLGTNSFVKFANIEEDTPSYHRRYDFFVSRFSAMCHSCHSDPEIRTEIRIAGIRGIQGVVRKTVNDELRATIWEPQHMDKIVPSLLFNMQKIEEVDSRIGPPSSPSATDKEENPAVLAENCFRELLGRATFGNMNNAVRPVFAHLDHHKLWDPNEFAVHCFKIIMYSIQAQYSHHVIQEILGHLDARKKDAPRVRAGIIQVLLEAVAIAAKGSIGPTVLEVFNTLLKHLRLSVEFEANDLQGGSVGSVNLNTSSKDNDEKIVQNAIIQTIGFFGSNLPDYQRSEIMMFIMGKVPVFGTSTHTLDISQLGDLGTRRIQIMLLRSLLMVTSGYKAKTIVTALPGSFLDPLLSPSLMEDYELRQLVLEVMHNLMDRHDNRAKLRGIRIIPDVADLKIKREKICRQDTSFMKKNGQQLYRHIYLGCKEEDNVQKNYELLYTSLALITIELANEEVVIDLIRLAIALQDSAIINEDNLPMFHRCGIMALVAAYLNFVSQMIAVPAFCQHVSKVIEIRTMEAPYFLPEHIFRDKCMLPKSLEKHEKDLYFLTNKIAESLGGSGYSVERLSVPYVPQVTDEDRLSRRKSIVDTVSIQVDILSNNVPSDDVVSNTEEITFEALKKAIDTSGMEEQEKEKRRLVIEKFQKAPFEEIAAQCESKANLLHDRLAQILELTIRPPPSPSGTLTITSGHAQYQSVPVYEMKFPDLCVY

SEQ ID NO: 184646 - protein, 821 aa, Artificial Sequence
  derived and/or modified sequence
MKSRVCCCCSALRPRYKRLVDNIFPEDPKDGLVKTDMEKLTFYAVSAPEKLDRIGSYLAERLSRDVVRHRSGYVLIAMEALDQLLMACHSQSIKPFVESFLHMVAKLLESGEPKLQVLGTNSFVKFANIEEDTPSYHRRYDFFVSRFSAMCHSCHSDPEIRTEIRIAGIRGIQGVVRKTVNDELRATIWEPQHMDKIVPSLLFNMQKIEEVDSRIGPPSSPSATDKEENPAVLAENCFRELLGRATFGNMNNAVRPVFAHLDHHKLWDPNEFAVHCFKIIMYSIQAQYSHHVIQEILGHLDARKKDAPRVRAGIIQVLLEAVAIAAKGSIGPTVLEVFNTLLKHLRLSVEFEANDLQGGSVGSVNLNTSSKDNDEKIVQNAIIQTIGFFGSNLPDYQRSEIMMFIMGKVPVFGTSTHTLDISQLGDLGTRRIQIMLLRSLLMVTSGYKAKTIVTALPGSFLDPLLSPSLMEDYELRQLVLEVMHNLMDRHDNRAKLRGIRIIPDVADLKIKREKICRQDTSFMKKNGQQLYRHIYLGCKEEDNVQKNYELLYTSLALITIELANEEVVIDLIRLAIALQDSAIINEDNLPMFHRCGIMALVAAYLNFVSQMIAVPAFCQHVSKVIEIRTMEAPYFLPEHIFRDKCMLPKSLEKHEKDLYFLTNKIAESLGGSGYSVERLSVPYVPQVTDEDRLSRRKSIVDTVSIQVDILSNNVPSDDVVSNTEEITFEALKKAIDTSGMEEQEKEKRRLVIEKFQKAPFEEIAAQCESKANLLHDRLAQILELTIRPPPSPSGTLTITSGHAQYQSVPVYEMKFPDLCVY

SEQ ID NO: 184647 - protein, 777 aa, Artificial Sequence
  derived and/or modified sequence
MPKGVCCCCSALRPRYKRLVDNIFPEDPKDGLVKTDMEKLTFYAVSAPEKLDRIGSYLAERLSRDVVRHRSGYVLIAMEALDQLLMACHSQSIKPFVESFLHMVAKLLESGEPKLQVLGTNSFVKFANIEEDTPSYHRRYDFFVSRFSAMCHSCHSDPEIRTEIRIAGIRGIQGVVRKTVNDELRATIWEPQHMDKIVPSLLFNMQKIEEVDSRIGPPSSPSATDKEENPAVLAENCFRELLGRATFGNMNNAVRPVFAHLDHHKLWDPNEFAVHCFKIIMYSIQAQYSHHVIQEILGHLDARKKDAPRVRAGIIQVLLEAVAIAAKGSIGPTVLEVFNTLLKHLRLSVEFEANDLQGGSVGSVNLNTSSKDNDEKIVQNAIIQTIGFFGSNLPDYQRSEIMMFIMGKVPVFGTSTHTLDISQLGDLGTRRIQIMLLRSLLMVTSGYKAKTIVTALPGSFLDPLLSPSLMEDYELRQLVLEVMHNLMDRHDNRAKLRGIRIIPDVADLKIKREKICRQDTSFMKKNGQQLYRHIYLGCKEEDNVQKNYELLYTSLALITIELANEEVVIDLIRLAIALQDSAIINEDNLPMFHRCGIMALVAAYLNFVSQMIAVPAFCHKIAESLGGSGYSVERLSVPYVPQVTDEDRLSRRKSIVDTVSIQVDILSNNVPSDDVVSNTEEITFEALKKAIDTSGMEEQEKEKRRLVIEKFQKAPFEEIAAQCESKANLLHDRLAQILELTIRPPPSPSGTLTITSGHAQYQSVPVYEMKFPDLCVY

SEQ ID NO: 184648 - DNA, 2466 bp, Artificial Sequence
  derived and/or modified sequence
atgccaacccgggtttgctgctgttgttccgctctgagacctcgctacaaacggctagtagacaatatcttccctgaggatcccaaggatggattagtgaaaacggacatggagaagctgacattctatgctgtgtctgctcctgagaaattagacaggataggatcctacttggctgagcgacttagccgggatgtggtaagacaccggagcgggtatgtgcttattgccatggaagccctggatcaactactgatggcctgtcactcccagagtatcaaacctttcgtcgaatcattccttcatatggtggcaaaactgttagagtctggagagcccaaattgcaagtactgggaactaattccttcgtgaaatttgcaaatatcgaagaagatacgccctcataccaccgacggtacgactttttcgtgtcgcgttttagcgcgatgtgccatagctgccactctgatcccgagataaggactgaaatccgcattgccggcatcaggggtatccagggtgtagtcaggaaaactgtgaacgatgaactgcgggccacaatttgggaaccccagcatatggataagatcgtccccagccttctgtttaacatgcagaagattgaagaggtggacagtcgcatcggtccgccaagctcaccctcagctacagataaagaagagaaccccgcggtgttagctgaaaattgttttcgagagctgctcggacgtgctaccttcggaaacatgaacaacgccgtcaggcctgtcttcgctcatcttgaccatcataagctatgggaccctaacgagtttgccgtgcactgctttaagataatcatgtatagtattcaggcacagtatagccaccatgtcattcaggagatcttaggacacttagacgcccgaaagaaagacgctccaagggtgcgcgctggaatcattcaagttctcctggaagcagtcgcaattgccgccaagggatctattggacctaccgttctcgaagtgtttaatacgcttctgaaacaccttcgattgagcgtggaattcgaggctaacgacttgcaggggggaagcgtgggatcggtgaacttaaacacctcttcaaaagataacgacgagaagattgtgcagaatgccattatccagacaatcggcttttttggctcaaacctgcccgattatcagcgctccgagatcatgatgttcatcatgggtaaggtgccggtgttcggcacaagcacacacaccctggacatctcccagctaggggacctgggaacccgcaggatccaaatcatgttgcttaggagcttactcatggtgacttcggggtacaaggccaaaactattgtgaccgcactgcccggcagttttctcgaccctcttcttagtccttccctcatggaggactatgaactccgtcagttggtgctggaggtgatgcataacctcatggaccgccatgacaatcgggctaagctgaggggaatcagaatcatacccgacgtcgccgacttaaagatcaaacgcgaaaagatctgccggcaagatacatccttcatgaagaagaacggccagcagctgtaccgccacatctatctgggatgcaaggaggaagataacgtgcagaaaaattatgaattattatacaccagcctcgctctgatcacaatcgagctggccaatgaggaggtagtgattgatcttattcgactcgctatcgctttacaggatagcgctatcatcaacgaggacaatctgcctatgtttcatcgctgcggcatcatggcactggtggcagcatatttaaacttcgtcagccagatgattgccgtgccagctttttgtcagcatgtgtctaaggtcatcgaaatccggactatggaagccccctatttcctcccagaacatatctttcgggataagtgcatgttgcccaagtctctggagaaacatgagaaggatttgtactttttgactaataagattgcggagtccttgggagggtcaggatattcagtcgaacgtttgtctgtgccatatgtaccacaggtgacagacgaagacagactttctcgtcggaagtctatagtggacacggtttctattcaagtcgacattctatctaacaatgttccttccgatgatgttgtgagtaacacagaagaaataactttcgaggcccttaagaaggcaatcgacacgagcgggatggaggagcaggagaaggaaaagcgtaggcttgttatcgagaaattccagaaagcccctttcgaggaaatcgcagcacagtgtgagtcaaaggctaatctgctgcatgaccgcctagcacaaatcctagagctaaccatcagaccacctccttccccttcaggaacattgacaatcacttcgggtcacgctcaatatcagtccgttccagtttatgagatgaagttcccggatctttgcgtgtactag

SEQ ID NO: 184649 - DNA, 2466 bp, Artificial Sequence
  derived and/or modified sequence
atgaaatcacgtgtgtgttgctgctgttcagccctgcggcccagatacaagagacttgtcgataatatttttcctgaagatcccaaagacggcctcgtaaaaactgacatggaaaagctcaccttttacgctgtgagcgctcctgagaagcttgacagaattgggtcctacctcgccgaaaggcttagcagggacgtcgtccgccacaggagtgggtatgtgcttatcgccatggaggctcttgatcagcttctgatggcgtgccattctcaaagcattaagccatttgtcgagtcctttttacacatggtggccaaactcctggagagcggggagccaaagttacaggttctcgggacaaactcatttgttaagttcgcgaacattgaagaagacaccccatcttaccatcgccgatacgatttttttgtgagtcgtttcagtgccatgtgtcattcttgccactctgatccagagatccggacagaaattcgcattgcaggtatcaggggaattcagggggtggtgcggaaaactgtcaacgacgaattgagagctaccatttgggagccgcagcatatggacaagatagtgccctccctgctgttcaatatgcagaaaatagaggaagttgactcaaggattggccctcccagttcaccatccgccacggacaaggaagaaaatcccgcggttcttgccgaaaattgcttcagagagttacttggcagagcgacttttggaaatatgaataatgccgtaagacctgtgttcgcccatctggatcaccacaagctttgggaccctaacgagttcgccgttcattgtttcaagatcatcatgtattccatccaggctcagtatagccatcatgtgatccaagaaatcctggggcacctcgacgcgcgtaaaaaggacgccccacgggtgcgagccgggatcattcaggtactgcttgaggccgtcgccatagccgccaagggtagcattggaccgactgttttggaggtgttcaacactttattaaagcacctgcggctgagtgtagagttcgaggcaaacgatctgcaagggggcagcgtaggcagcgtgaacctgaacacgtcatccaaggacaacgatgaaaagatcgtccagaatgcgatcattcagactatcgggttcttcggtagcaatttgccagattatcagagatccgagattatgatgttcatcatgggcaaggtccctgtgttcggcacttctacccacactcttgatattagccagttaggagacctgggaacaaggcgcatccagatcatgctcctgaggtccctgctgatggtgaccagcggatacaaagccaaaacaatcgttacagctctccccggcagcttcctggacccactgctatcaccctccctcatggaggactacgaactccgacagctggtgctggaggtgatgcataacttgatggatcggcacgacaaccgggcgaaacttagggggatccggattatccccgatgttgccgacctgaaaatcaaaagggagaagatatgccgccaggacacttctttcatgaaaaaaaacggccagcagctgtatcggcacatttacctcgggtgcaaggaagaggacaatgtgcagaaaaattacgagctgctgtatacctccctggctctcatcacaatagagctagcaaatgaggaagtggtgattgacctgattcgcctggcaattgcgctgcaagactccgctataatcaatgaggacaatctgccgatgtttcatcggtgtggcatcatggcgttggtcgccgcttatctcaatttcgtctcccagatgatcgcggtcccagctttctgtcaacacgtgtctaaggtgatcgaaatcaggactatggaagctccctacttcctgccagagcacatttttagagacaagtgtatgcttccaaaatcgttagaaaagcatgaaaaagacctctacttcctcacaaacaagatcgctgagtcactcggtggctctggctactcagttgaaaggctctccgttccctacgttccacaggtaacggacgaggatcgcttgtccaggaggaaaagtatcgtcgacacagtaagcatacaggttgatatcctctctaacaatgtgcccagtgacgacgtagtctcaaacactgaagaaattactttcgaagccctgaagaaggccattgatacctcagggatggaggagcaggagaaagagaaacgccggctagtgattgagaaatttcagaaggccccgtttgaggaaatcgccgcgcaatgtgaatcgaaagctaacctgcttcacgataggctggcacagatcctagaactgaccattaggccccctcccagccctagcgggaccctaacgatcactagtggacatgctcaataccaatctgtccctgtgtatgaaatgaaatttcctgatttgtgcgtttactag

SEQ ID NO: 184650 - DNA, 2334 bp, Artificial Sequence
  derived and/or modified sequence
atgcctaagggtgtttgttgttgttgttccgccctccgcccccggtacaagcgcctggtggataacatcttccccgaagaccccaaggatggccttgtcaagaccgacatggagaaattgaccttctacgctgtcagcgcccccgagaagctagatagaatcggctcgtatctggccgagagattgagtagagacgtggtgcggcacagaagtggatacgtgctgattgctatggaggctctcgatcaactgcttatggcttgccacagccagtctatcaaacctttcgttgagtcatttttgcatatggtggctaaactgctcgagtccggagaaccaaagcttcaagtcctcggcactaattcctttgttaaattcgcaaatattgaggaggacacccctagttaccatcggcggtatgacttcttcgtgtccaggttcagtgctatgtgccactcttgccactccgatcccgagatccggacagaaatccgaatcgccggcatccgcggtatccagggggttgttaggaagacagtcaacgacgagctaagggccaccatttgggagcctcagcacatggataagatcgtgcccagtctgcttttcaatatgcaaaagattgaagaggtcgactcccggatcggccctccaagttcgccgagtgcgacagacaaagaggagaatcctgctgtgcttgctgaaaactgcttccgcgaactcctggggcgtgccacattcgggaacatgaataacgccgtgcgccccgtatttgcccacctggaccatcacaagctgtgggatccaaacgaatttgcagttcactgtttcaagattatcatgtactccatccaggcccaatatagtcaccacgtcatccaggagatccttggtcacctggatgctcgcaagaaggatgcacccagggtgcgggccggcatcattcaggtcctgctcgaggctgtggccattgctgccaagggaagcatcggccccacagtgttggaagtcttcaacaccttactgaagcatcttcgactgtctgtcgagtttgaagctaatgacctgcaggggggcagcgttggcagtgtgaacctcaatacatccagtaaagataatgacgagaaaatagtccaaaacgcaattattcagaccatagggttcttcggttctaatcttcctgattaccagaggagcgagattatgatgtttatcatgggcaaggtccccgtttttggcaccagtacccacacgctagacatcagtcagctgggggacctgggtactaggaggatccagataatgttgctgagatcgctgctgatggttacgagcggttataaagccaaaactatcgttactgccctccctggaagtttcttggaccccctcctgtctccctccctgatggaggactacgagcttcgccagctggtgctggaagtgatgcacaacctgatggatagacacgataaccgtgctaaactgagagggatccggatcatccccgacgtcgctgacctcaagatcaagcgagaaaaaatctgccgccaggacactagcttcatgaagaagaacgggcagcagctgtatagacatatttacctggggtgtaaggaggaagacaatgtgcagaagaactacgagctactctacacttcactagcgctcataacaattgagctggccaacgaggaagtagtgatcgacttaatccgcctggcaatcgctctgcaggacagcgcaatcataaatgaggacaacctgccgatgtttcacagatgcggtataatggcactggtcgcggcctatttgaatttcgtcagccagatgatcgcggtcccagcattctgccacaagattgcagagtctcttggtggctccggctatagcgtggagcgcctgtcagtaccttacgtgcctcaggtaactgatgaggatcgccttagccggagaaagtctatagtggatacagtcagtatccaagtggacatcctgagtaacaatgtgccaagcgatgacgttgtttcaaacaccgaggagattacttttgaagcactaaagaaagccattgacacaagcgggatggaggaacaggagaaagaaaaacgcaggttagtcatcgagaaattccagaaggccccattcgaggagatagccgcgcagtgtgagtccaaggccaatctgcttcacgaccggctggctcaaatactcgaactaaccatccgccctccaccgtctcctagcgggactctgacgataaccagcggccatgcccaataccaaagtgtccctgtctatgaaatgaaatttcccgacctctgtgtctattag

SEQ ID NO: 184651 - DNA, 2358 bp, Artificial Sequence
  derived and/or modified sequence
atggagaaattaacattctatgccgtgtccgcacccgagaaattagatcgtatcggaagttatctcgccgagcgactgtcgcgggatgtggtcagacacagaagcgggtacgtattgattgctatggaagcactagatcagctcctgatggcgtgtcactcacagtccataaagccctttgttgaatctttcctccatatggttgcaaagttgctggaaagcggggagcctaagcttcaggtgctgggaacaaatagcttcgtaaaattcgcaaacattgaggaggacactccttcttatcaccgtcggtacgattttttcgtctcaaggttctcggcgatgtgtcatagctgtcactccgaccccgaaatacggaccgaaatacgaatcgcaggaatcagaggaatacaaggtgttgtcaggaagaccgtgaatgatgagctgagagccactatttgggagcctcagcacatggacaagattgtgccctccctgttgtttaacatgcagaaaatcgaggaagttgattcccgcattgggcccccctctagtccgagcgctacggacaaggaggagaatccagctgttctcgccgaaaactgcttccgcgagctgttgggaagagcaacatttggcaatatgaacaatgctgtgcgtcccgtgttcgcccacttagaccaccacaaactgtgggacccaaatgagtttgcggtccattgcttcaaaataattatgtactcgattcaggcccaatacagccaccatgttattcaggagatattgggtcacctcgatgctcgaaagaaagacgcgccacgtgtgcgcgcaggcatcatccaagtcctgctggaggcggttgccatcgctgcgaagggcagtattgggccaaccgtgttggaggtctttaataccctgcttaaacacctgcggctctccgtggagttcgaggctaatgacctgcagggaggcagcgtgggaagcgtgaatctaaatacgagctccaaggataatgacgaaaagatcgttcaaaacgccatcatccagactattggattcttcggatccaacctaccagactatcagagaagtgaaatcatgatgtttattatgggcaaggtgcctgtgttcggcacgagcactcacaccctggatatatctcaactgggggacctcggcacccgaagaatccagatcatgctcctgagaagtttactaatggtgacctcaggatataaggccaaaacaatcgtcacagctctccccggatccttcctggacccactgctctcccccagtctaatggaggactacgagctcaggcagctagtcctggaggttatgcataatcttatggatcggcacgataatcgggcgaaactgcgaggcattcgcatcatccccgacgtggccgatctgaagatcaaaagagagaagatttgccggcaagatacatcctttatgaagaaaaacggacagcagctgtacagacacatctatctagggtgcaaggaggaagacaacgttcagaagaactacgaactgctgtacaccagtcttgcacttatcaccattgagctggccaacgaggaagtggtgatcgaccttatccggctcgctatcgcactgcaggactcagcaatcataaacgaggacaatttgcctatgtttcatcgttgcggcataatggccctggtagctgcctatttgaatttcgtaagccagatgattgctgtgcctgccttctgccagcacgtgtcgaaggtcattgaaataagaacaatggaagcaccttactttcttccggaacacatcttcagggataaatgtatgctgccaaagtcccttgagaagcacgaaaaggacctgtatttccttaccaacaaaattgctgagagcctgggcggctcagggtattctgtagaaagactgagcgttccttacgtgccacaggtgactgatgaggatcgcctctcccgtagaaaaagcattgtagacacagtgagcattcaagtagacatcctctcaaacaatgtgcccagcgatgatgtggtgtctaacacagaagagattacattcgaagcattaaaaaaggccatcgatacgtcaggaatggaggagcaagagaaggaaaagagacgtctggtgatcgagaagttccagaaagcgccattcgaggagattgccgcccagtgcgaatccaaagccaatcttctacatgatagactcgctcagatcctcgagctcaccattagaccacctccttctccatcgggaaccctcactatcacatcaggacacgctcaataccagagcgtgccggtctatgaaatgaagttccccgacctctgtgtctactag

SEQ ID NO: 184652 - DNA, 2466 bp, Artificial Sequence
  derived and/or modified sequence
atgcccaccagggtgtgctgctgctgcagcgccctgcggccccgctacaagaggctggtggacaacatcttccctgaggaccccaaggatggcctggtgaagacagacatggagaagctgaccttctatgctgtgtctgcccctgagaagctggaccgcatcggcagctacctggccgagcggctgagcagagatgtggtgcgccacaggagcggctacgtgctgattgccatggaggccctggaccagctgctgatggcctgccacagccagagcatcaagccctttgtggagagcttcctgcacatggtggccaagctgctggagagcggggagcccaagctgcaggtgctgggcaccaacagctttgtgaagtttgccaacatcgaggaggacacccccagctaccaccggcgctatgacttctttgtgagccgcttcagcgccatgtgccacagctgccacagcgaccctgagatcagaacagagatcagaattgctggcatccggggcatccagggcgtggtgaggaagacagtgaatgatgagctgcgggccaccatctgggagccccagcacatggacaagatcgtgcccagcctgctcttcaacatgcagaagattgaggaggtggacagcagaattggcccccccagcagccccagcgccacagacaaggaggagaacccagctgtgctggccgagaactgcttccgggagctgctgggccgggccacctttggaaacatgaacaatgctgtgcggcctgtgtttgcccacctggaccaccacaagctgtgggaccccaatgaatttgctgtgcactgcttcaagatcatcatgtacagcatccaggcccagtacagccaccacgtgatccaggagatcctgggccacctggatgccaggaagaaggatgccccccgggtgcgggccggcatcatccaggtgctgctggaggccgtggccatcgccgccaagggcagcatcggccccaccgtgctggaggtgttcaacaccctgctgaagcacctgcggctgtctgtggagtttgaggccaatgacctgcagggcggctctgtgggctctgtgaacctgaacaccagcagcaaggacaatgatgagaagatcgtgcagaatgccatcatccagaccatcggcttcttcggcagcaacctgcctgactaccagaggtctgagatcatgatgttcatcatgggcaaggtgcctgtgtttggcaccagcacccacaccctggacatcagccagctgggggacctgggcacccggcgcatccagatcatgctgctgcggagcctgctgatggtgaccagcggctacaaggccaagaccatcgtgacagccctgcccggcagcttcctggaccccctgctgagccccagcctgatggaggactatgagctgcggcagctggtgctggaggtgatgcacaacctgatggacagacatgacaacagagccaagctgcggggcatccgcatcatcccagatgtggccgacctgaagatcaagcgggagaagatctgccggcaggacaccagcttcatgaagaagaatggccagcagctgtaccgccacatctacctgggctgcaaggaggaggacaacgtgcagaagaactatgagctgctgtacaccagcctggccctgatcaccatcgagctggccaatgaggaggtggtgattgacctgatccggctggccatcgccctgcaggacagcgccatcatcaatgaagacaacctgcccatgttccaccgctgtggcatcatggccctggtggccgcctacctgaactttgtgtcccagatgattgctgtgcctgccttctgccagcacgtgtccaaggtgattgagatccgcaccatggaggccccctacttcctgcctgagcacatcttccgggacaagtgcatgctgcccaagagcctggagaagcatgagaaggacctgtacttcctgaccaacaagattgctgagagcctgggcggcagcggctacagcgtggagcggctgtctgtgccctacgtgccccaggtgacagatgaggaccggctgagcaggaggaagagcatcgtggacacagtgtccatccaggtggacatcctgagcaacaacgtgcccagtgatgatgtggtgagcaacacagaggagatcacctttgaggccctgaagaaggccatcgacaccagcggcatggaggagcaggagaaggagaagaggcggctggtgattgagaagttccagaaggccccctttgaggagattgctgcccagtgtgagagcaaggccaacctgctgcatgaccggctggcccagatcctggagctgaccatccggcccccacccagccccagcggcaccctgaccatcaccagcggccacgcccagtaccagagcgtgcctgtgtatgagatgaagttcccagacctgtgtgtgtactag

SEQ ID NO: 184653 - DNA, 2466 bp, Artificial Sequence
  derived and/or modified sequence
atgaagagccgggtgtgctgctgctgcagcgccctgcggccccgctacaagaggctggtggacaacatcttccctgaggaccccaaggatggcctggtgaagacagacatggagaagctgaccttctatgctgtgtctgcccctgagaagctggaccgcatcggcagctacctggccgagcggctgagcagagatgtggtgcgccacaggagcggctacgtgctgattgccatggaggccctggaccagctgctgatggcctgccacagccagagcatcaagccctttgtggagagcttcctgcacatggtggccaagctgctggagagcggggagcccaagctgcaggtgctgggcaccaacagctttgtgaagtttgccaacatcgaggaggacacccccagctaccaccggcgctatgacttctttgtgagccgcttcagcgccatgtgccacagctgccacagcgaccctgagatcagaacagagatcagaattgctggcatccggggcatccagggcgtggtgaggaagacagtgaatgatgagctgcgggccaccatctgggagccccagcacatggacaagatcgtgcccagcctgctcttcaacatgcagaagattgaggaggtggacagcagaattggcccccccagcagccccagcgccacagacaaggaggagaacccagctgtgctggccgagaactgcttccgggagctgctgggccgggccacctttggaaacatgaacaatgctgtgcggcctgtgtttgcccacctggaccaccacaagctgtgggaccccaatgaatttgctgtgcactgcttcaagatcatcatgtacagcatccaggcccagtacagccaccacgtgatccaggagatcctgggccacctggatgccaggaagaaggatgccccccgggtgcgggccggcatcatccaggtgctgctggaggccgtggccatcgccgccaagggcagcatcggccccaccgtgctggaggtgttcaacaccctgctgaagcacctgcggctgtctgtggagtttgaggccaatgacctgcagggcggctctgtgggctctgtgaacctgaacaccagcagcaaggacaatgatgagaagatcgtgcagaatgccatcatccagaccatcggcttcttcggcagcaacctgcctgactaccagaggtctgagatcatgatgttcatcatgggcaaggtgcctgtgtttggcaccagcacccacaccctggacatcagccagctgggggacctgggcacccggcgcatccagatcatgctgctgcggagcctgctgatggtgaccagcggctacaaggccaagaccatcgtgacagccctgcccggcagcttcctggaccccctgctgagccccagcctgatggaggactatgagctgcggcagctggtgctggaggtgatgcacaacctgatggacagacatgacaacagagccaagctgcggggcatccgcatcatcccagatgtggccgacctgaagatcaagcgggagaagatctgccggcaggacaccagcttcatgaagaagaatggccagcagctgtaccgccacatctacctgggctgcaaggaggaggacaacgtgcagaagaactatgagctgctgtacaccagcctggccctgatcaccatcgagctggccaatgaggaggtggtgattgacctgatccggctggccatcgccctgcaggacagcgccatcatcaatgaagacaacctgcccatgttccaccgctgtggcatcatggccctggtggccgcctacctgaactttgtgtcccagatgattgctgtgcctgccttctgccagcacgtgtccaaggtgattgagatccgcaccatggaggccccctacttcctgcctgagcacatcttccgggacaagtgcatgctgcccaagagcctggagaagcatgagaaggacctgtacttcctgaccaacaagattgctgagagcctgggcggcagcggctacagcgtggagcggctgtctgtgccctacgtgccccaggtgacagatgaggaccggctgagcaggaggaagagcatcgtggacacagtgtccatccaggtggacatcctgagcaacaacgtgcccagtgatgatgtggtgagcaacacagaggagatcacctttgaggccctgaagaaggccatcgacaccagcggcatggaggagcaggagaaggagaagaggcggctggtgattgagaagttccagaaggccccctttgaggagattgctgcccagtgtgagagcaaggccaacctgctgcatgaccggctggcccagatcctggagctgaccatccggcccccacccagccccagcggcaccctgaccatcaccagcggccacgcccagtaccagagcgtgcctgtgtatgagatgaagttcccagacctgtgtgtgtactag

SEQ ID NO: 184654 - DNA, 2334 bp, Artificial Sequence
  derived and/or modified sequence
atgcccaagggcgtgtgctgctgctgcagcgccctgcggccccgctacaagaggctggtggacaacatcttccctgaggaccccaaggatggcctggtgaagacagacatggagaagctgaccttctatgctgtgtctgcccctgagaagctggaccgcatcggcagctacctggccgagcggctgagcagagatgtggtgcgccacaggagcggctacgtgctgattgccatggaggccctggaccagctgctgatggcctgccacagccagagcatcaagccctttgtggagagcttcctgcacatggtggccaagctgctggagagcggggagcccaagctgcaggtgctgggcaccaacagctttgtgaagtttgccaacatcgaggaggacacccccagctaccaccggcgctatgacttctttgtgagccgcttcagcgccatgtgccacagctgccacagcgaccctgagatcagaacagagatcagaattgctggcatccggggcatccagggcgtggtgaggaagacagtgaatgatgagctgcgggccaccatctgggagccccagcacatggacaagatcgtgcccagcctgctcttcaacatgcagaagattgaggaggtggacagcagaattggcccccccagcagccccagcgccacagacaaggaggagaacccagctgtgctggccgagaactgcttccgggagctgctgggccgggccacctttggaaacatgaacaatgctgtgcggcctgtgtttgcccacctggaccaccacaagctgtgggaccccaatgaatttgctgtgcactgcttcaagatcatcatgtacagcatccaggcccagtacagccaccacgtgatccaggagatcctgggccacctggatgccaggaagaaggatgccccccgggtgcgggccggcatcatccaggtgctgctggaggccgtggccatcgccgccaagggcagcatcggccccaccgtgctggaggtgttcaacaccctgctgaagcacctgcggctgtctgtggagtttgaggccaatgacctgcagggcggctctgtgggctctgtgaacctgaacaccagcagcaaggacaatgatgagaagatcgtgcagaatgccatcatccagaccatcggcttcttcggcagcaacctgcctgactaccagaggtctgagatcatgatgttcatcatgggcaaggtgcctgtgtttggcaccagcacccacaccctggacatcagccagctgggggacctgggcacccggcgcatccagatcatgctgctgcggagcctgctgatggtgaccagcggctacaaggccaagaccatcgtgacagccctgcccggcagcttcctggaccccctgctgagccccagcctgatggaggactatgagctgcggcagctggtgctggaggtgatgcacaacctgatggacagacatgacaacagagccaagctgcggggcatccgcatcatcccagatgtggccgacctgaagatcaagcgggagaagatctgccggcaggacaccagcttcatgaagaagaatggccagcagctgtaccgccacatctacctgggctgcaaggaggaggacaacgtgcagaagaactatgagctgctgtacaccagcctggccctgatcaccatcgagctggccaatgaggaggtggtgattgacctgatccggctggccatcgccctgcaggacagcgccatcatcaatgaagacaacctgcccatgttccaccgctgtggcatcatggccctggtggccgcctacctgaactttgtgtcccagatgattgctgtgcctgccttctgccacaagattgctgagagcctgggcggcagcggctacagcgtggagcggctgtctgtgccctacgtgccccaggtgacagatgaggaccggctgagcaggaggaagagcatcgtggacacagtgtccatccaggtggacatcctgagcaacaacgtgcccagtgatgatgtggtgagcaacacagaggagatcacctttgaggccctgaagaaggccatcgacaccagcggcatggaggagcaggagaaggagaagaggcggctggtgattgagaagttccagaaggccccctttgaggagattgctgcccagtgtgagagcaaggccaacctgctgcatgaccggctggcccagatcctggagctgaccatccggcccccacccagccccagcggcaccctgaccatcaccagcggccacgcccagtaccagagcgtgcctgtgtatgagatgaagttcccagacctgtgtgtgtactag

SEQ ID NO: 184655 - DNA, 2358 bp, Artificial Sequence
  derived and/or modified sequence
atggagaagctgaccttctatgctgtgtctgcccctgagaagctggaccgcatcggcagctacctggccgagcggctgagcagagatgtggtgcgccacaggagcggctacgtgctgattgccatggaggccctggaccagctgctgatggcctgccacagccagagcatcaagccctttgtggagagcttcctgcacatggtggccaagctgctggagagcggggagcccaagctgcaggtgctgggcaccaacagctttgtgaagtttgccaacatcgaggaggacacccccagctaccaccggcgctatgacttctttgtgagccgcttcagcgccatgtgccacagctgccacagcgaccctgagatcagaacagagatcagaattgctggcatccggggcatccagggcgtggtgaggaagacagtgaatgatgagctgcgggccaccatctgggagccccagcacatggacaagatcgtgcccagcctgctcttcaacatgcagaagattgaggaggtggacagcagaattggcccccccagcagccccagcgccacagacaaggaggagaacccagctgtgctggccgagaactgcttccgggagctgctgggccgggccacctttggaaacatgaacaatgctgtgcggcctgtgtttgcccacctggaccaccacaagctgtgggaccccaatgaatttgctgtgcactgcttcaagatcatcatgtacagcatccaggcccagtacagccaccacgtgatccaggagatcctgggccacctggatgccaggaagaaggatgccccccgggtgcgggccggcatcatccaggtgctgctggaggccgtggccatcgccgccaagggcagcatcggccccaccgtgctggaggtgttcaacaccctgctgaagcacctgcggctgtctgtggagtttgaggccaatgacctgcagggcggctctgtgggctctgtgaacctgaacaccagcagcaaggacaatgatgagaagatcgtgcagaatgccatcatccagaccatcggcttcttcggcagcaacctgcctgactaccagaggtctgagatcatgatgttcatcatgggcaaggtgcctgtgtttggcaccagcacccacaccctggacatcagccagctgggggacctgggcacccggcgcatccagatcatgctgctgcggagcctgctgatggtgaccagcggctacaaggccaagaccatcgtgacagccctgcccggcagcttcctggaccccctgctgagccccagcctgatggaggactatgagctgcggcagctggtgctggaggtgatgcacaacctgatggacagacatgacaacagagccaagctgcggggcatccgcatcatcccagatgtggccgacctgaagatcaagcgggagaagatctgccggcaggacaccagcttcatgaagaagaatggccagcagctgtaccgccacatctacctgggctgcaaggaggaggacaacgtgcagaagaactatgagctgctgtacaccagcctggccctgatcaccatcgagctggccaatgaggaggtggtgattgacctgatccggctggccatcgccctgcaggacagcgccatcatcaatgaagacaacctgcccatgttccaccgctgtggcatcatggccctggtggccgcctacctgaactttgtgtcccagatgattgctgtgcctgccttctgccagcacgtgtccaaggtgattgagatccgcaccatggaggccccctacttcctgcctgagcacatcttccgggacaagtgcatgctgcccaagagcctggagaagcatgagaaggacctgtacttcctgaccaacaagattgctgagagcctgggcggcagcggctacagcgtggagcggctgtctgtgccctacgtgccccaggtgacagatgaggaccggctgagcaggaggaagagcatcgtggacacagtgtccatccaggtggacatcctgagcaacaacgtgcccagtgatgatgtggtgagcaacacagaggagatcacctttgaggccctgaagaaggccatcgacaccagcggcatggaggagcaggagaaggagaagaggcggctggtgattgagaagttccagaaggccccctttgaggagattgctgcccagtgtgagagcaaggccaacctgctgcatgaccggctggcccagatcctggagctgaccatccggcccccacccagccccagcggcaccctgaccatcaccagcggccacgcccagtaccagagcgtgcctgtgtatgagatgaagttcccagacctgtgtgtgtactag

SEQ ID NO: 184656 - DNA, 2466 bp, Artificial Sequence
  derived and/or modified sequence
atgcccacccgggtgtgctgctgctgcagcgccctgcggccccggtataaacgattagtcgataatatttttccagaggaccctaaagatggactagtcaaaactgatatggagaagctgactttctacgctgtttcagccccagaaaaactggacaggatcggcagttaccttgccgagcggttatctagggacgttgttcggcacagaagtgggtacgttctcatagccatggaggcattagatcagcttctgatggcatgccattctcagagtatcaaaccgtttgtcgaaagttttttgcatatggtcgcaaagctgctggaatcgggcgaaccaaaactccaggttttgggcactaatagcttcgtgaagttcgcaaacatcgaggaagatacaccatcctaccaccgccgctacgacttctttgtcagtcgtttttctgctatgtgccacagctgccacagcgaccccgaaatccggacagagatacgtatcgcagggatacgagggattcagggggtggtcagaaagaccgtgaacgatgaactcagggcgacgatttgggaacctcagcacatggataaaattgtacctagccttctgttcaatatgcagaaaattgaagaagtggattcaaggatcggccctccatcttctccttcggccacagacaaggaggagaaccctgccgtgctagcagaaaactgtttcagggagcttctcggacgtgccacctttggcaatatgaataatgccgtgcgccctgtcttcgctcatctggaccaccacaagctatgggatcccaatgagtttgccgtccattgtttcaaaatcatcatgtacagcatccaggcacagtacagtcaccacgttatacaagagatcctcggtcacctcgatgcccgtaaaaaggacgcccctagggttagagccggtatcatccaggtgctccttgaagctgtggccattgccgcaaaaggcagtatcggcccaacagtgcttgaggttttcaacaccctgttgaagcacctccgcttatctgtggaatttgaggctaacgatttgcagggtggatccgtcgggagcgtaaacctgaacacgagttccaaagataatgacgaaaagattgtgcagaacgctatcatacaaacaattggtttctttggatctaacctgcctgactaccagagaagcgaaattatgatgtttatcatgggcaaggtgcccgtattcgggacttcaacacacaccctagacatcagtcagctaggggacctcggtacaaggcgcattcagatcatgcttcttcgatcactgcttatggttacaagcgggtataaggcgaaaacgatcgtgaccgcccttccaggcagtttcctcgaccctttgctttccccctctttgatggaggactatgaactgagacagctagtcctagaagtcatgcataatcttatggataggcatgacaaccgcgcaaagctgcgtggcatccggattatccccgacgttgccgacctgaagataaagagggaaaaaatctgcaggcaagacaccagtttcatgaagaaaaacggccagcagttgtatcgacacatctacctcggctgtaaggaggaggacaatgtgcagaagaactacgagcttctttacaccagccttgccttgataactattgagttagccaacgaggaagtagtgattgatctgatacgcctggccatcgcacttcaagactccgcaatcattaacgaggataacctgcctatgttccaccgctgtgggatcatggcactggtcgccgcctatttgaacttcgtttctcaaatgatagccgtcccagctttttgccagcacgtgtccaaagtcatagagataaggacgatggaggctccttacttcctgcctgaacacattttccgggacaaatgtatgctgccaaagagccttgaaaagcacgaaaaggatctttattttcttaccaacaaaattgcggaatctctcggcgggagcggctactctgtagaaaggctgtctgtgccctacgtgccacaagtgaccgatgaggatcggttgagcaggcgcaagagcattgtcgacaccgtcagcatccaggtggatatcctctccaacaacgttcctagcgatgatgtggtgtcaaacacagaagagataacattcgaggcccttaagaaggctattgatacttccggtatggaagagcaagaaaaagagaaaagacgcttagtcatcgagaagttccaaaaggctccctttgaagaaattgctgctcagtgtgaatccaaggcgaacctcctacacgatcgactcgctcagatccttgaactgactatccgcccccctccttcccccagcggaactcttaccatcacatcgggccatgcccaataccagtccgttcctgtctacgaaatgaagtttccggacctgtgtgtgtactag

SEQ ID NO: 184657 - DNA, 2466 bp, Artificial Sequence
  derived and/or modified sequence
atgaagagccgggtgtgctgctgctgcagcgccctgcggccccggtacaaacgactcgtcgataatattttccccgaggatcccaaggacgggcttgttaaaactgatatggagaagcttaccttctatgcagtttccgcgcccgaaaagctcgatcgcattggaagttacctcgctgagagactgagccgcgacgtagttcggcaccgttctggatatgtgcttatcgccatggaagccctggatcagctgcttatggcctgccattcccagagtatcaagcccttcgttgagtcctttctgcatatggtcgccaagctgctcgagtccggcgaacccaaactgcaggtcctcgggacaaattccttcgtgaaatttgctaatatcgaggaagacacaccttcctatcatcggagatatgatttctttgtgagccgcttcagcgccatgtgtcatagctgtcacagcgaccccgaaatccggaccgagattcgaattgccggaattcgcggcatccagggtgtggtccgcaaaaccgtgaatgatgagttacgtgctacaatatgggagccccagcatatggataagattgtcccctctctcctgtttaacatgcagaagatcgaggaagttgattccaggattggccccccctcaagcccatcggctaccgacaaagaagagaatcctgccgtgctcgctgagaactgttttagggagcttttaggacgggcaaccttcggcaacatgaacaacgctgtgcgccctgtgtttgcacacctggatcatcacaaactgtgggacccgaatgagtttgccgtgcactgtttcaagatcatcatgtattctatacaggcacaatactctcaccatgttatccaggagatcctgggtcatctcgatgcgcgaaaaaaagacgctccgagggttagggcagggattatccaggtgttgttagaagctgtagcaatcgcagcaaaggggagcatcgggccaaccgtcctcgaagtttttaatacattattaaaacatctcaggctgagcgtggaattcgaggcaaacgacctgcagggaggttccgttgggagcgtcaacttgaacacaagttccaaggataacgatgagaagatcgtacagaatgctataatccagactattggcttttttgggagtaacttgcccgactaccagcgctcagagattatgatgtttattatgggcaaagtccccgtgttcgggacctcaacacataccttggacatcagtcaactcggggatctgggcacaaggcggattcagatcatgctcctgcggtccttgctcatggtgacaagcggttataaagccaaaaccatcgtcaccgcactgccaggcagctttttagatcctcttctcagcccatcccttatggaggattatgagctgcgccagttggttttagaggtaatgcacaatttgatggatcgtcacgacaaccgcgctaaactcagaggtatccgcataattcccgatgttgcggatctcaagatcaagcgtgagaagatatgccgccaagacacatctttcatgaaaaagaacgggcaacagctatatcgccacatctacctgggctgcaaggaagaggataacgtgcagaagaactacgagctcctgtacacatctttggccctcatcaccatcgaacttgcaaatgaagaggtggtcattgatctgatcaggctggcaattgctttgcaagacagtgccatcatcaatgaagacaatttgcctatgttccatagatgtgggataatggctttagtcgcggcgtatcttaacttcgttagtcaaatgatcgctgtcccagccttttgccaacacgtgagcaaagttatcgaaatccgtaccatggaggctccatacttcttgccagagcacatattcagagacaaatgcatgttgcccaaaagccttgagaagcacgaaaaagatttatatttcctcacaaacaagattgctgagagcttaggaggctctggctatagtgtcgaaaggttatccgtcccttacgtgccacaggttacggatgaggatcgcctgtcccggagaaagtcaatcgtggatactgtgtcaatccaggtagacatcctcagcaacaatgtgccttcagacgatgtggtgagtaatacagaggagatcacctttgaagccctgaagaaggccatagatacatctggcatggaggagcaggaaaaggagaagcggagactcgttatagaaaaatttcaaaaggcaccctttgaagagatcgccgcccagtgtgagagcaaggccaatctcttgcacgacaggcttgcccaaatcttagaactcaccattcgaccacctccctctccgtccggcactctgacaatcacctccgggcacgcccaatatcagtctgtacctgtttatgagatgaaatttcctgatttgtgtgtgtattag

SEQ ID NO: 184658 - DNA, 2334 bp, Artificial Sequence
  derived and/or modified sequence
atgcccaagggcgtgtgctgctgctgcagcgccctgcggccccggtataaacggcttgtcgataacatttttcctgaggatccaaaggacgggctggtgaagacggatatggaaaaactgaccttctacgcagtctccgctcctgagaaactggaccgcattggatcctacctggctgaacgcctgagtagagatgtggtgcggcacagaagcgggtatgtactgatagcaatggaagccctggaccaattgctgatggcctgtcatagtcagtctatcaagccgtttgtcgagtcttttctgcacatggtcgcaaagctgctggagtccggagagcccaaactacaggtcctggggaccaattcctttgtgaagtttgcaaatatagaggaagacaccccatcataccacagaaggtacgacttttttgtgtcccgcttcagcgcgatgtgccattcttgtcattcggatccggagattcgcactgagatcaggatcgccggcatccggggaatacagggagtggtgcggaagacagttaacgatgaacttagggcaactatctgggagccgcagcacatggacaagattgtgccttctttgctgttcaacatgcaaaagatagaggaagtcgacagcaggatagggcccccatcatctccgtccgccaccgataaagaagagaatcctgccgtgttggccgaaaattgctttcgcgaactcctcggacgggcgactttcggaaatatgaataatgcagttcggcccgtgttcgcccaccttgatcatcacaaactgtgggatcctaacgaattcgccgttcattgctttaaaattatcatgtactccatccaggcccagtactcacaccatgttattcaagagatcctgggacatctcgacgctcgaaaaaaagacgctccacgagtacgggccggtatcatccaggtcctgctcgaggctgtcgccattgccgctaagggctccattgggccaaccgtgttagaagtcttcaatacgttgctgaaacacctgagactgtctgtggagtttgaggcaaacgatctgcagggaggtagcgtaggaagcgtgaatcttaacacctctagcaaggacaacgacgaaaaaattgttcaaaatgcgatcattcaaaccatcgggtttttcggtagcaatctcccagactatcagaggagtgaaatcatgatgtttatcatggggaaagtgccagtctttggcacgagcacccacacattggacattagccagttgggtgatctaggtacaaggcggatacagatcatgctgcttaggagtctgctgatggtgacgtctggttacaaggcgaagacgatcgtcaccgcccttcctggtagcttcctggatcctcttctgtccccctcattaatggaagattatgaactgcgccagctggtcctagaggtgatgcacaatttaatggaccggcacgacaatagggccaagcttcgtggaattagaatcattcctgacgtggccgacttaaaaattaagcgggaaaagatctgtcgacaggatacaagttttatgaagaagaacggccagcagttatatcgccatatttaccttggatgcaaagaagaagacaacgttcagaaaaactatgagctgctgtacactagcctggccctaattacaatagaactggctaatgaggaggtcgtgattgacctcataagacttgcaatcgctctccaggacagtgccattatcaacgaggataacttgccaatgtttcacagatgtgggatcatggctctcgtggccgcctatcttaatttcgtatctcaaatgatcgctgtgcccgcattctgccacaagattgctgaatcactcggcggatctggctactctgtggagcggctcagcgtgccctacgtgccacaagtcacagacgaagaccgactgagccggcgcaaaagtattgtcgataccgtgagtatccaggtggacattctttccaataatgttccgagtgatgacgttgtctccaataccgaggaaatcacttttgaggccctgaagaaggccattgatacgagcggtatggaggagcaagaaaaggagaaaagacggcttgtgatcgagaaattccagaaggcgccattcgaagagatcgccgcccagtgtgagtcaaaggcgaatcttctgcacgatcgactcgcacagatcttggagttgacaattcgtccaccaccctctccctccgggaccctgactatcacctcaggacacgcccaatatcagtctgtcccagtgtatgagatgaagtttcctgatttgtgcgtctactag

SEQ ID NO: 184659 - DNA, 2358 bp, Artificial Sequence
  derived and/or modified sequence
atggagaagctgaccttctacgccgtgagcgcccccgagaagctggaccgcattgggtcctacctggccgagaggcttagtcgtgacgttgtccgacacaggtccggttatgttctgatcgccatggaggcactggaccagcttctgatggcctgtcattcccagtctattaaaccattcgtggagtctttcctgcatatggttgcgaagctgctagagtctggtgagccgaagctgcaggtgctgggcactaactcgtttgtgaagtttgctaatatcgaagaggacactccttcataccacagacgatatgattttttcgtcagtcgcttctccgctatgtgtcactcttgtcatagcgaccctgaaatccgcactgaaattcgcatcgctggcattagaggtatacagggggtagtgcggaagactgtcaacgacgaactgagagccaccatatgggagccacagcacatggataaaatcgttccctcactcctgtttaatatgcagaagatcgaggaagttgacagcagaatcggcccaccctcctccccaagcgccacagacaaggaagagaacccagctgtgctcgccgagaactgctttcgtgaactactggggagggcgacttttgggaacatgaacaatgccgtgagacccgtgttcgcccatctggatcatcataagctgtgggatccaaacgaattcgctgtccactgcttcaagatcattatgtacagtatccaggcacagtatagccaccacgtgatccaggagatcttaggccacctcgacgcccgaaagaaagacgccccccgggtgcgagccggcataatccaggtgctgctggaagcggtcgccatcgccgctaaagggagcatcggccccacggtgctcgaggtgttcaacactttactgaaacatctgagattgtcagtggagttcgaggctaacgacctccaaggcggaagtgtggggtcagtgaatcttaacacctcttcgaaggataatgacgagaagattgtgcagaacgctatcattcagaccataggatttttcggtagcaacctgcccgattaccagcggtcagaaataatgatgtttattatgggcaaagttccagtgttcggcacttctacccacactctcgatatcagccagttgggcgatctggggacacgaagaattcagatcatgcttttgagaagcttacttatggtaactagcgggtataaagctaaaaccatcgtgacagctttgcccggtagcttcctcgaccctctgctctctcctagtctgatggaggactatgaactgcgacaactggtgctggaagtgatgcacaatcttatggacaggcacgataatcgcgccaagttacggggaatcagaattattccagacgtcgccgacctgaagatcaagagggaaaagatctgcagacaagacacttcattcatgaagaaaaacggtcaacagttatatcgccatatctacttgggctgcaaggaggaagacaatgtgcaaaaaaattacgagcttctttacaccagtttagctttgattacgattgagttagctaatgaggaggtcgtgatcgacttgattaggctcgccatagctctccaagactccgctataataaacgaagacaacttgcccatgtttcacagatgcggaatcatggccctggttgccgcatacttgaacttcgtgtcccagatgattgccgtccctgcgttttgccaacatgtgagcaaggttatagagatcaggactatggaggctccctatttccttcccgaacacatttttagagataaatgcatgctcccaaagtcccttgagaagcacgagaaggacttgtactttctgactaacaaaatcgcagagagtctggggggaagcggctattccgtggagcgtctgtccgtgccctatgtcccacaagttaccgatgaggaccgacttagtaggcgtaagtcgattgtcgataccgtttcaatccaggttgacattctttctaataacgttccctccgatgatgtagtctccaacactgaggagataacattcgaagccctgaagaaagcaatcgacacctctggtatggaggaacaggaaaaggaaaagcgccgactggtgatcgaaaaattccagaaagcacctttcgaagaaatcgcagcccagtgtgagtctaaggccaatctgctgcatgatcggctggcacagatcctcgaactgaccatccgaccccctccatctccctctggcactctgacaataacctcgggccacgcacagtatcagtccgtgcctgtgtacgagatgaagtttccagacctctgtgtttattag

SEQ ID NO: 184660 - DNA, 2466 bp, Artificial Sequence
  derived and/or modified sequence
atgcccacacgcgtttgctgctgctgcagcgccctgagacctcgctacaagcgcttagtcgacaacattttccccgaagacccgaaggatggactcgtgaagaccgacatggagaagctgacattctacgctgttagcgcacccgagaaactggatcgtatcggatcttacctggctgaacgcctttcgcgggacgtagttcggcatcggtccggctatgtcctgatcgctatggaagccttagatcaactgctgatggcatgtcatagccagtctataaagccattcgtggaaagcttcctccatatggtggctaagctactagagagcggggagccaaagcttcaagtcctggggaccaactccttcgtcaagtttgcgaacatcgaggaggacaccccaagctaccatcgacgttacgatttctttgtttctagattcagtgccatgtgtcattcctgccactccgatcccgagatcagaacagaaattcgcatcgctggcattcgcggtattcagggcgtcgtgagaaagaccgttaatgatgagctacgcgctactatttgggagccccaacacatggacaagatcgtgcctagcctgctgttcaatatgcaaaagatcgaggaagtcgacagccggataggtccaccatcatcacccagtgccacagacaaagaggagaacccggctgtactcgctgaaaactgcttcagggagttgctgggcagagcaacgttcggcaacatgaacaatgcagtccggccagtgtttgctcacctggaccaccataaattgtgggaccctaatgagttcgctgtgcactgctttaagattattatgtattccatacaggcacagtacagccatcacgtaatccaggagatccttgggcacctggatgccagaaaaaaggatgcacctcgggtccgggctggtatcatccaggtgctcttggaagcagtcgcaattgctgccaaaggatccatcggaccgacagtcctggaggtcttcaacacactgctgaagcacctcaggctgtctgtggaattcgaggcaaatgacctgcagggaggatcagttgggagcgtgaatcttaacaccagtagcaaggacaatgacgagaagattgttcaaaatgccattatccagacaatcggctttttcggaagtaacttacctgattaccagaggagcgagatcatgatgttcataatggggaaggtccccgtgtttggcacctcaactcacacactggacatatcccagttaggcgatttaggcacaaggagaattcagattatgctacttagatctctcctgatggttacatccggatataaggcgaagactatcgtgacagctctccctggcagtttcctcgatcctttgttgtctcccagtctgatggaggattacgagctgcgccagcttgtgctggaagtgatgcacaatttgatggatcgccacgacaacagggctaaactcaggggcatccgcattattccagatgttgcagatctgaagatcaagagggagaaaatatgccggcaggacacaagttttatgaaaaaaaatggccagcaactctataggcacatttatctcggatgtaaggaagaggataacgtgcagaaaaactacgaactgctgtataccagtctcgccctgataactatcgagctggcgaacgaagaagtggtgattgacttgataaggttagccatcgccttgcaggactcagccatcattaatgaggacaaccttccaatgttccacagatgcgggatcatggcactggttgctgcctatctgaacttcgtgtctcagatgatcgcagtgccagccttttgtcagcacgtctctaaagtgatcgagatcagaaccatggaggctccatattttctgcctgagcatattttccgtgataagtgcatgctgcctaagagcctggaaaagcacgagaaagacctgtacttcctgaccaacaaaatagccgagagcctagggggatcaggatacagcgtagaacggctgagcgtgccatacgtgccccaggtgactgatgaggacagattgagccgccgtaagagcatcgtggacaccgtttccatccaggttgatattctatcaaataacgtcccttccgatgacgtggtctcgaataccgaggagattacctttgaggcgttgaaaaaggccatagatacaagcggcatggaggagcaggaaaaggagaagcggcgactcgttattgaaaagttccaaaaagcccctttcgaagagatcgccgcacagtgcgaatctaaggcgaatttgctgcacgacagactagcccagatcctggaactgaccattaggcctccacccagtcctagcggcaccttgaccattacctccgggcacgcacagtaccagtcggtgcctgtatatgagatgaaattcccggatctgtgcgtctactag

SEQ ID NO: 184661 - DNA, 2466 bp, Artificial Sequence
  derived and/or modified sequence
atgaagagtagggtatgctgctgttgtagcgctctgcggccacggtataaaaggctcgtcgacaacatctttccagaggaccctaaggacgggctggtgaaaacagacatggaaaagctgacattctacgcagtgagcgctccggaaaagttggatcggattggaagctacctggctgaaaggctgagccgtgacgtggtgcggcacagaagcggatatgtgctgattgctatggaagcgctggatcagctactgatggcttgtcacagtcagagcataaaacctttcgtagaatccttcttacacatggtagccaaattgctggagtccggggagcccaaactacaggtgctgggcacaaactcattcgtgaagttcgccaatatcgaagaggatactccaagctaccacagaaggtacgacttctttgtttcccgtttctcagcaatgtgtcactcttgccacagtgacccagaaatcagaacagagattcgtattgcaggcatccggggaattcagggggttgtgaggaaaactgtcaacgacgagctgagagccacgatttgggaaccacagcacatggacaaaatcgtaccaagccttctgttcaacatgcagaagattgaggaggttgatagtcgaataggcccacccagttctccctcagccaccgataaggaagagaacccagcagtactcgctgagaactgcttcagagaactgctgggacgagctaccttcggaaacatgaacaatgccgtgcgaccagtcttcgcacacctcgaccaccacaaattgtgggaccctaatgaatttgctgttcattgcttcaagattatcatgtactccattcaagcccagtatagccatcacgttatccaagaaattttaggtcacctcgatgcgaggaaaaaagacgctccgagggtgcgagcagggatcatccaagtgttactggaagcggttgctattgctgccaaagggtcaatcggacccactgtgctcgaggtgttcaataccctcctgaaacatctgagactatccgtagaattcgaggccaacgatctgcagggcggttccgtcggctccgtgaacttgaacacctctagcaaggacaatgatgagaagattgttcagaatgctataattcaaactatcggattctttggctcaaatctgcccgactaccagcggtcggaaattatgatgtttatcatgggaaaagtgcctgtgttcggcacttctactcataccctcgacatctcccagctgggggatctaggcacgagacggatacagatcatgctcctgcgttctctgctgatggttacatcgggatacaaggccaagaccatcgtgaccgctctgcccggttctttcctggatcctcttttgtctcctagtttgatggaagactacgaactcaggcaactggttctggaagtgatgcataacttaatggacagacacgacaaccgcgctaagctgcgaggcataagaatcattcccgacgtagccgatcttaaaattaagagagagaagatttgccggcaggacaccagctttatgaaaaagaacggacagcaactctatagacacatctacctcgggtgtaaggaggaagacaatgtgcagaagaactatgaactgctctatacgtccctggccctgattacaattgagttggctaatgaggaggtcgttatagacctgatcaggttggcaatcgccttgcaggactccgcaatcatcaatgaggataatctgcctatgttccataggtgcgggataatggccctcgtggccgcttatctgaacttcgtttcacagatgatcgccgtccccgctttctgccaacacgtctctaaagtcatcgagattagaaccatggaggccccatatttcctacctgagcacatattccgagacaagtgcatgctgcctaagtccctcgagaaacatgagaaggacttatactttctaaccaataagattgcagagtcactagggggtagcggttattccgtggaacgcttgagcgtgccctatgttcctcaagtgacagacgaggaccgcctaagccgacgtaaaagtatcgtcgacacagtgagcatccaggttgacatcctctcaaataacgtcccaagcgacgacgtggtttcgaatacagaggagatcacatttgaggcgctgaagaaagccatagacacttcaggcatggaagagcaggagaaggaaaaaaggagactcgtgattgaaaaattccagaaggccccattcgaggagatagccgcacagtgcgagagcaaggcaaacctgctgcatgatcggcttgctcagatcctggaacttacgattaggccaccccctagtccatcaggcaccctgaccatcacgagtggccacgcccagtaccagtcagtccctgtgtacgaaatgaaattcccagacctgtgcgtgtattag

SEQ ID NO: 184662 - DNA, 2334 bp, Artificial Sequence
  derived and/or modified sequence
atgcccaagggggtgtgctgctgttgcagtgccctcaggccacgctacaagagactagtggacaacatattccccgaagaccctaaagacggtctggtgaaaactgatatggagaaactcacattttacgctgtctcagccccagagaaactcgaccgcattggttcctacctagccgagaggctcagccgggatgtggtcaggcaccgcagtggctacgttttaattgctatggaagcacttgatcagttactcatggcgtgtcattcccaatctatcaagccattcgtcgagagcttcttgcacatggtcgctaagcttttagaatccggggagccaaagctgcaagtccttgggacaaatagctttgtgaagttcgccaacatagaggaggatacccccagttaccatcgcagatacgattttttcgtgtcgcgattctccgccatgtgtcacagctgccattctgatccggagattcggactgaaatccgcattgccggtattcggggtatccaaggagtcgtgcggaaaaccgttaacgacgaactgcgggcaaccatttgggagcctcaacatatggacaaaatcgtacctagcctactctttaacatgcagaagattgaagaggtggattccaggatcggccctccctcgtcccccagtgctaccgataaagaagagaatcctgcagtgcttgcggaaaactgcttccgcgagctgctgggccgagccactttcggcaacatgaataatgccgtaagacccgtcttcgctcatctggaccatcacaagctgtgggacccgaatgagtttgcagtccactgctttaagatcatcatgtacagtattcaagcacagtacagccaccatgtgatacaggagatcctgggtcacctcgacgctcgtaaaaaggacgctcccagagtgagggctggcatcatccaggttttactggaagcagtggcaatcgccgctaagggatccattggccctacggtgctggaagtgttcaacaccctgcttaaacatctgcgcttaagtgtagagtttgaagcaaatgacctccagggaggaagcgtcgggtcagtgaatctgaatacatcctccaaagataacgatgaaaagatagtccagaacgctataatccagacaatagggttttttggttctaatctgccggactatcagagaagcgagattatgatgtttataatgggcaaagtaccagttttcggcacatccactcatactctggacatcagtcaattaggggacctgggtacaaggcgcattcaaataatgcttctgcgaagcctgttgatggtgacgagcggctacaaagcgaagacaatcgttactgccttgccagggtccttcctggatcccctgctttctccaagccttatggaagattacgagctcaggcagctggtgcttgaagtgatgcataacttgatggatcgtcacgacaaccgggcaaaactgcggggtatacgcattatccccgatgtggctgacttgaagatcaagagagaaaagatatgcaggcaggatacctcgtttatgaaaaaaaacggccagcagttgtacagacacatctacttaggctgcaaagaagaggataatgttcagaagaactacgaactgctgtacacttcactagccctgatcaccatcgagcttgccaacgaggaagttgttattgaccttattcgccttgctatcgcactacaggattctgctataatcaacgaagacaacctcccgatgttccaccgttgcgggattatggcccttgttgccgcttatctcaatttcgtcagccagatgattgccgtgccagctttttgccacaaaatcgctgagtctctgggaggcagtggttacagcgtggagcggctgagtgtgccctatgtcccacaggtcacagatgaggacagactgagtaggcgcaaatcaattgtggatacggtctccattcaggtcgatatcctgtccaacaacgtcccctctgacgacgtagttagtaacacagaggaaatcacttttgaggctctgaagaaggccatcgataccagcggcatggaagagcaagaaaaagaaaagcgcaggctagttatagagaagtttcagaaagcgcctttcgaggaaattgctgctcagtgcgagtcaaaggctaatctgctacacgatcggttagcacaaatcctcgagttgaccatccgaccacctcccagcccctccggcacgctgaccattacttcagggcatgctcagtatcagagtgtaccagtctatgaaatgaagttccctgatctgtgcgtctactag

SEQ ID NO: 184663 - DNA, 2358 bp, Artificial Sequence
  derived and/or modified sequence
atggagaagctcacattttacgctgtgtcggctccagaaaagctggacagaataggttcttaccttgccgaacgcctgagccgggacgtggtcagacataggagcggctatgtgctcatagcaatggaagccttggaccagctgttaatggcttgtcattctcagtcgatcaagccttttgtggaaagttttctgcacatggtggccaagttgctcgagagtggtgaacccaaactgcaagtgcttggcactaattcgtttgtgaaattcgcaaatatagaggaagatacccctagttatcatcgcaggtacgacttctttgtgtccaggttctctgccatgtgccacagttgtcatagtgaccctgagattagaaccgagatccggattgctggaatcagggggatacaaggcgtggtgcgcaagacagttaacgacgagttacgcgctaccatctgggagccccagcatatggataaaatagtacccagcctgctcttcaatatgcagaagattgaggaagtcgacagccgtatcgggcctcctagttcaccatccgcaacagacaaagaagagaaccctgccgttctggcggagaattgtttccgggaactgcttggtcgggctaccttcgggaacatgaacaatgctgtgcgaccagtttttgctcatctagaccaccacaaactgtgggatcctaacgaatttgctgtccactgcttcaaaatcataatgtactccattcaggcccagtacagccatcacgtgatacaggaaatcctggggcacctagacgcccgaaagaaggacgccccaagagttcgcgcaggcataattcaggtcctgctggaggctgtcgctatcgcagcaaagggcagtattggcccaactgtgttagaagtgtttaacaccttgctcaaacatctcagactgagcgtggagttcgaggccaacgacctgcaggggggatccgtcggcagcgtaaacctgaataccagttccaaggataatgatgagaaaattgtgcagaatgctataatccagactatcggttttttcggctctaaccttcccgactaccaacgatcggaaattatgatgtttatcatgggaaaggtgccagtgttcggaacctcgacacatactctagacatatctcaactcggagacttgggtactaggagaatacagatcatgctgctgcgcagtttgcttatggtgacgtccggctataaggccaaaaccatcgtgacggcactacccggatccttcttagaccccttgctgtctccaagccttatggaagactacgagctgagacagctggtgctcgaagtgatgcacaatctgatggatcggcacgataaccgcgcaaagttacggggtattcgcataatacctgatgttgccgatttgaagatcaaaagggaaaaaatctgtaggcaagatacgagcttcatgaagaaaaacgggcaacagctttaccgccacatctacctgggatgcaaagaggaggataacgtgcagaagaactacgaactattgtatacgagcttggcccttattacaatagagttagctaatgaggaagtggtaatcgacctcatccgtctagccatcgctcttcaggacagtgccatcataaatgaggataacctacctatgttccaccgttgtggcataatggcactcgtggccgcatatcttaactttgtgtctcagatgatcgccgtgccagctttctgccagcacgtgtctaaggtgatagaaatcagaaccatggaagcgccatacttcctgcccgagcatatattcagagacaagtgcatgctacctaagtcactggaaaagcatgagaaagatctgtacttcttgactaataagatagcggaaagtctgggaggatcaggttacagcgttgagcgcctgagcgttccctacgttccacaggtcaccgatgaggatcgtctgtctcgcagaaagagtatcgttgatacagtgtctatacaggtggacatcctttccaacaatgtgccatccgatgacgtcgtctctaacaccgaggagataacgttcgaggcattgaaaaaggccatcgatacatcaggaatggaggaacaagagaaagagaaacgcaggttggtaatcgaaaagttccagaaggccccatttgaagagatcgcggcacagtgtgagtccaaggccaacttactccatgataggctggctcaaatcctagagctcaccattcgacccccaccctctccatctgggacactgaccataacttcaggccacgcccagtaccagtccgtgccagtctacgagatgaagtttccagacctgtgcgtctactag

SEQ ID NO: 184664 - DNA, 2466 bp, Artificial Sequence
  derived and/or modified sequence
atgcccaccagagtgtgctgctgctgcagcgccctgagacccagatacaagagactggtggacaacatcttccccgaggaccccaaggacggcctggtgaagaccgacatggagaagctgaccttctacgccgtgagcgcccccgagaagctggacagaatcggcagctacctggccgagagactgagcagagacgtggtgagacacagaagcggctacgtgctgatcgccatggaggccctggaccagctgctgatggcctgccacagccagagcatcaagcccttcgtggagagcttcctgcacatggtggccaagctgctggagagcggcgagcccaagctgcaggtgctgggcaccaacagcttcgtgaagttcgccaacatcgaggaggacacccccagctaccacagaagatacgacttcttcgtgagcagattcagcgccatgtgccacagctgccacagcgaccccgagatcagaaccgagatcagaatcgccggcatcagaggcatccagggcgtggtgagaaagaccgtgaacgacgagctgagagccaccatctgggagccccagcacatggacaagatcgtgcccagcctgctgttcaacatgcagaagatcgaggaggtggacagcagaatcggcccccccagcagccccagcgccaccgacaaggaggagaaccccgccgtgctggccgagaactgcttcagagagctgctgggcagagccaccttcggcaacatgaacaacgccgtgagacccgtgttcgcccacctggaccaccacaagctgtgggaccccaacgagttcgccgtgcactgcttcaagatcatcatgtacagcatccaggcccagtacagccaccacgtgatccaggagatcctgggccacctggacgccagaaagaaggacgcccccagagtgagagccggcatcatccaggtgctgctggaggccgtggccatcgccgccaagggcagcatcggccccaccgtgctggaggtgttcaacaccctgctgaagcacctgagactgagcgtggagttcgaggccaacgacctgcagggcggcagcgtgggcagcgtgaacctgaacaccagcagcaaggacaacgacgagaagatcgtgcagaacgccatcatccagaccatcggcttcttcggcagcaacctgcccgactaccagagaagcgagatcatgatgttcatcatgggcaaggtgcccgtgttcggcaccagcacccacaccctggacatcagccagctgggcgacctgggcaccagaagaatccagatcatgctgctgagaagcctgctgatggtgaccagcggctacaaggccaagaccatcgtgaccgccctgcccggcagcttcctggaccccctgctgagccccagcctgatggaggactacgagctgagacagctggtgctggaggtgatgcacaacctgatggacagacacgacaacagagccaagctgagaggcatcagaatcatccccgacgtggccgacctgaagatcaagagagagaagatctgcagacaggacaccagcttcatgaagaagaacggccagcagctgtacagacacatctacctgggctgcaaggaggaggacaacgtgcagaagaactacgagctgctgtacaccagcctggccctgatcaccatcgagctggccaacgaggaggtggtgatcgacctgatcagactggccatcgccctgcaggacagcgccatcatcaacgaggacaacctgcccatgttccacagatgcggcatcatggccctggtggccgcctacctgaacttcgtgagccagatgatcgccgtgcccgccttctgccagcacgtgagcaaggtgatcgagatcagaaccatggaggccccctacttcctgcccgagcacatcttcagagacaagtgcatgctgcccaagagcctggagaagcacgagaaggacctgtacttcctgaccaacaagatcgccgagagcctgggcggcagcggctacagcgtggagagactgagcgtgccctacgtgccccaggtgaccgacgaggacagactgagcagaagaaagagcatcgtggacaccgtgagcatccaggtggacatcctgagcaacaacgtgcccagcgacgacgtggtgagcaacaccgaggagatcaccttcgaggccctgaagaaggccatcgacaccagcggcatggaggagcaggagaaggagaagagaagactggtgatcgagaagttccagaaggcccccttcgaggagatcgccgcccagtgcgagagcaaggccaacctgctgcacgacagactggcccagatcctggagctgaccatcagacccccccccagccccagcggcaccctgaccatcaccagcggccacgcccagtaccagagcgtgcccgtgtacgagatgaagttccccgacctgtgcgtgtactag

SEQ ID NO: 184665 - DNA, 2466 bp, Artificial Sequence
  derived and/or modified sequence
atgaagagcagagtgtgctgctgctgcagcgccctgagacccagatacaagagactggtggacaacatcttccccgaggaccccaaggacggcctggtgaagaccgacatggagaagctgaccttctacgccgtgagcgcccccgagaagctggacagaatcggcagctacctggccgagagactgagcagagacgtggtgagacacagaagcggctacgtgctgatcgccatggaggccctggaccagctgctgatggcctgccacagccagagcatcaagcccttcgtggagagcttcctgcacatggtggccaagctgctggagagcggcgagcccaagctgcaggtgctgggcaccaacagcttcgtgaagttcgccaacatcgaggaggacacccccagctaccacagaagatacgacttcttcgtgagcagattcagcgccatgtgccacagctgccacagcgaccccgagatcagaaccgagatcagaatcgccggcatcagaggcatccagggcgtggtgagaaagaccgtgaacgacgagctgagagccaccatctgggagccccagcacatggacaagatcgtgcccagcctgctgttcaacatgcagaagatcgaggaggtggacagcagaatcggcccccccagcagccccagcgccaccgacaaggaggagaaccccgccgtgctggccgagaactgcttcagagagctgctgggcagagccaccttcggcaacatgaacaacgccgtgagacccgtgttcgcccacctggaccaccacaagctgtgggaccccaacgagttcgccgtgcactgcttcaagatcatcatgtacagcatccaggcccagtacagccaccacgtgatccaggagatcctgggccacctggacgccagaaagaaggacgcccccagagtgagagccggcatcatccaggtgctgctggaggccgtggccatcgccgccaagggcagcatcggccccaccgtgctggaggtgttcaacaccctgctgaagcacctgagactgagcgtggagttcgaggccaacgacctgcagggcggcagcgtgggcagcgtgaacctgaacaccagcagcaaggacaacgacgagaagatcgtgcagaacgccatcatccagaccatcggcttcttcggcagcaacctgcccgactaccagagaagcgagatcatgatgttcatcatgggcaaggtgcccgtgttcggcaccagcacccacaccctggacatcagccagctgggcgacctgggcaccagaagaatccagatcatgctgctgagaagcctgctgatggtgaccagcggctacaaggccaagaccatcgtgaccgccctgcccggcagcttcctggaccccctgctgagccccagcctgatggaggactacgagctgagacagctggtgctggaggtgatgcacaacctgatggacagacacgacaacagagccaagctgagaggcatcagaatcatccccgacgtggccgacctgaagatcaagagagagaagatctgcagacaggacaccagcttcatgaagaagaacggccagcagctgtacagacacatctacctgggctgcaaggaggaggacaacgtgcagaagaactacgagctgctgtacaccagcctggccctgatcaccatcgagctggccaacgaggaggtggtgatcgacctgatcagactggccatcgccctgcaggacagcgccatcatcaacgaggacaacctgcccatgttccacagatgcggcatcatggccctggtggccgcctacctgaacttcgtgagccagatgatcgccgtgcccgccttctgccagcacgtgagcaaggtgatcgagatcagaaccatggaggccccctacttcctgcccgagcacatcttcagagacaagtgcatgctgcccaagagcctggagaagcacgagaaggacctgtacttcctgaccaacaagatcgccgagagcctgggcggcagcggctacagcgtggagagactgagcgtgccctacgtgccccaggtgaccgacgaggacagactgagcagaagaaagagcatcgtggacaccgtgagcatccaggtggacatcctgagcaacaacgtgcccagcgacgacgtggtgagcaacaccgaggagatcaccttcgaggccctgaagaaggccatcgacaccagcggcatggaggagcaggagaaggagaagagaagactggtgatcgagaagttccagaaggcccccttcgaggagatcgccgcccagtgcgagagcaaggccaacctgctgcacgacagactggcccagatcctggagctgaccatcagacccccccccagccccagcggcaccctgaccatcaccagcggccacgcccagtaccagagcgtgcccgtgtacgagatgaagttccccgacctgtgcgtgtactag

SEQ ID NO: 184666 - DNA, 2334 bp, Artificial Sequence
  derived and/or modified sequence
atgcccaagggcgtgtgctgctgctgcagcgccctgagacccagatacaagagactggtggacaacatcttccccgaggaccccaaggacggcctggtgaagaccgacatggagaagctgaccttctacgccgtgagcgcccccgagaagctggacagaatcggcagctacctggccgagagactgagcagagacgtggtgagacacagaagcggctacgtgctgatcgccatggaggccctggaccagctgctgatggcctgccacagccagagcatcaagcccttcgtggagagcttcctgcacatggtggccaagctgctggagagcggcgagcccaagctgcaggtgctgggcaccaacagcttcgtgaagttcgccaacatcgaggaggacacccccagctaccacagaagatacgacttcttcgtgagcagattcagcgccatgtgccacagctgccacagcgaccccgagatcagaaccgagatcagaatcgccggcatcagaggcatccagggcgtggtgagaaagaccgtgaacgacgagctgagagccaccatctgggagccccagcacatggacaagatcgtgcccagcctgctgttcaacatgcagaagatcgaggaggtggacagcagaatcggcccccccagcagccccagcgccaccgacaaggaggagaaccccgccgtgctggccgagaactgcttcagagagctgctgggcagagccaccttcggcaacatgaacaacgccgtgagacccgtgttcgcccacctggaccaccacaagctgtgggaccccaacgagttcgccgtgcactgcttcaagatcatcatgtacagcatccaggcccagtacagccaccacgtgatccaggagatcctgggccacctggacgccagaaagaaggacgcccccagagtgagagccggcatcatccaggtgctgctggaggccgtggccatcgccgccaagggcagcatcggccccaccgtgctggaggtgttcaacaccctgctgaagcacctgagactgagcgtggagttcgaggccaacgacctgcagggcggcagcgtgggcagcgtgaacctgaacaccagcagcaaggacaacgacgagaagatcgtgcagaacgccatcatccagaccatcggcttcttcggcagcaacctgcccgactaccagagaagcgagatcatgatgttcatcatgggcaaggtgcccgtgttcggcaccagcacccacaccctggacatcagccagctgggcgacctgggcaccagaagaatccagatcatgctgctgagaagcctgctgatggtgaccagcggctacaaggccaagaccatcgtgaccgccctgcccggcagcttcctggaccccctgctgagccccagcctgatggaggactacgagctgagacagctggtgctggaggtgatgcacaacctgatggacagacacgacaacagagccaagctgagaggcatcagaatcatccccgacgtggccgacctgaagatcaagagagagaagatctgcagacaggacaccagcttcatgaagaagaacggccagcagctgtacagacacatctacctgggctgcaaggaggaggacaacgtgcagaagaactacgagctgctgtacaccagcctggccctgatcaccatcgagctggccaacgaggaggtggtgatcgacctgatcagactggccatcgccctgcaggacagcgccatcatcaacgaggacaacctgcccatgttccacagatgcggcatcatggccctggtggccgcctacctgaacttcgtgagccagatgatcgccgtgcccgccttctgccacaagatcgccgagagcctgggcggcagcggctacagcgtggagagactgagcgtgccctacgtgccccaggtgaccgacgaggacagactgagcagaagaaagagcatcgtggacaccgtgagcatccaggtggacatcctgagcaacaacgtgcccagcgacgacgtggtgagcaacaccgaggagatcaccttcgaggccctgaagaaggccatcgacaccagcggcatggaggagcaggagaaggagaagagaagactggtgatcgagaagttccagaaggcccccttcgaggagatcgccgcccagtgcgagagcaaggccaacctgctgcacgacagactggcccagatcctggagctgaccatcagacccccccccagccccagcggcaccctgaccatcaccagcggccacgcccagtaccagagcgtgcccgtgtacgagatgaagttccccgacctgtgcgtgtactag

SEQ ID NO: 184667 - DNA, 2358 bp, Artificial Sequence
  derived and/or modified sequence
atggagaagctgaccttctacgccgtgagcgcccccgagaagctggacagaatcggcagctacctggccgagagactgagcagagacgtggtgagacacagaagcggctacgtgctgatcgccatggaggccctggaccagctgctgatggcctgccacagccagagcatcaagcccttcgtggagagcttcctgcacatggtggccaagctgctggagagcggcgagcccaagctgcaggtgctgggcaccaacagcttcgtgaagttcgccaacatcgaggaggacacccccagctaccacagaagatacgacttcttcgtgagcagattcagcgccatgtgccacagctgccacagcgaccccgagatcagaaccgagatcagaatcgccggcatcagaggcatccagggcgtggtgagaaagaccgtgaacgacgagctgagagccaccatctgggagccccagcacatggacaagatcgtgcccagcctgctgttcaacatgcagaagatcgaggaggtggacagcagaatcggcccccccagcagccccagcgccaccgacaaggaggagaaccccgccgtgctggccgagaactgcttcagagagctgctgggcagagccaccttcggcaacatgaacaacgccgtgagacccgtgttcgcccacctggaccaccacaagctgtgggaccccaacgagttcgccgtgcactgcttcaagatcatcatgtacagcatccaggcccagtacagccaccacgtgatccaggagatcctgggccacctggacgccagaaagaaggacgcccccagagtgagagccggcatcatccaggtgctgctggaggccgtggccatcgccgccaagggcagcatcggccccaccgtgctggaggtgttcaacaccctgctgaagcacctgagactgagcgtggagttcgaggccaacgacctgcagggcggcagcgtgggcagcgtgaacctgaacaccagcagcaaggacaacgacgagaagatcgtgcagaacgccatcatccagaccatcggcttcttcggcagcaacctgcccgactaccagagaagcgagatcatgatgttcatcatgggcaaggtgcccgtgttcggcaccagcacccacaccctggacatcagccagctgggcgacctgggcaccagaagaatccagatcatgctgctgagaagcctgctgatggtgaccagcggctacaaggccaagaccatcgtgaccgccctgcccggcagcttcctggaccccctgctgagccccagcctgatggaggactacgagctgagacagctggtgctggaggtgatgcacaacctgatggacagacacgacaacagagccaagctgagaggcatcagaatcatccccgacgtggccgacctgaagatcaagagagagaagatctgcagacaggacaccagcttcatgaagaagaacggccagcagctgtacagacacatctacctgggctgcaaggaggaggacaacgtgcagaagaactacgagctgctgtacaccagcctggccctgatcaccatcgagctggccaacgaggaggtggtgatcgacctgatcagactggccatcgccctgcaggacagcgccatcatcaacgaggacaacctgcccatgttccacagatgcggcatcatggccctggtggccgcctacctgaacttcgtgagccagatgatcgccgtgcccgccttctgccagcacgtgagcaaggtgatcgagatcagaaccatggaggccccctacttcctgcccgagcacatcttcagagacaagtgcatgctgcccaagagcctggagaagcacgagaaggacctgtacttcctgaccaacaagatcgccgagagcctgggcggcagcggctacagcgtggagagactgagcgtgccctacgtgccccaggtgaccgacgaggacagactgagcagaagaaagagcatcgtggacaccgtgagcatccaggtggacatcctgagcaacaacgtgcccagcgacgacgtggtgagcaacaccgaggagatcaccttcgaggccctgaagaaggccatcgacaccagcggcatggaggagcaggagaaggagaagagaagactggtgatcgagaagttccagaaggcccccttcgaggagatcgccgcccagtgcgagagcaaggccaacctgctgcacgacagactggcccagatcctggagctgaccatcagacccccccccagccccagcggcaccctgaccatcaccagcggccacgcccagtaccagagcgtgcccgtgtacgagatgaagttccccgacctgtgcgtgtactag

SEQ ID NO: 184668 - DNA, 5438 bp, Artificial Sequence
  derived and/or modified sequence
gggtcgtccgtcgcgccgcccggcgaggagtgggctggcggcggtagctgtcgcccgcttggttgcgtgaccgcggggtccgcgtccgctccctccacccttcgcccttcgcccttcgcctcgttccggcctccgcggcccagcaacggccgtcatggtgccgtcggcgctccctgcgcggccccgctgagcctcggtgcggcggcgagcgcggtcgagatcgccatgcctacccgagtatgctgctgctgttccgctttgcgtcctcgctacaaacgcctggtggacaacatattccctgaagatccaaaagatggccttgtgaaaactgatatggagaaattgacattttatgcagtatctgctccagagaaactggatcgaattggttcttacctggcagaaaggttgagcagggatgttgtcagacatcgttctgggtatgttttgattgctatggaggcactggaccaacttctcatggcttgccattctcaaagcattaagccatttgtagaaagctttcttcatatggtggcaaagctgctggaatcgggggaaccaaagcttcaagttcttggaacaaattcttttgtcaaatttgcaaatattgaagaagacacaccatcctatcacagacgttatgacttttttgtgtctcgattcagtgccatgtgccattcctgtcatagtgatccagaaatacgaacagagatacgaattgctggaattagaggtattcaaggtgtggttcgcaaaacagtcaacgatgaacttcgggccaccatttgggaacctcagcatatggataagattgttccatccctcctgtttaacatgcaaaagatagaagaagttgacagtcgcataggccctccttcttctccttctgcaactgacaaagaagagaatcctgctgtgctggctgaaaactgtttcagagaactgctgggtcgagcaacttttgggaatatgaataatgctgttagaccagtttttgcgcatttagatcatcacaaactgtgggatcccaatgaatttgcagttcactgctttaaaattataatgtattccattcaggctcagtattctcaccatgtgatccaggagattctaggacaccttgatgctcgtaaaaaagatgctccccgggttcgagcaggtattattcaggttctgttagaggctgttgccattgctgctaaaggttccataggtccgacagtgctggaagtcttcaatacccttttgaaacatctgcgtctcagcgttgaattcgaagcaaatgatttacaggggggatctgtaggcagtgtcaacttaaatacaagttccaaagacaatgatgagaagattgtgcagaatgctatcatccaaacaataggattttttggaagtaacctaccagattatcagaggtcagaaatcatgatgttcattatggggaaagtacctgtctttggaacatctacccatactttggatatcagtcaactaggggatttgggaaccaggagaattcagataatgttgctgagatctttgcttatggtgacctctggatataaagcgaagacgattgttactgcactgccagggtctttcctggatcctttgttatcaccatctctcatggaggactacgaactgagacagttggtcttggaagtaatgcataatctcatggatcgtcatgacaatagggcaaagcttcgagggatcagaataataccggatgtagctgacctaaagataaaaagagaaaaaatttgcagacaagacacaagtttcatgaaaaagaatgggcaacagctgtatcggcacatatatttgggttgtaaagaggaagacaacgttcagaaaaactatgaactactttatacttctcttgctcttataactattgaactggctaatgaagaagtagttattgatctcattcgactggccattgctttacaggacagtgcaattatcaatgaggataatttgccaatgttccatcgttgtggaatcatggcactggttgcagcatacctcaactttgtaagtcagatgatagctgtccctgcattttgccagcatgttagcaaggttattgaaattcgaactatggaagccccttattttctaccagagcatatcttcagagataagtgcatgcttccaaaatctttagagaagcatgaaaaagatttgtactttctgaccaacaagattgcagagtcgctaggtggaagtggatatagtgttgagagattgtcagttccgtatgtaccacaagtaacagatgaagatcgactttctagaagaaaaagcattgtggacaccgtatccattcaggtggatattttatccaacaatgttccttctgatgatgtggttagtaacactgaagaaatcacttttgaagcattgaagaaagcaattgataccagtggaatggaagaacaggaaaaggaaaagaggcgtcttgtgatagagaaatttcagaaagcaccttttgaagaaatagcagcacagtgtgaatccaaagcaaatttgcttcatgatagacttgcccaaatattggaactcaccatacgtcctcctcccagtccatcaggaacactgaccattacttctgggcatgcccaataccaatctgtcccagtctatgagatgaagtttccagatctgtgtgtgtactgatcggcgcatgaagacctcaggatatgatttgtaaagcctaaaaattaaggccaagctgagctttcagggtttacttaatgtgtattaacatacttcttgaaaataatgatggaacatatctttaaccaaatgtttggcataccatattagaagttttggagctatatataatttcgagtactttcaaagatagatttatgccatgttaatttgctttgaggttcctgttgcctttttaagttgaacatgttttggtttcactttattccactgttaagtagtatgttttaaacttttcacaaatgtaatgttttttaaaaagtaagccttcagaggattgaaactgtataaattgtttatctcttaaacatctacacagccgcttagatgtagaatttttgttgttgttttctgcaaaggcagatacatttaaatatattcctagtcctgggactgcaaaactgttcggtggctttttgtccccatgctttagataagctgggataggcaccttgctattcagttactataataatatgtgataggcattcctcatcttcttcacaataataggacatctgttgaatagcattcctcgaatataaccctaaaaacgccatactttaaattgtctggttcttgtaatattgtgtttcctgccaagagtttgaccattctgcttgagaagtgtagagcttactcttggagtaccaaactgtgcaatatttttacatcataagatgtattagtttacaggctgtgctttgaaattatagtagtattttgctgtggctccattaattaaatgagatatatatttagtgcagaaaaaagacatttaaaacagctattagttcacctgtgaagagtctgtacattttgatttctattaagagcacatttatttacatttgtatattattttaaatcctcatagtcaaaaaattctccagatggacttttaatttgtaagatttgaactgtgacttgtatacatctgtttagaatcaattatatttgaaaagctgcctgtgttttaacagtcaagtgtgctaaagtttgtcaatttaagctgcttttgatttcagctaccaagatcacaggtgcactctacacataacactgacagacccataacattacatacatcttagtgaattctatcacatggtaaaatgaacagctttctttgtaactcataaaattctcttaggacatttttataaagtcacctgtttatagttctatcttttcagattccatttctttttacataaaacagcatacatatcaaaaactgtagcctagaatacagtttaatttttggcttttgtttttgtttaaaaaattgcagtgaagaatgggatgtttgtgtttatggctatttgggcacctttagtagaaacagacaaaagtaaggaaacgataataggacaagcatacttgaaaatttctgaatacttaaacaaaagcgcaacatcttgaaaaccagtctagtcattgaaacctatgaaatgacactgaaagatcctgggctgcttcttaaataagtagatcagcaagacttgtttcagagtgacagtggagtcgttaccgctggaggactaaagggccctgtggcagctgtcactggaactttgcctcttgatcaggaaaaatgcttcaccagtccgtaaagccaagttgtatttttttaattgcccttttttccttctgtatttttaaagaaggatgttaatttttgactatatattttaaaaaaatctaagcagggggacatgcaaaaacaatcatcatccacttggatgtcattttatagattaacactgtgtgcttttgtatggaaaaaatatatataatttaatagtataaaaaataaaatatatattcatttgcacttacgtgaaacacaaactttgctctacaaaatttcgtgtttcttagtgattttaaaatgcatgtattgcatgtaaaggaaaaccattacaattaatgtttatcacacctttatcttggtctttgttgatttgggttttgttggggtttttgttactgtttttaaattacagtaggcttctatatatcctggatttctgaactggtcttgttgacaaggattcccaagaaatggatcttttcactggctgactctcccatatctgcaagagattctgcaggaactgggtgtgcacacggtgttgtagccagttcaggtactgaatatttaggatttggtgaagttcactgtattgctatatttttgtagataaataaaactcaataaattgttaatcattctctttttgctgtatagaattgcttatatcactctttctttcatgacattggttaacatttaaatgttcctcctgtacttgtgttgtctgtgaccgcttatagagttttattgttattggtgtttacctgaatacctatgcgtacacacacacatatttccttaatacttctgaactcattatcttttagaataataatactactacactttaccagcaattaacttctccctacccaaaatgtttttcttcctgtctgaaaatggaactaatttgtcttattcgtgcttatatctgtattaaatgcaataaagttagtttttgaaatgtaaaaattcactgtgcaattcatatgtcagcaataaaacatagattatttgtatataagttcatttttatagctattgttacatttaattaaatttattcaatatttgcttaaattaaaaa

SEQ ID NO: 184669 - DNA, 4776 bp, Artificial Sequence
  derived and/or modified sequence
atgaaatctagagtatgctgctgctgttccgctttgcgtcctcgctacaaacgcctggtggacaacatattccctgaagatccaaaagatggccttgtgaaaactgatatggagaaattgacattttatgcagtatctgctccagagaaactggatcgaattggttcttacctggcagaaaggttgagcagggatgttgtcagacatcgttctgggtatgttttgattgctatggaggcactggaccaacttctcatggcttgccattctcaaagcattaagccatttgtagaaagctttcttcatatggtggcaaagctgctggaatcgggggaaccaaagcttcaagttcttggaacaaattcttttgtcaaatttgcaaatattgaagaagacacaccatcctatcacagacgttatgacttttttgtgtctcgattcagtgccatgtgccattcctgtcatagtgatccagaaatacgaacagagatacgaattgctggaattagaggtattcaaggtgtggttcgcaaaacagtcaacgatgaacttcgggccaccatttgggaacctcagcatatggataagattgttccatccctcctgtttaacatgcaaaagatagaagaagttgacagtcgcataggccctccttcttctccttctgcaactgacaaagaagagaatcctgctgtgctggctgaaaactgtttcagagaactgctgggtcgagcaacttttgggaatatgaataatgctgttagaccagtttttgcgcatttagatcatcacaaactgtgggatcccaatgaatttgcagttcactgctttaaaattataatgtattccattcaggctcagtattctcaccatgtgatccaggagattctaggacaccttgatgctcgtaaaaaagatgctccccgggttcgagcaggtattattcaggttctgttagaggctgttgccattgctgctaaaggttccataggtccgacagtgctggaagtcttcaatacccttttgaaacatctgcgtctcagcgttgaattcgaagcaaatgatttacaggggggatctgtaggcagtgtcaacttaaatacaagttccaaagacaatgatgagaagattgtgcagaatgctatcatccaaacaataggattttttggaagtaacctaccagattatcagaggtcagaaatcatgatgttcattatggggaaagtacctgtctttggaacatctacccatactttggatatcagtcaactaggggatttgggaaccaggagaattcagataatgttgctgagatctttgcttatggtgacctctggatataaagcgaagacgattgttactgcactgccagggtctttcctggatcctttgttatcaccatctctcatggaggactacgaactgagacagttggtcttggaagtaatgcataatctcatggatcgtcatgacaatagggcaaagcttcgagggatcagaataataccggatgtagctgacctaaagataaaaagagaaaaaatttgcagacaagacacaagtttcatgaaaaagaatgggcaacagctgtatcggcacatatatttgggttgtaaagaggaagacaacgttcagaaaaactatgaactactttatacttctcttgctcttataactattgaactggctaatgaagaagtagttattgatctcattcgactggccattgctttacaggacagtgcaattatcaatgaggataatttgccaatgttccatcgttgtggaatcatggcactggttgcagcatacctcaactttgtaagtcagatgatagctgtccctgcattttgccagcatgttagcaaggttattgaaattcgaactatggaagccccttattttctaccagagcatatcttcagagataagtgcatgcttccaaaatctttagagaagcatgaaaaagatttgtactttctgaccaacaagattgcagagtcgctaggtggaagtggatatagtgttgagagattgtcagttccgtatgtaccacaagtaacagatgaagatcgactttctagaagaaaaagcattgtggacaccgtatccattcaggtggatattttatccaacaatgttccttctgatgatgtggttagtaacactgaagaaatcacttttgaagcattgaagaaagcaattgataccagtggaatggaagaacaggaaaaggaaaagaggcgtcttgtgatagagaaatttcagaaagcaccttttgaagaaatagcagcacagtgtgaatccaaagcaaatttgcttcatgatagacttgcccaaatattggaactcaccatacgtcctcctcccagtccatcaggaacactgaccattacttctgggcatgcccaataccaatctgtcccagtctatgagatgaagtttccagatctgtgtgtgtactgatcggcgcatgaagacctcaggatatgatttgtaaagcctaaaaattaaggccaagctgagctttcagggtttacttaatgtgtattaacatacttcttgaaaataatgatggaacatatctttaaccaaatgtttggcataccatattagaagttttggagctatatataatttcgagtactttcaaagatagatttatgccatgttaatttgctttgaggttcctgttgcctttttaagttgaacatgttttggtttcactttattccactgttaagtagtatgttttaaacttttcacaaatgtaatgttttttaaaaagtaagccttcagaggattgaaactgtataaattgtttatctcttaaacatctacacagccgcttagatgtagaatttttgttgttgttttctgcaaaggcagatacatttaaatatattcctagtcctgggactgcaaaactgttcggtggctttttgtccccatgctttagataagctgggataggcaccttgctattcagttactataataatatgtgataggcattcctcatcttcttcacaataataggacatctgttgaatagcattcctcgaatataaccctaaaaacgccatactttaaattgtctggttcttgtaatattgtgtttcctgccaagagtttgaccattctgcttgagaagtgtagagcttactcttggagtaccaaactgtgcaatatttttacatcataagatgtattagtttacaggctgtgctttgaaattatagtagtattttgctgtggctccattaattaaatgagatatatatttagtgcagaaaaaagacatttaaaacagctattagttcacctgtgaagagtctgtacattttgatttctattaagagcacatttatttacatttgtatattattttaaatcctcatagtcaaaaaattctccagatggacttttaatttgtaagatttgaactgtgacttgtatacatctgtttagaatcaattatatttgaaaagctgcctgtgttttaacagtcaagtgtgctaaagtttgtcaatttaagctgcttttgatttcagctaccaagatcacaggtgcactctacacataacactgacagacccataacattacatacatcttagtgaattctatcacatggtaaaatgaacagctttctttgtaactcataaaattctcttaggacatttttataaagtcacctgtttatagttctatcttttcagattccatttctttttacataaaacagcatacatatcaaaaactgtagcctagaatacagtttaatttttggcttttgtttttgtttaaaaaattgcagtgaagaatgggatgtttgtgtttatggctatttgggcacctttagtagaaacagacaaaagtaaggaaacgataataggacaagcatacttgaaaatttctgaatacttaaacaaaagcgcaacatcttgaaaaccagtctagtcattgaaacctatgaaatgacactgaaagatcctgggctgcttcttaaataagtagatcagcaagacttgtttcagagtgacagtggagtcgttaccgctggaggactaaagggccctgtggcagctgtcactggaactttgcctcttgatcaggaaaaatgcttcaccagtccgtaaagccaagttgtatttttttaattgcccttttttccttctgtatttttaaagaaggatgttaatttttgactatatattttaaaaaaatctaagcagggggacatgcaaaaacaatcatcatccacttggatgtcattttatagattaacactgtgtgcttttgtatggaaaaaatatatataatttaatagtataaaaaataaaatatatattcatttgcacttacgtgaaacacaaactttgctctacaaaatttcgtgtttcttagtgattttaaaatgcatgtattgcatgtaaaggaaaaccattacaattaatgtttatcacacctttatcttggtctttgttgatttgggttttgttggggtttttgttactgtttttaaattacagtaggcttctatatatcctggatttctgaactggtcttgttgacaaggattcccaagaaatggatcttttcactggctgactctcccatatctgcaagagattctgcaggaactgggtgtgcacacggtgttgtagccagttcaggtactgaatatttaggatttggtgaagttcactgtattgctatatttttgtagataaataaaactcaataaattgttaatcattctctttttgctgt

SEQ ID NO: 184670 - DNA, 4644 bp, Artificial Sequence
  derived and/or modified sequence
atgccaaaaggagtatgctgctgctgttccgctttgcgtcctcgctacaaacgcctggtggacaacatattccctgaagatccaaaagatggccttgtgaaaactgatatggagaaattgacattttatgcagtatctgctccagagaaactggatcgaattggttcttacctggcagaaaggttgagcagggatgttgtcagacatcgttctgggtatgttttgattgctatggaggcactggaccaacttctcatggcttgccattctcaaagcattaagccatttgtagaaagctttcttcatatggtggcaaagctgctggaatcgggggaaccaaagcttcaagttcttggaacaaattcttttgtcaaatttgcaaatattgaagaagacacaccatcctatcacagacgttatgacttttttgtgtctcgattcagtgccatgtgccattcctgtcatagtgatccagaaatacgaacagagatacgaattgctggaattagaggtattcaaggtgtggttcgcaaaacagtcaacgatgaacttcgggccaccatttgggaacctcagcatatggataagattgttccatccctcctgtttaacatgcaaaagatagaagaagttgacagtcgcataggccctccttcttctccttctgcaactgacaaagaagagaatcctgctgtgctggctgaaaactgtttcagagaactgctgggtcgagcaacttttgggaatatgaataatgctgttagaccagtttttgcgcatttagatcatcacaaactgtgggatcccaatgaatttgcagttcactgctttaaaattataatgtattccattcaggctcagtattctcaccatgtgatccaggagattctaggacaccttgatgctcgtaaaaaagatgctccccgggttcgagcaggtattattcaggttctgttagaggctgttgccattgctgctaaaggttccataggtccgacagtgctggaagtcttcaatacccttttgaaacatctgcgtctcagcgttgaattcgaagcaaatgatttacaggggggatctgtaggcagtgtcaacttaaatacaagttccaaagacaatgatgagaagattgtgcagaatgctatcatccaaacaataggattttttggaagtaacctaccagattatcagaggtcagaaatcatgatgttcattatggggaaagtacctgtctttggaacatctacccatactttggatatcagtcaactaggggatttgggaaccaggagaattcagataatgttgctgagatctttgcttatggtgacctctggatataaagcgaagacgattgttactgcactgccagggtctttcctggatcctttgttatcaccatctctcatggaggactacgaactgagacagttggtcttggaagtaatgcataatctcatggatcgtcatgacaatagggcaaagcttcgagggatcagaataataccggatgtagctgacctaaagataaaaagagaaaaaatttgcagacaagacacaagtttcatgaaaaagaatgggcaacagctgtatcggcacatatatttgggttgtaaagaggaagacaacgttcagaaaaactatgaactactttatacttctcttgctcttataactattgaactggctaatgaagaagtagttattgatctcattcgactggccattgctttacaggacagtgcaattatcaatgaggataatttgccaatgttccatcgttgtggaatcatggcactggttgcagcatacctcaactttgtaagtcagatgatagctgtccctgcattttgccacaagattgcagagtcgctaggtggaagtggatatagtgttgagagattgtcagttccgtatgtaccacaagtaacagatgaagatcgactttctagaagaaaaagcattgtggacaccgtatccattcaggtggatattttatccaacaatgttccttctgatgatgtggttagtaacactgaagaaatcacttttgaagcattgaagaaagcaattgataccagtggaatggaagaacaggaaaaggaaaagaggcgtcttgtgatagagaaatttcagaaagcaccttttgaagaaatagcagcacagtgtgaatccaaagcaaatttgcttcatgatagacttgcccaaatattggaactcaccatacgtcctcctcccagtccatcaggaacactgaccattacttctgggcatgcccaataccaatctgtcccagtctatgagatgaagtttccagatctgtgtgtgtactgatcggcgcatgaagacctcaggatatgatttgtaaagcctaaaaattaaggccaagctgagctttcagggtttacttaatgtgtattaacatacttcttgaaaataatgatggaacatatctttaaccaaatgtttggcataccatattagaagttttggagctatatataatttcgagtactttcaaagatagatttatgccatgttaatttgctttgaggttcctgttgcctttttaagttgaacatgttttggtttcactttattccactgttaagtagtatgttttaaacttttcacaaatgtaatgttttttaaaaagtaagccttcagaggattgaaactgtataaattgtttatctcttaaacatctacacagccgcttagatgtagaatttttgttgttgttttctgcaaaggcagatacatttaaatatattcctagtcctgggactgcaaaactgttcggtggctttttgtccccatgctttagataagctgggataggcaccttgctattcagttactataataatatgtgataggcattcctcatcttcttcacaataataggacatctgttgaatagcattcctcgaatataaccctaaaaacgccatactttaaattgtctggttcttgtaatattgtgtttcctgccaagagtttgaccattctgcttgagaagtgtagagcttactcttggagtaccaaactgtgcaatatttttacatcataagatgtattagtttacaggctgtgctttgaaattatagtagtattttgctgtggctccattaattaaatgagatatatatttagtgcagaaaaaagacatttaaaacagctattagttcacctgtgaagagtctgtacattttgatttctattaagagcacatttatttacatttgtatattattttaaatcctcatagtcaaaaaattctccagatggacttttaatttgtaagatttgaactgtgacttgtatacatctgtttagaatcaattatatttgaaaagctgcctgtgttttaacagtcaagtgtgctaaagtttgtcaatttaagctgcttttgatttcagctaccaagatcacaggtgcactctacacataacactgacagacccataacattacatacatcttagtgaattctatcacatggtaaaatgaacagctttctttgtaactcataaaattctcttaggacatttttataaagtcacctgtttatagttctatcttttcagattccatttctttttacataaaacagcatacatatcaaaaactgtagcctagaatacagtttaatttttggcttttgtttttgtttaaaaaattgcagtgaagaatgggatgtttgtgtttatggctatttgggcacctttagtagaaacagacaaaagtaaggaaacgataataggacaagcatacttgaaaatttctgaatacttaaacaaaagcgcaacatcttgaaaaccagtctagtcattgaaacctatgaaatgacactgaaagatcctgggctgcttcttaaataagtagatcagcaagacttgtttcagagtgacagtggagtcgttaccgctggaggactaaagggccctgtggcagctgtcactggaactttgcctcttgatcaggaaaaatgcttcaccagtccgtaaagccaagttgtatttttttaattgcccttttttccttctgtatttttaaagaaggatgttaatttttgactatatattttaaaaaaatctaagcagggggacatgcaaaaacaatcatcatccacttggatgtcattttatagattaacactgtgtgcttttgtatggaaaaaatatatataatttaatagtataaaaaataaaatatatattcatttgcacttacgtgaaacacaaactttgctctacaaaatttcgtgtttcttagtgattttaaaatgcatgtattgcatgtaaaggaaaaccattacaattaatgtttatcacacctttatcttggtctttgttgatttgggttttgttggggtttttgttactgtttttaaattacagtaggcttctatatatcctggatttctgaactggtcttgttgacaaggattcccaagaaatggatcttttcactggctgactctcccatatctgcaagagattctgcaggaactgggtgtgcacacggtgttgtagccagttcaggtactgaatatttaggatttggtgaagttcactgtattgctatatttttgtagataaataaaactcaataaattgttaatcattctctttttgctgt

SEQ ID NO: 184671 - DNA, 4972 bp, Artificial Sequence
  derived and/or modified sequence
gaggagtgggctggcggcggtagctgtcgcccgcttggttgcgtgaccgcggggtccgcgtccgctccctccacccttcgcccttcgcccttcgcctcgttccggcctccgcggcccagcaacggccgtcatggtgccgtcggcgctccctgcgcggccccgctgagcctcggtgcggcggcgagcgcggtcgagatcgccatgcctacccgagtatgctgctgctgttccgctttgcgtcctcgctacaaacgcctggtggacaacatattccctgaagatccaaaagatggccttgtgaaaactgatatggagaaattgacattttatgcagtatctgctccagagaaactggatcgaattggttcttacctggcagaaaggttgagcagggatgttgtcagacatcgttctgggtatgttttgattgctatggaggcactggaccaacttctcatggcttgccattctcaaagcattaagccatttgtagaaagctttcttcatatggtggcaaagctgctggaatcgggggaaccaaagcttcaagttcttggaacaaattcttttgtcaaatttgcaaatattgaagaagacacaccatcctatcacagacgttatgacttttttgtgtctcgattcagtgccatgtgccattcctgtcatagtgatccagaaatacgaacagagatacgaattgctggaattagaggtattcaaggtgtggttcgcaaaacagtcaacgatgaacttcgggccaccatttgggaacctcagcatatggataagattgttccatccctcctgtttaacatgcaaaagatagaagaagttgacagtcgcataggccctccttcttctccttctgcaactgacaaagaagagaatcctgctgtgctggctgaaaactgtttcagagaactgctgggtcgagcaacttttgggaatatgaataatgctgttagaccagtttttgcgcatttagatcatcacaaactgtgggatcccaatgaatttgcagttcactgctttaaaattataatgtattccattcaggctcagtattctcaccatgtgatccaggagattctaggacaccttgatgctcgtaaaaaagatgctccccgggttcgagcaggtattattcaggttctgttagaggctgttgccattgctgctaaaggttccataggtccgacagtgctggaagtcttcaatacccttttgaaacatctgcgtctcagcgttgaattcgaagcaaatgatttacaggggggatctgtaggcagtgtcaacttaaatacaagttccaaagacaatgatgagaagattgtgcagaatgctatcatccaaacaataggattttttggaagtaacctaccagattatcagaggtcagaaatcatgatgttcattatggggaaagtacctgtctttggaacatctacccatactttggatatcagtcaactaggggatttgggaaccaggagaattcagataatgttgctgagatctttgcttatggtgacctctggatataaagcgaagacgattgttactgcactgccagggtctttcctggatcctttgttatcaccatctctcatggaggactacgaactgagacagttggtcttggaagtaatgcataatctcatggatcgtcatgacaatagggcaaagcttcgagggatcagaataataccggatgtagctgacctaaagataaaaagagaaaaaatttgcagacaagacacaagtttcatgaaaaagaatgggcaacagctgtatcggcacatatatttgggttgtaaagaggaagacaacgttcagaaaaactatgaactactttatacttctcttgctcttataactattgaactggctaatgaagaagtagttattgatctcattcgactggccattgctttacaggacagtgcaattatcaatgaggataatttgccaatgttccatcgttgtggaatcatggcactggttgcagcatacctcaactttgtaagtcagatgatagctgtccctgcattttgccagcatgttagcaaggttattgaaattcgaagaagccccttattttctaccagagcatatcttcagagataagtgcatgcttccaaaatctttagagaagcatgaaaaagatttgtactttctgaccaacaagattgcagagtcgctaggtggaagtggatatagtgttgagagattgtcagttccgtatgtaccacaagtaacagatgaagatcgactttctagaagaaaaagcattgtggacaccgtatccattcaggtggatattttatccaacaatgttccttctgatgatgtggttagtaacactgaagaaatcacttttgaagcattgaagaaagcaattgataccagtggaatggaagaacaggaaaaggaaaagaggcgtcttgtgatagagaaatttcagaaagcaccttttgaagaaatagcagcacagtgtgaatccaaagcaaatttgcttcatgatagacttgcccaaatattggaactcaccatacgtcctcctcccagtccatcaggaacactgaccattacttctgggcatgcccaataccaatctgtcccagtctatgagatgaagtttccagatctgtgtgtgtactgatcggcgcatgaagacctcaggatatgatttgtaaagcctaaaaattaaggccaagctgagctttcagggtttacttaatgtgtattaacatacttcttgaaaataatgatggaacatatctttaaccaaatgtttggcataccatattagaagttttggagctatatataatttcgagtactttcaaagatagatttatgccatgttaatttgctttgaggttcctgttgcctttttaagttgaacatgttttggtttcactttattccactgttaagtagtatgttttaaacttttcacaaatgtaatgttttttaaaaagtaagccttcagaggattgaaactgtataaattgtttatctcttaaacatctacacagccgcttagatgtagaatttttgttgttgttttctgcaaaggcagatacatttaaatatattcctagtcctgggactgcaaaactgttcggtggctttttgtccccatgctttagataagctgggataggcaccttgctattcagttactataataatatgtgataggcattcctcatcttcttcacaataataggacatctgttgaatagcattcctcgaatataaccctaaaaacgccatactttaaattgtctggttcttgtaatattgtgtttcctgccaagagtttgaccattctgcttgagaagtgtagagcttactcttggagtaccaaactgtgcaatatttttacatcataagatgtattagtttacaggctgtgctttgaaattatagtagtattttgctgtggctccattaattaaatgagatatatatttagtgcagaaaaaagacatttaaaacagctattagttcacctgtgaagagtctgtacattttgatttctattaagagcacatttatttacatttgtatattattttaaatcctcatagtcaaaaaattctccagatggacttttaatttgtaagatttgaactgtgacttgtatacatctgtttagaatcaattatatttgaaaagctgcctgtgttttaacagtcaagtgtgctaaagtttgtcaatttaagctgcttttgatttcagctaccaagatcacaggtgcactctacacataacactgacagacccataacattacatacatcttagtgaattctatcacatggtaaaatgaacagctttctttgtaactcataaaattctcttaggacatttttataaagtcacctgtttatagttctatcttttcagattccatttctttttacataaaacagcatacatatcaaaaactgtagcctagaatacagtttaatttttggcttttgtttttgtttaaaaaattgcagtgaagaatgggatgtttgtgtttatggctatttgggcacctttagtagaaacagacaaaagtaaggaaacgataataggacaagcatacttgaaaatttctgaatacttaaacaaaagcgcaacatcttgaaaaccagtctagtcattgaaacctatgaaatgacactgaaagatcctgggctgcttcttaaataagtagatcagcaagacttgtttcagagtgacagtggagtcgttaccgctggaggactaaagggccctgtggcagctgtcactggaactttgcctcttgatcaggaaaaatgcttcaccagtccgtaaagccaagttgtatttttttaattgcccttttttccttctgtatttttaaagaaggatgttaatttttgactatatattttaaaaaaatctaagcagggggacatgcaaaaacaatcatcatccacttggatgtcattttatagattaacactgtgtgcttttgtatggaaaaaatatatataatttaatagtataaaaaataaaatatatattcatttgcacttacgtgaaacacaaactttgctctacaaaatttcgtgtttcttagtgattttaaaatgcatgtattgcatgtaaaggaaaaccattacaattaatgtttatcacacctttatcttggtctttgttgatttgggttttgttggggtttttgttactgtttttaaattacagtaggcttctatatatcctggatttctgaactggtcttgttgacaaggattcccaagaaatggatcttttcactggctgactctcccatatctgcaagagattctgcaggaactgggtgtgcacacggtgttgtagccagttcaggtactgaatatttaggatttggtgaagttcactgtattgctatatttttgtagataaataaaactcaataaattgttaatcattctctttttgctgt

SEQ ID NO: 184672 - protein, 644 aa, Artificial Sequence
  derived and/or modified sequence
MEAERGPERRPAERSSPGQTPEEGAQALAEFAALHGPALRASGVPERYWGRLLHKLEHEVFDAGEVFGIMQVEEVEEEEDEAAREVRKQQPNPGNELCYKVIVTRESGLQAAHPNSIFLIDHAWTCRVEHARQQLQQVPGLLHRMANLMGIEFHGELPSTEAVALVLEEMWKFNQTYQLAHGTAEEKMPVWYIMDEFGSRIQHADVPSFATAPFFYMPQQVAYTLLWPLRDLDTGEEVTRDFAYGETDPLIRKCMLLPWAPTDMLDLSSCTPEPPAEHYQAILEENKEKLPLDINPVVHPHGHIFKVYTDVQQVASSLTHPRFTLTQSEADADILFNFSHFKDYRKLSQERPGVLLNQFPCENLLTVKDCLASIARRAGGPEGPPWLPRTFNLRTELPQFVSYFQQRERWGEDNHWICKPWNLARSLDTHVTKSLHSIIRHRESTPKVVSKYIESPVLFLREDVGKVKFDIRYIVLLRSVRPLRLFVYDVFWLRFSNRAFALNDLDDYEKHFTVMNYDPDVVLKQVHCEEFIPEFEKQYPEFPWTDVQAEIFRAFTELFQVACAKPPPLGLCDYPSSRAMYAVDLMLKWDNGPDGRRVMQPQILEVNFNPDCERACRYHPTFFNDVFSTLFLDQPGGCHVTCLV

SEQ ID NO: 184673 - protein, 211 aa, Artificial Sequence
  derived and/or modified sequence
MEAERGPERRPAERSSPGQTPEEGAQALAEFAALHGPALRASGVPERYWGRLLHKLEHEVFDAGEVFGIMQVEEVEEEEDEAAREVRKQQPNPGNELCYKVIVTRESGLQAAHPNSIFLIDHAWTCRVEHARQQLQQVPGLLHRMANLMGIEFHGELPSTEAVALVLEEMWKFNQTYRHVCRRPHAEVGQRPRWKAGDAAADPGGELQPRL

SEQ ID NO: 184674 - DNA, 636 bp, Artificial Sequence
  derived and/or modified sequence
atggaggccgagagaggccccgagagaagacccgccgagagaagcagccccggccagacccccgaggagggcgcccaggccctggccgagttcgccgccctgcacggccccgccctgagagccagcggcgtgcccgagagatactggggcagactgctgcacaagctggagcacgaggtgttcgacgccggcgaggtgttcggcatcatgcaggtggaggaggtggaggaggaggaggacgaggccgccagagaggtgagaaagcagcagcccaaccccggcaacgagctgtgctacaaggtgatcgtgaccagagagagcggcctgcaggccgcccaccccaacagcatcttcctgatcgaccacgcctggacctgcagagtggagcacgccagacagcagctgcagcaggtgcccggcctgctgcacagaatggccaacctgatgggcatcgagttccacggcgagctgcccagcaccgaggccgtggccctggtgctggaggagatgtggaagttcaaccagacctacagacacgtgtgcagaagaccccacgccgaggtgggccagagacccagatggaaggccggcgacgccgccgccgaccccggcggcgagctgcagcccagactgtag

SEQ ID NO: 184675 - DNA, 636 bp, Artificial Sequence
  derived and/or modified sequence
atggaggcagaaaggggacccgagaggaggcccgcagagaggtcgagtcccggtcagacccctgaagagggagcacaagcactggcagagttcgctgccttgcacggccccgccctgcgagcctctggagtgccagaaagatattgggggcggttgctgcataaactggagcacgaagtttttgacgcgggtgaggtattcggaattatgcaggtggaggaggtggaggaagaagaggatgaggcagcccgggaggtgcggaagcagcaaccaaatcctggcaatgagctgtgctataaggttatcgtaacgagagagtccggtctacaggcagctcaccccaacagcatatttcttatcgatcatgcctggacctgtcgggtcgaacatgctcgccagcaattacagcaggtgcccggcctgctccaccgtatggccaatcttatgggtattgagttccacggcgaactgcctagtaccgaagcagtcgccctagtgctcgaggagatgtggaagtttaaccagacgtacaggcatgtttgccggaggcctcacgccgaagtgggacagcgaccccgttggaaagccggcgatgccgctgcagatccaggaggcgagcttcagccacggctctag

SEQ ID NO: 184676 - DNA, 636 bp, Artificial Sequence
  derived and/or modified sequence
atggaggccgagcggggccctgagaggaggcctgctgagaggagcagccctggccagaccccagaggagggcgcccaggccctggccgagtttgctgccctgcacggccctgccctgcgggccagcggcgtgcctgagcgctactggggccgcctgctgcacaagctggagcacgaggtgtttgatgctggggaggtgtttggcatcatgcaggtggaggaggtggaggaggaggaggatgaggccgcccgggaggtgaggaagcagcagcccaaccctggaaatgagctgtgctacaaggtgattgtgacccgggagagcggcctgcaggccgcccaccccaacagcatcttcctgattgaccacgcctggacctgccgggtggagcacgcccggcagcagctgcagcaggtgcccggcctgctgcacaggatggccaacctgatgggcatcgagttccacggggagctgcccagcacagaggccgtggccctggtgctggaggagatgtggaagttcaaccagacctacagacatgtgtgccggcggccccacgccgaggtgggccagaggccccgctggaaggctggagatgctgctgctgaccctggaggagagctgcagccccggctgtag

SEQ ID NO: 184677 - DNA, 636 bp, Artificial Sequence
  derived and/or modified sequence
atggaggccgagcggggccccgagcggcggcccgccgagcggagcagcccaggtcagacacccgaagaaggagctcaagcgttagccgagttcgccgccctacatggtcctgctttgcgggcgtcaggcgttcctgagcgctactggggtaggctgctgcataagctggaacacgaagtctttgacgccggtgaggtctttggtatcatgcaagttgaggaggtggaggaggaagaggatgaggcagcacgggaagtgcgcaagcaacagcctaacccaggcaacgaattatgttacaaggtgatcgttactcgtgaatccgggttacaggccgcacatcccaatagcatcttccttattgaccacgcatggacttgcagagtcgagcacgccaggcagcagctccagcaggttccaggtctcctgcacagaatggccaatctcatgggcattgaattccatggcgaactcccctccacagaagcagtggcccttgtgctcgaggaaatgtggaagttcaaccagacgtacaggcacgtgtgtcgtagaccacacgcggaggtcggacagcgtcccaggtggaaggcaggggacgccgctgctgaccccggtggagaattgcagccccgcctttag

SEQ ID NO: 184678 - DNA, 636 bp, Artificial Sequence
  derived and/or modified sequence
atggaagctgagcgtgggcctgaacgtagacctgccgaacggtcatcaccgggacagacaccagaagagggagcccaggcacttgcagagttcgctgctctgcacggaccggctctgagagccagcggcgtgccagaaagatactgggggcgtttgctgcacaagcttgaacacgaggtgtttgatgccggtgaagtgtttgggatcatgcaagttgaggaggttgaagaggaagaggatgaggccgctcgtgaggtccgcaagcagcagccaaatcccggtaatgaactgtgctacaaagtaattgtaacgagagagtctggtctgcaggccgcacatcctaacagcatttttttgatcgatcacgcttggacctgtcgtgtcgaacacgcccgtcagcaattgcagcaagtccctgggctcctgcacaggatggcaaaccttatggggattgaatttcacggcgagctgccttctacagaagccgtggccttggtattggaagagatgtggaaattcaatcagacctaccgacatgtatgtagaagaccccatgcagaggtgggacaaaggccccgttggaaagccggtgatgccgcagcagatcctggcggtgaactccagcccaggctatag

SEQ ID NO: 184679 - DNA, 3385 bp, Artificial Sequence
  derived and/or modified sequence
gggccgacggacggcgggcggcggcggcggtggcggcgctggagtcggcgcgggtgctggcgccatggaggccgagcggggtcccgagcgccggcctgcggagcgtagcagcccgggccagacgccggaggagggcgcgcaggccttggccgagttcgcggcgctgcacggcccggcgctgcgcgcttcgggggtccccgaacgttactggggccgcctcctgcacaagctggagcacgaggttttcgacgctggggaagtgtttgggatcatgcaagtggaggaggtagaagaggaggaggacgaggcagcccgggaggtgcggaagcagcagcccaacccggggaacgagctgtgctacaaggtcatcgtgaccagggagagcgggctccaggcagcccaccccaacagcatcttcctcatcgaccacgcctggacgtgccgtgtggagcacgcgcgccagcagctgcagcaggtgcccgggctgctgcaccgcatggccaacctgatgggcattgagttccacggtgagctgcccagtacagaggctgtggccctggtgctggaggagatgtggaagttcaaccagacctaccagctggcccatgggacagctgaggagaagatgccggtgtggtatatcatggacgagttcggttcgcggatccagcacgcggacgtgcccagcttcgccacggcacccttcttctacatgccgcagcaggtggcctacacgctgctgtggcccctgagggacctggacactggcgaggaggtgacccgagactttgcctacggagagacggaccccctgatccggaagtgcatgctgctgccctgggcccccaccgacatgctggacctcagctcttgcacacccgagccgcccgccgagcactaccaggccattctggaggaaaacaaggagaagctgccacttgacatcaaccccgtggtgcacccccacggccacatcttcaaggtctacacggacgtgcagcaggtggccagcagcctcacccacccgcgcttcaccctcacccagagtgaggcggacgccgacatcctcttcaacttctcacacttcaaggactacaggaaactcagccaggagaggccaggcgtgctgctgaaccagttcccctgcgagaacctgctgactgtcaaggactgcctggcctccatcgcgcgccgggcaggtggccccgagggcccaccctggctgccccgaaccttcaacctgcgcactgagctgccccagtttgtcagctacttccagcagcgggaaaggtggggcgaggacaaccactggatctgcaagccctggaacctggcgcgcagcctggacacccacgtcaccaagagcctgcacagcatcatccggcaccgagagagcacccccaaggttgtgtccaagtacatcgaaagtcccgtgttgttccttcgagaagacgtgggaaaggtcaagttcgacatccgctacatcgtgctgctgcggtcagtgaggcccctacggttgttcgtgtatgatgtgttctggctgcggttctccaaccgggcctttgcactcaacgacctggatgactacgagaagcacttcacggtcatgaactatgacccggatgtggtgctgaagcaggtgcactgtgaagagttcatccccgagtttgagaagcaatacccagaatttccctggacggacgtccaggctgagatcttccgggccttcacggagctgttccaggtggcctgtgccaagccaccacccctgggcctctgcgactacccctcatcccgggccatgtatgccgtcgacctcatgctgaagtgggacaacggcccagatggaaggcgggtgatgcagccgcagatcctggaggtgaacttcaaccccgactgtgagcgagcctgcaggtaccaccccaccttcttcaacgacgtcttcagcaccttgtttctggaccagcccggtggctgccacgttacctgccttgtctaggcactcgctgtccccaaaacctgtgcttggggcaggattccaacctcagttctctgagctgcttctgcaaaggcccccatgtccctccccacaccggccctgggcatagcctcagccccaggcctctgtcctgccgagccatcctcccggcgccacactccgggagcacagcatcctcctctcacctgtgggtcagagcaggacagtgatggtgtccccagggctgagcaccaccccacgccctgccctcacccctcaccaccatctgtgcactgatgagtctccagtttagccaagggctttgttcctggcatggagaatttgttcctggctgctgtgtttccagggggtgctgggggaagggttccgtggagcgagacaaggtgtcctcgggagcagggttccaccgggaagcgtttgggagccctgtatcacacggggcaggcgggtttctcttccggggtctctgctcttatgcatcaggacgaccccgggacggctgtggggccccacactgcacccacagggctctatgcgacaggggcccaggaacagcctgaggccaccacccagcaagcccgccttatcacccattccagctcacccagaaccttcaccagcaaacctcctgctgaggtcctggcaggaggccaccgtcttgttaccgtttccttttcgtttgctgagggtcacagaccccaacagggaaatcagtatctgtcttcccagtggttgccctgctcgccgggcactccacggggtcccgcccttgtgtgagatgggccaggatccttcggcaaggggcgcctggggctggggctgattgtgggcggtggagcgccagacagaaaaggattccaatgagaacttcaggttaaagtcagatgccacctaccagggtctacagtcaaaatgttggctttttcttattttttaatgtatgggagaaaaatgtaaaattccagttcttttctaattgtgtttctgaaattaggagtcagctgccagcgtttttgtgtggctgcagtgtgcctgggcccagctcacgggcagtgggtggacctaactgcccaggcaggcgagagctacttccagagccttccagtgcatgggagggcagggctaggtgtagcggtgtctcctctttgaaattaagaactatctttcttgtagcaaagctgcacctgatgatgctgcctctcctctctgtgttgtctgggcccttgtttacaagcacgcgttacccttcctgaggggagccatgctctagcccctggagggcctgttgcaggggcagggcgggcccgtcgcctttggcagctcctggagagctgtggacatgcagtccccctcagttcgtgctgcaataaaggccatcttctctta

SEQ ID NO: 184680 - DNA, 2180 bp, Artificial Sequence
  derived and/or modified sequence
gccgacggacggcgggcggcggcggcggtggcggcgctggagtcggcgcgggtgctggcgccatggaggccgagcggggtcccgagcgccggcctgcggagcgtagcagcccgggccagacgccggaggagggcgcgcaggccttggccgagttcgcggcgctgcacggcccggcgctgcgcgcttcgggggtccccgaacgttactggggccgcctcctgcacaagctggagcacgaggttttcgacgctggggaagtgtttgggatcatgcaagtggaggaggtagaagaggaggaggacgaggcagcccgggaggtgcggaagcagcagcccaacccggggaacgagctgtgctacaaggtcatcgtgaccagggagagcgggctccaggcagcccaccccaacagcatcttcctcatcgaccacgcctggacgtgccgtgtggagcacgcgcgccagcagctgcagcaggtgcccgggctgctgcaccgcatggccaacctgatgggcattgagttccacggtgagctgcccagtacagaggctgtggccctggtgctggaggagatgtggaagttcaaccagacctaccgccatgtatgccgtcgacctcatgctgaagtgggacaacggcccagatggaaggcgggtgatgcagccgcagatcctggaggtgaacttcaaccccgactgtgagcgagcctgcaggtaccaccccaccttcttcaacgacgtcttcagcaccttgtttctggaccagcccggtggctgccacgttacctgccttgtctaggcactcgctgtccccaaaacctgtgcttggggcaggattccaacctcagttctctgagctgcttctgcaaaggcccccatgtccctccccacaccggccctgggcatagcctcagccccaggcctctgtcctgccgagccatcctcccggcgccacactccgggagcacagcatcctcctctcacctgtgggtcagagcaggacagtgatggtgtccccagggctgagcaccaccccacgccctgccctcacccctcaccaccatctgtgcactgatgagtctccagtttagccaagggctttgttcctggcatggagaatttgttcctggctgctgtgtttccagggggtgctgggggaagggttccgtggagcgagacaaggtgtcctcgggagcagggttccaccgggaagcgtttgggagccctgtatcacacggggcaggcgggtttctcttccggggtctctgctcttatgcatcaggacgaccccgggacggctgtggggccccacactgcacccacagggctctatgcgacaggggcccaggaacagcctgaggccaccacccagcaagcccgccttatcacccattccagctcacccagaaccttcaccagcaaacctcctgctgaggtcctggcaggaggccaccgtcttgttaccgtttccttttcgtttgctgagggtcacagaccccaacagggaaatcagtatctgtcttcccagtggttgccctgctcgccgggcactccacggggtcccgcccttgtgtgagatgggccaggatccttcggcaaggggcgcctggggctggggctgattgtgggcggtggagcgccagacagaaaaggattccaatgagaacttcaggttaaagtcagatgccacctaccagggtctacagtcaaaatgttggctttttcttattttttaatgtatgggagaaaaatgtaaaattccagttcttttctaattgtgtttctgaaattaggagtcagctgccagcgtttttgtgtggctgcagtgtgcctgggcccagctcacgggcagtgggtggacctaactgcccaggcaggcgagagctacttccagagccttccagtgcatgggagggcagggctaggtgtagcggtgtctcctctttgaaattaagaactatctttcttgtagcaaagctgcacctgatgatgctgcctctcctctctgtgttgtctgggcccttgtttacaagcacgcgttacccttcctgaggggagccatgctctagcccctggagggcctgttgcaggggcagggcgggcccgtcgcctttggcagctcctggagagctgtggacatgcagtccccctcagttcgtgctgcaataaaggccatcttctctt

SEQ ID NO: 184681 - DNA, 1935 bp, Artificial Sequence
  derived and/or modified sequence
atggaagccgaacggggcccagagagaagacctgcagagaggtctagcccaggtcagactcccgaggagggcgcccaagcgcttgctgagtttgccgccttgcacggtcccgcgctgcgagcctctggagtacctgagaggtactggggccgcctgctgcacaaactcgaacatgaggtgttcgacgcgggcgaggtgtttgggattatgcaggtggaggaagtggaagaggaagaagatgaagctgctagagaagtgagaaagcagcagcccaaccccggcaatgagctatgctacaaggtgatcgtcacacgtgagtctgggctgcaagctgcgcatcctaattccattttcctgatcgatcacgcatggacctgccgcgtggaacacgctcggcagcaactgcagcaagtgccgggcctcttacataggatggcaaacttgatgggtatcgagttccacggcgaacttccaagtaccgaagctgtcgccctcgtccttgaggagatgtggaagtttaaccaaacttaccagctggcacacggtacagctgaggagaaaatgcccgtgtggtacatcatggacgaatttgggagccgtattcaacatgctgacgtacctagtttcgcaactgcccctttcttctacatgccacaacaggtggcctacaccttactgtggcctcttagagatcttgacacaggagaagaagttacacgcgacttcgcttatggggaaacagaccctctgatcaggaagtgcatgctgctgccctgggccccgactgatatgctggatctctcctcgtgcactccagaacctcctgcagagcactatcaggcaattttggaggagaataaagagaagcttccactggacattaaccccgtggtccacccccatggacacatttttaaagtgtacactgacgtccagcaggttgcgtcttcacttactcatccgcggttcactctgacacagtctgaagcggacgcggacatcttgtttaacttcagtcatttcaaggattatcgaaaactgtcccaggaacgacctggggttctcctgaaccaattcccctgcgaaaacctgctcacggtgaaagattgcctggcttcgattgccaggcgcgccggcgggccagaagggcccccttggttgcctcgaacctttaatttacgcacagagctgccacagtttgtatcctacttccagcagcgcgagaggtggggcgaagataaccactggatctgtaagccatggaatctggccagaagtctggatacccacgtcaccaagtcactgcacagcattataagacacagggaatccacccctaaagtggtcagtaagtatatcgagagccccgtgctgttccttagagaggacgtcggcaaagtgaaatttgacattaggtatattgtactccttcggagcgtccggccactgcgtctcttcgtatatgatgtcttttggctgagattcagcaatcgcgcgttcgcactcaatgatcttgacgattatgaaaagcacttcacagtgatgaactacgaccctgatgttgtgctgaagcaggtgcactgcgaggaatttatccctgagttcgagaaacagtatcctgaattcccctggaccgatgtgcaggcagaaatcttccgcgcctttaccgagttgttccaggtggcatgtgcaaagcctccccctctggggttgtgtgattatccatcaagcagagctatgtatgctgtggatctgatgttaaaatgggataacggcccagatgggagacgagtcatgcagccacaaatcctcgaggtcaacttcaatcctgactgcgaaagagcgtgtagatatcaccccacgttcttcaatgacgtcttttccactctgtttctcgatcagcccgggggatgccatgtgacctgcctcgtgtag

SEQ ID NO: 184682 - DNA, 1935 bp, Artificial Sequence
  derived and/or modified sequence
atggaggccgagcggggccctgagaggaggcctgctgagaggagcagccctggccagaccccagaggagggcgcccaggccctggccgagtttgctgccctgcacggccctgccctgcgggccagcggcgtgcctgagcgctactggggccgcctgctgcacaagctggagcacgaggtgtttgatgctggggaggtgtttggcatcatgcaggtggaggaggtggaggaggaggaggatgaggccgcccgggaggtgaggaagcagcagcccaaccctggaaatgagctgtgctacaaggtgattgtgacccgggagagcggcctgcaggccgcccaccccaacagcatcttcctgattgaccacgcctggacctgccgggtggagcacgcccggcagcagctgcagcaggtgcccggcctgctgcacaggatggccaacctgatgggcatcgagttccacggggagctgcccagcacagaggccgtggccctggtgctggaggagatgtggaagttcaaccagacctaccagctggcccatggaacagctgaggagaagatgcctgtgtggtacatcatggatgaatttggcagccgcatccagcacgcagatgtgcccagctttgccacagcccccttcttctacatgccccagcaggtggcctacaccctgctgtggcccctgcgggacctggacaccggggaggaggtgacccgggactttgcctacggggagacagaccccctcatcaggaagtgcatgctgctgccctgggcccccacagacatgctggacctgagcagctgcaccccagagcccccagctgagcactaccaggccatcctggaggagaacaaggagaagctgcccctggacatcaaccctgtggtgcacccccacggccacatcttcaaggtgtacacagatgtgcagcaggtggccagcagcctgacccacccccgcttcaccctgacccagagcgaggctgatgctgacatcctcttcaacttcagccacttcaaggactacaggaagctgagccaggagaggcctggggtgctgctgaaccagttcccctgtgagaacctgctgactgtgaaggactgcctggccagcatcgcccggcgggccggcggccctgagggccccccctggctgcccaggaccttcaacctgaggacagagctgccccagtttgtgtcctacttccagcagcgggagcgctggggcgaggacaaccactggatctgcaagccctggaacctggcccggagcctggacacccacgtgaccaagagcctgcacagcatcatccgccaccgggagagcacccccaaggtggtgtccaagtacatcgagagccctgtgctcttcctgcgggaggatgtgggcaaggtgaagtttgacatccgctacatcgtgctgctgcggtctgtgcggcccctgcggctgtttgtgtatgatgtgttctggctgcgcttcagcaacagagcctttgccctgaatgacctggatgattatgagaagcacttcaccgtgatgaactatgaccctgatgtggtgctgaagcaggtgcactgtgaggagttcatccctgagtttgagaagcagtacccagagttcccctggacagatgtgcaggccgagatcttccgggccttcacagagctgttccaggtggcctgtgccaagcccccacccctgggcctgtgtgactaccccagcagccgggccatgtatgctgtggacctgatgctgaagtgggacaatggaccagatggccggcgggtgatgcagccccagatcctggaggtgaacttcaacccagactgtgagcgggcctgccgctaccaccccaccttcttcaatgatgtgttcagcaccctcttcctggaccagcccggcggctgccacgtgacctgcctggtgtag

SEQ ID NO: 184683 - DNA, 1935 bp, Artificial Sequence
  derived and/or modified sequence
atggaggccgagcggggccccgagcggcggcccgccgagcggagctccccgggtcagaccccagaagagggcgcccaggccctggcagaatttgcagcccttcacgggccggcacttcgtgcctctggagtacccgagagatattggggtcgcctgctccacaagcttgaacacgaagtgttcgatgctggagaggtgttcggtataatgcaagtggaggaggtggaagaggaggaagatgaagcggcaagagaggtgaggaaacaacagccaaatcccggcaacgagctctgttataaggtgatcgttacgcgggaatcaggcctgcaggctgcacaccccaattcaatttttttgatagatcacgcttggacatgccgagtcgagcacgctcgccagcaactccagcaggtgcccggcctgcttcaccgaatggctaacttgatgggcatcgaattccacggagagctcccctccactgaggctgtcgctttagtgcttgaggaaatgtggaaattcaaccaaacctaccagctggcccatggcacggctgaggaaaagatgcccgtctggtatatcatggacgagttcggcagtcggatccagcacgccgacgtaccatcattcgccaccgcaccttttttttatatgcctcagcaggtggcctacactctgctgtggccactgagggatctcgacaccggagaggaagtaacccgagacttcgcgtacggagaaactgatcctctcattcgcaaatgcatgttattgccatgggcaccgacagatatgttggatctctcctcttgcactccggagccaccggctgagcattaccaagccatcctagaggagaataaggaaaaattgcccctggacatcaatccagtggttcaccctcacggtcacatcttcaaggtatataccgatgtgcagcaggtggcctcatcgttgacacacccacgcttcactctgacacagtccgaggccgatgctgacatcctcttcaacttctctcattttaaggattacagaaaactctcacaggagagacccggcgtcttacttaatcagtttccatgtgaaaacctccttactgtaaaggactgcctggctagcattgctcgcagagctggcggcccggaaggtcccccttggcttccccgaacctttaatcttcggacagagctcccacagttcgtgagctacttccagcagagggagaggtggggggaggacaaccattggatctgcaagccttggaacctagcccggtcccttgatacccacgtcactaaatccttacattccatcatcaggcacagagagagtacacctaaagtggtctccaagtatattgagagtcccgtgcttttcctgagggaagacgtcggcaaagtgaagttcgatattaggtatattgttctcctccggtctgtacggccactgcgtctgttcgtttatgacgtgttttggttgcgtttttcaaaccgagccttcgctctgaacgacctggatgattacgagaagcattttacagtcatgaattatgatcccgacgtggttttgaagcaggttcactgtgaggagtttatccctgagtttgaaaaacagtatccagagttcccttggacagatgtacaggctgagatctttagagcgtttacggaactgtttcaagtggcttgcgccaagccaccccccctaggactgtgtgattacccctcatcaagggctatgtacgccgtggacctgatgctcaagtgggacaacgggcctgatggcagaagagtgatgcaaccacagattctggaggtcaactttaaccctgactgcgaaagggcctgcagatatcacccaacatttttcaacgacgtgttttctactctgttcttggatcagcctggcgggtgccacgtgacttgcttggtgtag

SEQ ID NO: 184684 - DNA, 1935 bp, Artificial Sequence
  derived and/or modified sequence
atggaggcagaaaggggcccagagagaagacctgccgagaggagcagtccaggtcagaccccggaagagggggctcaagccctggcggaattcgcagccctacacggacccgcactccgtgcgagtggcgtccccgagcggtactggggcagactcttgcacaagcttgaacatgaggtgttcgacgcaggtgaagtgttcgggatcatgcaggtcgaggaggtggaagaggaagaggacgaagctgccagagaagtgcggaagcagcagcccaatccgggaaacgagctgtgttataaggttatcgttactcgcgagtccggcctgcaagccgctcatcctaattcaatttttctgatcgaccacgcatggacatgtcgcgtagagcacgctagacaacagttgcagcaggtgcccggactgctccaccgtatggccaacctaatgggcattgagttccatggtgagctgccaagcaccgaggccgttgccctcgtgcttgaagaaatgtggaaatttaatcaaacataccaactggctcatggcacggctgaagaaaagatgcctgtgtggtatatcatggacgagttcgggtcccggattcaacacgcagacgtgccatcatttgccacggcccctttcttctacatgccgcagcaggtagcctacactttgctatggccacttagggatctagatacaggtgaggaggtcacccgagactttgcctacggagagactgaccccctgataagaaagtgtatgctactgccttgggccccaaccgacatgttggacctatctagctgtacgccggagccgcctgcggaacactaccaggctatactcgaggagaataaagaaaaactgcctttagacatcaaccccgttgtccacccccacgggcacatattcaaagtttacacagacgtgcagcaggtagcttcttccctgacacatccacggttcacattgacccaaagcgaggcggacgcagatatcctgttcaacttttcccattttaaggactaccggaaattgagccaggagcggcctggcgtcctcttgaaccagttcccttgcgaaaacctgttaacagtcaaagattgtctcgcgtcaattgcacgcagagccggtggccctgagggcccaccctggctgcctaggacctttaacttacggactgagctgccccagtttgtgagttatttccaacagcgggaaagatggggggaagataaccattggatctgcaagccttggaacctagctaggtccctcgacacccatgttaccaaatctttgcactctataatccgccacagagaaagcacacctaaggtggttagtaagtatatcgaaagtcctgtgctgtttctgcgggaagacgttggaaaagtcaagttcgatatacgctatatcgtactcttgcgctccgtgcgccctcttcgcctgtttgtatatgacgtcttctggctgcggttcagtaacagagccttcgcactcaatgacctggatgactacgaaaagcactttaccgtgatgaactatgacccagatgtggtgctgaagcaggtacattgtgaggagtttattccagagtttgaaaaacagtatcctgaatttccctggacagatgtccaggctgagatctttcgagcgtttactgagctgtttcaggtggcttgtgccaagccacctcccctcggattgtgcgattacccttcctctagagctatgtatgcagtagatctgatgctaaagtgggacaatgggccagatggacgtcgggtgatgcagcctcagatcctggaggtcaacttcaatcccgattgcgaacgcgcttgtaggtatcatccaacattctttaacgacgtgttctcaactcttttcttggatcagccaggaggctgccatgtcacctgcctggtttag

SEQ ID NO: 184685 - DNA, 1935 bp, Artificial Sequence
  derived and/or modified sequence
atggaggccgagagaggccccgagagaagacccgccgagagaagcagccccggccagacccccgaggagggcgcccaggccctggccgagttcgccgccctgcacggccccgccctgagagccagcggcgtgcccgagagatactggggcagactgctgcacaagctggagcacgaggtgttcgacgccggcgaggtgttcggcatcatgcaggtggaggaggtggaggaggaggaggacgaggccgccagagaggtgagaaagcagcagcccaaccccggcaacgagctgtgctacaaggtgatcgtgaccagagagagcggcctgcaggccgcccaccccaacagcatcttcctgatcgaccacgcctggacctgcagagtggagcacgccagacagcagctgcagcaggtgcccggcctgctgcacagaatggccaacctgatgggcatcgagttccacggcgagctgcccagcaccgaggccgtggccctggtgctggaggagatgtggaagttcaaccagacctaccagctggcccacggcaccgccgaggagaagatgcccgtgtggtacatcatggacgagttcggcagcagaatccagcacgccgacgtgcccagcttcgccaccgcccccttcttctacatgccccagcaggtggcctacaccctgctgtggcccctgagagacctggacaccggcgaggaggtgaccagagacttcgcctacggcgagaccgaccccctgatcagaaagtgcatgctgctgccctgggcccccaccgacatgctggacctgagcagctgcacccccgagccccccgccgagcactaccaggccatcctggaggagaacaaggagaagctgcccctggacatcaaccccgtggtgcacccccacggccacatcttcaaggtgtacaccgacgtgcagcaggtggccagcagcctgacccaccccagattcaccctgacccagagcgaggccgacgccgacatcctgttcaacttcagccacttcaaggactacagaaagctgagccaggagagacccggcgtgctgctgaaccagttcccctgcgagaacctgctgaccgtgaaggactgcctggccagcatcgccagaagagccggcggccccgagggccccccctggctgcccagaaccttcaacctgagaaccgagctgccccagttcgtgagctacttccagcagagagagagatggggcgaggacaaccactggatctgcaagccctggaacctggccagaagcctggacacccacgtgaccaagagcctgcacagcatcatcagacacagagagagcacccccaaggtggtgagcaagtacatcgagagccccgtgctgttcctgagagaggacgtgggcaaggtgaagttcgacatcagatacatcgtgctgctgagaagcgtgagacccctgagactgttcgtgtacgacgtgttctggctgagattcagcaacagagccttcgccctgaacgacctggacgactacgagaagcacttcaccgtgatgaactacgaccccgacgtggtgctgaagcaggtgcactgcgaggagttcatccccgagttcgagaagcagtaccccgagttcccctggaccgacgtgcaggccgagatcttcagagccttcaccgagctgttccaggtggcctgcgccaagcccccccccctgggcctgtgcgactaccccagcagcagagccatgtacgccgtggacctgatgctgaagtgggacaacggccccgacggcagaagagtgatgcagccccagatcctggaggtgaacttcaaccccgactgcgagagagcctgcagataccaccccaccttcttcaacgacgtgttcagcaccctgttcctggaccagcccggcggctgccacgtgacctgcctggtgtag

SEQ ID NO: 184686 - protein, 351 aa, Artificial Sequence
  derived and/or modified sequence
MAAAPLKVCIVGSGNWGSAVAKIIGNNVKKLQKFASTVKMWVFEETVNGRKLTDIINNDHENVKYLPGHKLPENVVAMSNLSEAVQDADLLVFVIPHQFIHRICDEITGRVPKKALGITLIKGIDEGPEGLKLISDIIREKMGIDISVLMGANIANEVAAEKFCETTIGSKVMENGLLFKELLQTPNFRITVVDDADTVELCGALKNIVAVGAGFCDGLRCGDNTKAAVIRLGLMEMIAFARIFCKGQVSTATFLESCGVADLITTCYGGRNRRVAEAFARTGKTIEELEKEMLNGQKLQGPQTSAEVYRILKQKGLLDKFPLFTAVYQICYESRPVQEMLSCLQSHPEHT

SEQ ID NO: 184687 - DNA, 1056 bp, Artificial Sequence
  derived and/or modified sequence
atggccgccgccccgctgaaggtctgcatagtcggttccggaaattggggatcagccgtcgccaaaatcatcgggaacaacgttaagaaattacaaaagtttgcatctacggtcaaaatgtgggttttcgaagaaacggtcaacggaaggaaactcaccgacatcattaacaacgatcacgagaacgtgaagtacttgcctgggcacaagctgcccgagaacgtcgtggcaatgtctaatctgtctgaggccgtgcaagatgctgacttgctggtcttcgtcatcccccaccaattcatccaccggatttgtgatgagataacaggtcgcgttccaaaaaaggctctcgggattacccttatcaagggtatagatgaaggtccagaggggctcaaattgatttccgatataatcagggaaaagatgggcattgatatttccgtcctcatgggagccaatatagccaacgaagtagccgcagagaaattttgcgagacaaccattggcagcaaggtaatggaaaatggtctgctcttcaaggagctcttacagactccgaacttccgaattaccgtcgtggacgacgctgatacagtagagctgtgcggagcgctgaagaacattgtggcagttggagcaggcttctgcgacggacttcgatgcggtgataatactaaggcagcagtaattcggctgggcctcatggaaatgatagcttttgcgcgaatcttctgcaaagggcaagtcagcacagctaccttcctggagtcctgtggcgtggccgacctcatcacgacttgttatggtggcagaaacaggagggttgcagaggcctttgcgcgcacagggaagactatcgaagagctggagaaggaaatgctgaatggccagaaactgcagggacctcagactagtgctgaggtgtaccgtatcctgaagcagaaaggattgttggacaagttcccactcttcacagctgtgtatcagatctgctatgagagtaggccagtacaagagatgctcagctgtctgcagtcacacccggaacacacttag

SEQ ID NO: 184688 - DNA, 4060 bp, Artificial Sequence
  derived and/or modified sequence
gcagtggttcttgggagtggcgaagcgggtcctgccccgctgtcagctgcggcccccggcgccgggcgggggtggccgcgaccattggcggagaggcgaaaggggcggggccgccgccagccgctgcgggcaaggctgaacaggcggaggtgggcagccggccagggaagcacggtccaggcggctacattcggcccggccatggcagcggcgcccctgaaagtgtgcatcgtgggctcggggaactggggttcagctgttgcaaaaataattggtaataatgtcaagaaacttcagaaatttgcctccacagtcaagatgtgggtctttgaagaaacagtgaatggcagaaaactgacagacatcataaataatgaccatgaaaatgtaaaatatcttcctggacacaagctgccagaaaatgtggttgccatgtcaaatcttagcgaggctgtgcaggatgcagacctgctggtgtttgtcattccccaccagttcattcacagaatctgtgatgagatcactgggagagtgcccaagaaagcgctgggaatcaccctcatcaagggcatagacgagggccccgaggggctgaagctcatttctgacatcatccgtgagaagatgggtattgacatcagtgtgctgatgggagccaacattgccaatgaggtggctgcagagaagttctgtgagaccaccatcggcagcaaagtaatggagaacggccttctcttcaaagaacttctgcagactccaaattttcgaattaccgtggttgatgatgcagacactgttgaactctgtggtgcgcttaagaacatcgtagctgtgggagctgggttctgcgacggcctccgctgtggagacaacaccaaagcggccgtcatccgcctgggactcatggaaatgattgcttttgccaggatcttctgcaaaggccaagtgtctacagccaccttcctagagagctgcggggtggccgacctgatcaccacctgttacggagggcggaaccgcagggtggccgaggccttcgccagaactgggaagaccattgaagagttggagaaggagatgctgaatgggcaaaagctccaaggaccgcagacttctgctgaagtgtaccgcatcctcaaacagaagggactactggacaagtttccattgtttactgcagtgtatcagatctgctacgaaagcagaccagttcaagagatgttgtcttgtcttcagagccatccagagcatacataaagtgaatcatgcaacgtgttgggggaagttctgcctttctgatcaatcttttgggttcacgtggaaaccaggacttggcaacatgatgtttgactgtaatctcatcacggatatgtatgaatttttacaggttcgtttttgaattgtgagaggcagttcattagcaaagatgtactgggcagtaactaaacacacatgcaaacatgtgaatggtggtttattcctcattctgtggatgtttctatgagccaaaatttgatgtctttttttcaaaattgcttatgaaatttccacacaatcgtagcttataagattggaacgatctcagccaaatattttaggtgtaattcatatgtatttgagtggaggattttttttctcatttttctagtgttaaattttaaccagcattaacatggtagagtggaggagtgagtgtgttcaaagatcaacatatttaacttttaaacactatctcaaagccagcataattaactactttgattgtgggctgacctttgtttttttaacaatcaggcatttttaattagataatccactcatgtatttccccctcactgcagttgtctgcatttttagcctcttttctcttcgttagttgtcagaatatgccttcgtcaaggctcagaggtaacaagacagaaaattcatctgggattttcctgctgtggctggcacattcttctgattaacagacacttgtatgatgctttaggctagttagtgcattttttagcaaacatttatcttaaacatcacagatccactggggggtgcaaggggctactgttagtcctcttgttagatgcagtcactcctcctggtcacctagtgagcagggacagagccaggagtcaagtgcagtgccaaggtgcatgaccctctgagaagtcactgggctgatttgacctccgactcattggttgtgcaaatgccatgtgcagcctttcctgaggccataggagggcttcctgcagctgagatctatgcaggccatcctctcaacaagtgccactccaagggcggtcctcggtgcagcagcatcagcttcacttgtgggggggtgggggaaggggcggtctcagaaatgcaggttcccaggtcccaccctggacttctgaaggggtgtggcatctgtgtttctgatgcttactacaatatgtgaaccactactttagaaaatctgctttaacttggtattcctctaattgtgttccctaggaaatgactgtcccaagagccagtgattattccaggtgttccctggaaaggtcaagtgagtctgggaaacactatgtctgtacacctcttgaaggtgtcgaatgtatgtttatacatcagtggaacccatttttctagcctagcaagtcccaaacacattacactgaagagattttggtgaggaaacttgctggagttttcagggaacactgttctaggcttaggtgaccttaggatcactcaagtagacccttcactccctgcgagaaattaggatgaataactacctgtggcattgttggttctgaacttttacagttcaggcctgctgtgaatctttgatgaagctttaaggtgacactgttgtacaagatgtcagctttgctgaaacgcacattacctggaataagtgctttaattgtagaattagaatgggatttactgtactgttttaaatgagattggcttcagaatccattacagttaccttacatagcacttgatacgtgttaaatgaacatatgaatgtaatttatatattcctagaatttaagttactttgtgagatttgggcctgtccctcaatgccagtttaggatttctttttttctataccttgaaatgattataaaatagattttcatgggaattttaaaaactctatccaaaacatttttggagcattttaaagccccatacacagaagtatacgaaagcacacaaaacactccaagtttcagcagttttagcgccaccattaacccactttgcttgtctcatgaaaaatctttgttaaagtttgtacacaggtaacaaaaagttactttaaaagatatataaagggctgtaagctaattgtggtgtctagtaagtagcataatgagatgtgaggagttggaactttgcgtgttttgcgtattttcatctgcattcagcttcttactctgggtttgtactcgagtgttatttctttacaaatgcccttgtaattaccactctgaagtctgctgactgtgtctcttgaacatacttaggatattctgcacattatggaaaaaggtaaattttagaagtttctgctctactaactgtagatatttatgactctgcgagttatctatttttataaccacctgtggtccattgttcattttaattcacatttcttatgaagtatggtaacagggagggagacacctagattagcagctcaatttgtactacttcagccaatctgtgaatgtaaaaactacactgttgccttgctaggatccaccctcctataatatggaacaaatatctgaatgaaatccaccctaggagacggagtcaaactaaacttgtggtttttcatttaacttttgactacagcatggccccatggcatccacaccaagagggtgttgtgatgaggtgccggtgtgcaaagggaactttagtttttccactggttcttatctgctagccttttacatacatgtgtactatatttgtttatagactgtaggtggatatataatttaaaagcttgatttaataaacatttaaccccctaaacttg

SEQ ID NO: 184689 - DNA, 1056 bp, Artificial Sequence
  derived and/or modified sequence
atggctgctgcccccctgaaggtgtgcatcgtgggcagcggcaactggggcagcgctgtggccaagatcatcggcaacaacgtgaagaagctgcagaagtttgccagcacagtgaagatgtgggtgtttgaggagaccgtgaatggaaggaagctgacagacatcatcaacaatgaccatgaaaatgtgaagtacctgcccggccacaagctgcctgaaaatgtggtggccatgagcaacctgtctgaggccgtgcaggatgctgacctgctggtgtttgtgatcccccaccagttcatccaccgcatctgtgatgagatcaccggccgggtgcccaagaaggccctgggcatcaccctcatcaagggcattgatgagggccctgagggcctgaagctgatcagtgacatcatccgggagaagatgggcatcgacatctctgtgctgatgggcgccaacatcgccaatgaggtggccgctgagaagttctgtgagaccaccatcggcagcaaggtgatggagaatggcctgctcttcaaggagctgctgcagacccccaacttccgcatcaccgtggtggatgatgctgacacagtggagctgtgtggggccctgaagaacatcgtggccgtgggcgccggcttctgtgatggcctgcgctgtggggacaacaccaaggccgccgtcatccggctgggcctgatggagatgattgcctttgcccgcatcttctgcaagggccaggtgtccacagccaccttcctggagagctgtggggtggccgacctgatcaccacctgctacggcggcaggaacagaagagtggccgaggcctttgccaggacaggcaagaccatcgaggagctggagaaggagatgctgaatggccagaagctgcagggcccccagaccagcgctgaggtgtaccgcatcctgaagcagaagggcctgctggacaagttccccctcttcaccgctgtgtaccagatctgctatgagagcaggcctgtgcaggagatgctgagctgcctgcagagccaccctgagcacacctag

SEQ ID NO: 184690 - DNA, 1056 bp, Artificial Sequence
  derived and/or modified sequence
atggccgccgcccccctgaaggtgtgcatcgtgggcagcggcaactgggggagcgccgtggccaagatcatcggtaataacgtgaagaagctccagaaattcgccagcactgtcaaaatgtgggtgtttgaagagacagtgaatggacgtaaactaaccgatatcattaataatgatcacgaaaatgtgaaatacctgccagggcataaactgcccgaaaatgtggttgcaatgtccaacctgagcgaggcagtgcaggacgcagatcttttagtattcgtgatcccccaccagttcatccaccggatttgcgacgaaattactggccgcgtgccaaagaaggccctgggcataacccttatcaaagggatcgatgaaggccctgaagggctgaaactcatttcagacattatacgcgaaaaaatgggaatcgacatttcagtgctaatgggagccaacatagccaatgaagtggcagcagaaaagttctgcgaaacaaccattggatccaaggttatggaaaatggacttctgtttaaagaactgcttcagacgcccaacttcaggatcacagtcgtagacgacgctgataccgtggagttatgtggggcccttaagaatatcgtggccgtcggggccggcttttgtgacgggctccgatgtggagataacacaaaggccgccgtcattaggttgggcctcatggagatgatagctttcgccagaatcttttgtaagggacaggtatcaaccgctactttcctcgagtcctgtggcgtcgcggacctgatcaccacgtgttatggcggtcgtaataggcgcgtcgctgaggcattcgccaggaccggaaagaccattgaagaactggagaaagagatgcttaacgggcaaaagctgcaggggccacagacgtcggcagaagtgtacagaatactaaagcaaaaggggctgctagataaattccccctgttcacagcggtctaccagatctgctatgaatccaggccagtgcaggagatgctgagctgcttgcagtctcatcctgagcacacgtag

SEQ ID NO: 184691 - DNA, 1056 bp, Artificial Sequence
  derived and/or modified sequence
atggccgcagcccctctcaaggtgtgtatcgtcggatcgggtaattggggcagtgctgtggcaaagatcataggcaacaacgtaaagaagctgcagaagtttgctagcaccgtcaaaatgtgggtttttgaagagacagtcaacggacgaaagcttacggatatcatcaataacgatcacgagaatgtgaaatacctccctgggcacaaactccccgaaaatgtggtggccatgtccaacctaagtgaggcagtgcaggatgccgacctgcttgtgttcgttatccctcatcagtttatacaccgcatatgtgacgaaattacgggacgcgtgccgaagaaggcactgggtatcacccttataaagggcatcgatgaaggcccagaggggctcaagctaatcagtgacatcatccgtgaaaagatgggaattgatattagcgtactcatgggggcaaatattgctaatgaggtggctgccgagaagttctgtgagactactataggatcgaaagtaatggagaacggactactgtttaaggaattgctgcaaacacctaattttcggattaccgtggtagacgacgcggacactgtcgagctctgcggggctttgaagaacatcgtggcggtgggcgcaggcttttgtgacggactcagatgcggcgataacactaaagctgccgtgattcggcttggcttgatggagatgatagctttcgctcgcatattctgtaaaggacaggtttctacggccacatttctggagagttgtggcgtggcagacctgataactacgtgttacggcggacgaaatcgacgggtggctgaagcgtttgctcgcacgggcaagaccattgaggaacttgaaaaagagatgctgaatggccagaaactgcagggaccacaaaccagtgccgaggtatataggattttgaaacagaaggggttgcttgataaattcccattgttcaccgcagtgtatcagatatgctacgagtcacgccctgtacaggagatgctgagttgcctgcaatcccaccctgagcatacttag

SEQ ID NO: 184692 - DNA, 1056 bp, Artificial Sequence
  derived and/or modified sequence
atggccgccgcccccctgaaggtgtgcatcgtgggcagcggcaactggggcagcgccgtggccaagatcatcggcaacaacgtgaagaagctgcagaagttcgccagcaccgtgaagatgtgggtgttcgaggagaccgtgaacggcagaaagctgaccgacatcatcaacaacgaccacgagaacgtgaagtacctgcccggccacaagctgcccgagaacgtggtggccatgagcaacctgagcgaggccgtgcaggacgccgacctgctggtgttcgtgatcccccaccagttcatccacagaatctgcgacgagatcaccggcagagtgcccaagaaggccctgggcatcaccctgatcaagggcatcgacgagggccccgagggcctgaagctgatcagcgacatcatcagagagaagatgggcatcgacatcagcgtgctgatgggcgccaacatcgccaacgaggtggccgccgagaagttctgcgagaccaccatcggcagcaaggtgatggagaacggcctgctgttcaaggagctgctgcagacccccaacttcagaatcaccgtggtggacgacgccgacaccgtggagctgtgcggcgccctgaagaacatcgtggccgtgggcgccggcttctgcgacggcctgagatgcggcgacaacaccaaggccgccgtgatcagactgggcctgatggagatgatcgccttcgccagaatcttctgcaagggccaggtgagcaccgccaccttcctggagagctgcggcgtggccgacctgatcaccacctgctacggcggcagaaacagaagagtggccgaggccttcgccagaaccggcaagaccatcgaggagctggagaaggagatgctgaacggccagaagctgcagggcccccagaccagcgccgaggtgtacagaatcctgaagcagaagggcctgctggacaagttccccctgttcaccgccgtgtaccagatctgctacgagagcagacccgtgcaggagatgctgagctgcctgcagagccaccccgagcacacctag

SEQ ID NO: 184693 - protein, 386 aa, Artificial Sequence [sequence omitted]

SEQ ID NO: 184694 - DNA, 1161 bp, Artificial Sequence
  derived and/or modified sequence
atggcagctgtggagaccagagtttgtgagacggacggctgctcctccgaagccaagttgcagtgcccaacatgtattaagcttggcattcagggatcatacttttgttcccaggagtgttttaagggctcctgggctacacacaaactgttacacaaaaaagctaaggatgaaaaagctaaacgagaggtgtccagttggaccgtggagggagatatcaataccgacccatgggcaggataccgctacaccggaaaactgagaccccattatcccctgatgccgaccaggcccgtcccttcgtacatacagagacctgattatgctgatcatccccttggcatgagcgagtcagagcaggccctcaaaggcacctctcaaatcaagctcctgtcctctgaggacatcgaaggcatgagactggtttgccgcctcgctcgcgaggtcctggatgtggctgccggaatgattaagcccggcgtgaccaccgaagagatcgaccatgcggtccacctggcctgtattgccagaaattgttacccatcaccgcttaactactacaattttcccaagagctgttgtaccagcgtgaatgaagtgatatgccatggtattccagataggcggcctttgcaggagggtgacatcgtaaacgtggacatcaccttgtaccgaaatggctatcacggagatctgaatgaaacgttctttgtcggtgaggtggacgacggcgcccggaagcttgtgcagactacttatgaatgtctgatgcaggctattgatgccgttaagccaggcgtgaggtatcgagaactcggtaacattatccagaaacacgctcaagcgaacggcttttcagtcgtgaggagttattgcggccacgggattcacaaactgttccacacagcacccaatgtccctcattacgccaagaacaaagccgtaggagttatgaagagcggtcacgtgttcaccattgagcccatgatctgtgagggtgggtggcaggatgagacttggccggatgggtggactgctgtaacccgcgatggcaagaggtcggcgcagtttgagcacaccctgttagtcacagacactggctgtgagattctgacacgcagattggactccgctcgtccccacttcatgagccagttctag

SEQ ID NO: 184695 - DNA, 1161 bp, Artificial Sequence
  derived and/or modified sequence
atggctgctgtggagaccagggtgtgtgaaacagatggctgcagcagcgaggccaagctgcagtgccccacctgcatcaagctgggcatccagggcagctacttctgcagccaggagtgcttcaagggctcctgggccacccacaagctgctgcacaagaaggccaaggatgagaaggccaagcgggaggtgtcctcctggacagtggagggggacatcaacacagacccctgggccggctaccgctacaccgggaagctgcggccccactaccccctgatgcccaccaggcctgtgcccagctacatccagaggccagactatgctgaccaccccctgggcatgtctgagagcgagcaggccctgaagggcaccagccagatcaagctgctgagcagcgaggacatcgagggcatgaggctggtgtgccgcctggcccgggaggtgctggatgtggccgccggcatgatcaagccaggagtgaccacagaggagattgaccatgctgtgcacctggcctgcatcgccaggaactgctaccccagccccctgaactactacaacttccccaagagctgctgcacctctgtgaatgaggtgatctgccacggcatcccagaccggcggcccctgcaggagggggacatcgtgaatgtggacatcaccctgtacagaaatggctaccatggagacctgaatgagaccttctttgtgggggaggtggatgatggagccaggaagctggtgcagaccacctatgagtgcctgatgcaggccattgatgctgtgaagccaggagtgcgctaccgggagctgggcaacatcatccagaagcacgcccaggccaacggcttctctgtggtgcgcagctactgcggccacggcatccacaagctgttccacacagccccaaatgtgccccactacgccaagaacaaggctgtgggcgtgatgaagagcggccacgtgttcaccatcgagcccatgatctgtgagggcggctggcaggatgagacctggccagatggctggacagctgtgaccagagatggcaagaggtctgcccagtttgagcacaccctgctggtgacagacaccggctgtgagatcctgacccggcggctggacagcgcccggccccacttcatgagccagttctag

SEQ ID NO: 184696 - DNA, 1161 bp, Artificial Sequence
  derived and/or modified sequence
atggccgccgtggagacccgggtgtgcgagaccgacggctgcagctccgaggccaagttgcaatgcccaacatgcatcaaacttggcattcaagggagctacttttgtagccaagaatgttttaaaggttcctgggccactcataagctgctgcacaaaaaagccaaggatgagaaagcaaaaagggaggtatcatcctggactgtcgagggcgacatcaataccgacccctgggccggttatcgttatacaggtaaactcaggccgcactatccactgatgccaacgaggcctgtgccgagctacatccagcggccggattacgcagatcatccattggggatgtccgaaagtgagcaggcactgaagggcacctcccaaatcaaactgctatccagtgaagacattgagggtatgcggctcgtctgtcgccttgctagagaggttctggacgtggctgcaggaatgataaaaccaggtgtgacaaccgaggaaatcgaccacgccgtacacctagcctgtattgcgcggaattgctatccctcgcccttgaattattacaacttcccgaagtcctgctgtactagcgtgaatgaagttatttgtcacgggatcccggaccgccgaccactgcaagaaggagacatagtgaatgtagacataacattatacaggaacggatatcacggcgacctgaacgagactttttttgtgggtgaggtcgatgacggggctagaaaactggtgcagacgacatatgaatgcctgatgcaggcaatagatgcagtcaagcctggagtgcggtaccgggaactgggtaacattattcaaaagcacgcccaggctaatggcttcagcgttgtgaggtcttactgtggtcatggcatacataagctgttccacacagcacccaacgtgccacactacgctaaaaacaaagccgtgggggtcatgaaaagcggacacgtgtttactattgaacccatgatctgtgaagggggctggcaggacgaaacatggcccgacggatggacagcagtgactcgcgacggaaagagaagcgcccaattcgagcatacacttcttgttacagatacagggtgcgagatactcactcgtcgcctcgattccgccagaccccactttatgtcccagttctag

SEQ ID NO: 184697 - DNA, 1161 bp, Artificial Sequence
  derived and/or modified sequence
atggcggcagtagagacgagggtctgcgagactgacggctgctcaagtgaggcaaaattgcagtgtccaacctgtattaaactcgggatccaagggtcatacttttgcagccaggaatgcttcaaaggaagctgggccacccacaaattgttacacaagaaggccaaggatgaaaaggcgaaacgagaggtttccagttggacggtggaaggtgacataaacaccgacccttgggccggttacaggtataccgggaagcttcggccacattacccactgatgcctacccgaccagtgccttcatacatccagcggccagattatgctgaccaccctctcgggatgagcgagtccgagcaggcacttaagggtacaagtcagatcaagctgctgtcaagcgaggatattgagggcatgagactggtgtgccgactggccagggaagtgcttgacgttgccgcagggatgattaaacctggggtgaccaccgaagaaattgatcacgctgttcatcttgcttgtattgcccgaaactgctatccttcccctctgaactattacaactttcctaaatcttgttgtacctcggttaacgaagttatctgtcatggcattccagatcgcaggccccttcaggaaggtgatatcgtaaacgtggacatcaccttgtacaggaacgggtatcacggggatctgaacgagacgttcttcgttggtgaggtggacgacggggctcgaaagctggttcaaaccacctatgagtgcctcatgcaggccattgatgccgtgaaacctggagtccggtacagagagcttggcaatatcatccagaaacacgcccaggccaatggattcagtgtcgtgcgctcgtattgtggccacggtattcacaagctgtttcacactgcgcctaacgtgcctcactatgccaagaataaagccgtcggcgtcatgaaatcgggtcatgtgttcacaatcgagcctatgatatgtgaagggggttggcaagacgaaacctggcccgacggctggactgccgtgactcgcgatggaaaacggtctgcccagtttgagcacacactgctggtgactgacactggatgcgaaatactgacacgcaggcttgatagtgctcggcctcacttcatgtcccagttttag

SEQ ID NO: 184698 - DNA, 2791 bp, Artificial Sequence
  derived and/or modified sequence
ctcccgcgcccaggccagcggcgggcccagctcctcccccgactcggtctctctcccctcccctccgcccggcagttcctccctcccgccgccgcctcttcctcggtgaggcgctcttccagcgggcaggcagcatggcggccgtggagacgcgggtgtgcgagacagacggctgcagcagtgaggccaagctccagtgtcccacttgcatcaagctgggcatccagggctcgtacttctgctcgcaggaatgttttaaaggaagttgggctactcacaagttactacataagaaagcaaaagatgaaaaggcgaagcgagaagtgtcttcctggactgtggaaggtgatattaatactgacccatgggcaggttatcgatatactggtaaactcagaccacattatccactgatgccaacaaggccagtgccaagttatattcaaagaccagattatgctgatcatcccttaggaatgtctgaatctgaacaggctcttaaaggtacttctcagattaaattactctcatctgaagatatagaagggatgcgacttgtatgtaggcttgctagagaagttttggatgttgctgccggcatgattaaaccaggtgtaactactgaagaaatagatcacgctgtacacttagcatgtattgcaagaaattgctacccttctcccctgaattattataatttcccaaagtcttgttgtacctcagtgaatgaagtcatttgccatggaataccagacagaaggcccttacaagaaggtgacattgttaatgtggatatcactctttatcgcaatggttatcatggggacctgaatgagacattttttgttggagaagtggatgatggagcacggaaacttgttcagaccacatatgagtgcctgatgcaagccattgatgcagtgaagcctggtgttcggtacagagaattgggaaacattatccagaagcatgcccaagcaaatgggttttcagttgttcgaagctattgtgggcatggaatccacaagctttttcatacagctcccaatgtaccccactatgctaaaaataaagcagttggagtgatgaagtcgggccatgtatttacaattgagccaatgatttgtgaaggcggatggcaggatgaaacctggccagatggttggactgcggtgacaagagacggaaagcggtctgctcagtttgagcacaccctcctggtcacagacactggctgtgaaatcctaacccggcgacttgacagtgcacggcctcacttcatgtctcaattttaatttctcccaagatggcacatctcagtaccttcttactgtgctatgcattttattgagagtacagaaaggaagaggaacctttttttaatcacttgttttgttttgactatagataagaaaggactacagcatttgatgtgtgtcctcaagaacttgtcttgggtctgaaaaagctgagaagaataaaggaaacattgctcaactcttcagccccctccccctgcacacctgttttctcatttgccctttgagcacttttacttaaacttgcttgtagttgcttttatcactgccgcaaaacagccatcaagagccatctgctttccaggtgaacattggaaatgagaatctttgaaacttagcaatatgtgttgcaccagattttttaaattatatatatggaaatatatatgtatacattttaagttctgtatacataattaccaaacactatgtgacctggagtttgtgttgtttctgctctgacaggtttatatgttcttacaaatggatccatagtttgcagtgatttaattcctggttgggatttggcctcccctctcccccatgctaattatttacccttgtaattgtgcatagggaagcactcacccaatgagactttctccaatgtggactctgtgtgtcagtgaatgaatgtagtaaaattcactttggaaggttatcaggcttttaaaaatctagtttatggcaaaaatagccattttccaagtggtggctgactgttgcagggaatgagaatttcataatacactgctatttcagacctctgtttggtcagaaatggaaaagaaaaagccccctttcttcccttttctgttttacttcaagggcataccttggaggtgctcagagaagcgtgaagtttgcactatggtggaggatggggaaagagttctaaagtgtctccagctgtgaacccaggaggtcaagtgggctattaaaatctaacgttgagtaaatgtgatagtgatgagaaaggaattttgtgtactgtaaccttgcagtagagatgcagctgtccttcgtgtgtggaaacacacctctcctttacatagttgggaacctcattagaaatgacctcagctgccccatatctacgttcctttcagcagttgtccaagtaggagtgtatccagtgaagacatatcaaatcacaaagtcattgtcattagagtgtacttgattactgggcatccttgtaatataatttcataccactgacacattatacttgtaagagaacatctttcccagagtgcctcagaccttattgctttaaaatataataatgttttcattacttttattatttgaatgatttagtaaagttgactgaatctggtatagactttgggagtatgtgtgtgaagtttttatcaaactgtaatatttgtgaatggaatgccttgcaatatgaatgttaatataatgtgtaaagggagattaaaaagtttgaatgattatcctaccat

SEQ ID NO: 184699 - DNA, 1161 bp, Artificial Sequence
  derived and/or modified sequence
atggccgccgtggagaccagagtgtgcgagaccgacggctgcagcagcgaggccaagctgcagtgccccacctgcatcaagctgggcatccagggcagctacttctgcagccaggagtgcttcaagggcagctgggccacccacaagctgctgcacaagaaggccaaggacgagaaggccaagagagaggtgagcagctggaccgtggagggcgacatcaacaccgacccctgggccggctacagatacaccggcaagctgagaccccactaccccctgatgcccaccagacccgtgcccagctacatccagagacccgactacgccgaccaccccctgggcatgagcgagagcgagcaggccctgaagggcaccagccagatcaagctgctgagcagcgaggacatcgagggcatgagactggtgtgcagactggccagagaggtgctggacgtggccgccggcatgatcaagcccggcgtgaccaccgaggagatcgaccacgccgtgcacctggcctgcatcgccagaaactgctaccccagccccctgaactactacaacttccccaagagctgctgcaccagcgtgaacgaggtgatctgccacggcatccccgacagaagacccctgcaggagggcgacatcgtgaacgtggacatcaccctgtacagaaacggctaccacggcgacctgaacgagaccttcttcgtgggcgaggtggacgacggcgccagaaagctggtgcagaccacctacgagtgcctgatgcaggccatcgacgccgtgaagcccggcgtgagatacagagagctgggcaacatcatccagaagcacgcccaggccaacggcttcagcgtggtgagaagctactgcggccacggcatccacaagctgttccacaccgcccccaacgtgccccactacgccaagaacaaggccgtgggcgtgatgaagagcggccacgtgttcaccatcgagcccatgatctgcgagggcggctggcaggacgagacctggcccgacggctggaccgccgtgaccagagacggcaagagaagcgcccagttcgagcacaccctgctggtgaccgacaccggctgcgagatcctgaccagaagactggacagcgccagaccccacttcatgagccagttctag

SEQ ID NO: 184700 - protein, 949 aa, Artificial Sequence
  derived and/or modified sequence
MASNHPAFSFHQKQVLRQELTQIQSSLNGGGGHGGKGAPGPGGALPTCPACHKITPRTEAPVSSVSNSLENALHTSAHSTEESLPKRPLGKHSKVSVEKIDLKGLSHTKNDRNVECSFEVLWSDSSITSVTKSSSEVTEFISKLCQLYPEENLEKLIPCLAGPDAFYVERNHVDLDSGLRYLASLPSHVLKNDHVRRFLSTSSPPQQLQSPSPGNPSLSKVGTVMGVSGRPVCGVAGIPSSQSGAQHHGQHPAGSAAPLPHCSHAGSAGSALAYRTQMDTSPAILMPSSLQTPQTQEQNGILDWLRKLRLHKYYPVFKQLSMEKFLSLTEEDLNKFESLTMGAKKKLKTQLELEKEKSERRCLNPSAPPLVTSSGVARVPPTSHVGPVQSGRGSHAAELRVEVEQPHHQLPREGSSSEYSSSSSSPMGVQAREESSDSAEENDRRVEIHLESSDKEKPVMLLNHFTSSSARPTAQVLPVQNEASSNPSGHHPLPPQMLSAASHITPIRMLNSVHKPERGSADMKLLSSSVHSLLSLEERNKGSGPRSSMKVDKSFGSAMMDVLPASAPHQPVQVLSGLSESSSMSPTVSFGPRTKVVHASTLDRVLKTAQQPALVVETSTAATGTPSTVLHAARPPIKLLLSSSVPADSAISGQTSCPNNVQISVPPAIINPRTALYTANTKVAFSAMSSMPVGPLQGGFCANSNTASPSSHPSTSFANMATLPSCPAPSSSPALSSVPESSFYSSSGGGGSTGNIPASNPNHHHHHHHQQPPAPPQPAPPPPGCIVCTSCGCSGSCGSSGLTVSYANYFQHPFSGPSVFTFPFLPFSPMCSSGYVSAQQYGGGSTFPVVHAPYSSSGTPDPVLSGQSTFAVPPMQNFMAGTAGVYQTQGLVGSSNGSSHKKSGNLSCYNCGATGHRAQDCKQPSMDFNRPGTFRLKYAPPAESLDSTD

SEQ ID NO: 184701 - protein, 757 aa, Artificial Sequence
  derived and/or modified sequence
MALGEEKAEAEASEDTKAQSYGRGSCRERELDIPGPMSGEQPPRLEAEGGLISPVWGAEGIPAPTCWIGTDPGGPSRAHQPQASDANREPVAERSEPALSGLPPATMGSGDLLLSGESQVEKTKLSSSEEFPQTLSLPRTTTICSGHDADTEDDPSLADLPQALDLSQQPHSSGLSCLSQWKSVLSPGSAAQPSSCSISASSTGSSLQGHQERAEPRGGSLAKVSSSLEPVVPQEPSSVVGLGPRPQWSPQPVFSGGDASGLGRRRLSFQAEYWACVLPDSLPPSPDRHSPLWNPNKEYEDLLDYTYPLRPGPQLPKHLDSRVPADPVLQDSGVDLDSFSVSPASTLKSPTNVSPNCPPAEATALPFSGPREPSLKQWPSRVPQKQGGMGLASWSQLASTPRAPGSRDARWERREPALRGAKDRLTIGKHLDMGSPQLRTRDRGWPSPRPEREKRTSQSARRPTCTESRWKSEEEVESDDEYLALPARLTQVSSLVSYLGSISTLVTLPTGDIKGQSPLEVSDSDGPASFPSSSSQSQLPPGAALQGSGDPEGQNPCFLRSFVRAHDSAGEGSLGSSQALGVSSGLLKTRPSLPARLDRWPFSDPDVEGQLPRKGGEQGKESLVQCVKTFCCQLEELICWLYNVADVTDHGTAARSNLTSLKSSLQLYRQFKKDIDEHQSLTESVLQKGEILLQCLLENTPVLEDVLGRIAKQSGELESHADRLYDSILASLDMLAGCTLIPDKKPMAAMEHPCEGV

SEQ ID NO: 184702 - protein, 294 aa, Artificial Sequence
  derived and/or modified sequence
MGLASWSQLASTPRAPGSRDARWERREPALRGAKDRLTIGKHLDMGSPQLRTRDRGWPSPRPEREKRTSQSARRPTCTESRWKSEEEVESDDEYLALPARLTQVSSLVSYLGSISTLVTLPTGDIKGQSPLEVSDSDGPASFPSSSSQSQLPPGAALQGSGDPEGQNPCFLRSFVRAHDSAGEGSLGSSQALGVSSGLLKTRPSLPARLDRWPFSDPDVEGQLPRKGGEQGKESLVQCVKVMTLNVRKLCVQVSCLFPQSTNIIIKHVHVDQALFMCQALCCTLSYSVLTTFTR

SEQ ID NO: 184703 - protein, 700 aa, Artificial Sequence
  derived and/or modified sequence
MALGEEKAEAEASEDTKAQSYGRGSCREQPPRLEAEGGLISPVWGAEGIPAPTCWIGTDPGGPSRAHQPQASDANREPVAERSEPALSGLPPATMGSGDLLLSGESQVEKTKLSSSEEFPQTLSLPRTTTICSGHDADTEDDPSLADLPQALDLSQQPHSSGLSCLSQWKSVLSPGSAAQPSSCSISASSTGSSLQGHQERAEPRGGSLAKVSSSLEPVVPQEPSSVVGLGPRPQWSPQPVFSGGDASGLGRRRLSFQAEYWACVLPDSLPPSPDRHSPLWNPNKEYEDLLDYTYPLRPGPQLPKHLDSRVPADPVLQDSGVDLDSFSVSPASTLKSPTNVSPNCPPAEATALPFSGPREPSLKQWPSRVPQKQGGMGLASWSQLASTPRAPGSRDARWERREPALRGAKDRLTIGKHLDMGSPQLRTRDRGWPSPRPEREKRTSQSARRPTCTESRWKSEEEVESDDEYLALPARLTQVSSLVSYLGSISTLVTLPTGDIKGQSPLEVSDSDGPASFPSSSSQSQLPPGAALQGSGDPEGQNPCFLRSFVRAHDSAGEGSLGSSQALGVSSGLLKTRPSLPARLDRWPFSDPDVEGQLPRKGGEQGKESLVQCVKTFCCQLEELICWLYNVADVTDHGTAARSNLTSLKSSLQLYRVICGPGSGLFPHKSVAKLLDYKVKSQITNVWYVIAQLTIIPEI

SEQ ID NO: 184704 - protein, 670 aa, Artificial Sequence
  derived and/or modified sequence
MALGEEKAEAEASEDTKAQSYGRGSCRERELDIPGPMSGEQPPRLEAEGGLISPVWGAEGIPAPTCWIGTDPGGPSRAHQPQASDANREPVAERSEPALSGLPPATMGSGDLLLSGESQVEKTKLSSSEEFPQTLSLPRTTTICSGHDADTEDDPSLADLPQALDLSQQPHSSGLSCLSQWKSVLSPGSAAQPSSCSISASSTGSSLQGHQERAEPRGGSLAKVSSSLEPVVPQEPSSVVGLGPRPQWSPQPVFSGGDASGLGRRRLSFQAEYWACVLPDSLPPSPDRHSPLWNPNKEYEDLLDYTYPLRPGPQLPKHLDSRVPADPVLQDSGVDLDSFSVSPASTLKSPTNVSPNCPPAEATALPFSGPREPSLKQWPSRVPQKQGGMGLASWSQLASTPRAPGSRDARWERREPALRGAKDRLTIGKHLDMGSPQLRTRDRGWPSPRPEREKRTSQSARRPTCTESRWKSEEEVESDDEYLALPARLTQVSSLVSYLGSISTLVTLPTGDIKGQSPLEVSDSDGPASFPSSSSQSQLPPGAALQGSGDPEGQNPCFLRSFVRAHDSAGEGSLGSSQALGVSSGLLKTRPSLPARLDRWPFSDPDVEGQLPRKGGEQGKESLVQCVKTFCCQLEELICWLYNVADVTDHGTAARSNLTSLKSSLQLYRF

SEQ ID NO: 184705 - DNA, 2274 bp, Artificial Sequence
  derived and/or modified sequence
atggccctgggcgaggagaaggccgaggccgaggccagcgaggacaccaaggcccagagctacggcagaggcagctgcagagagagagagctggacatccccggccccatgagcggcgagcagccccccagactggaggccgagggcggcctgatcagccccgtgtggggcgccgagggcatccccgcccccacctgctggatcggcaccgaccccggcggccccagcagagcccaccagccccaggccagcgacgccaacagagagcccgtggccgagagaagcgagcccgccctgagcggcctgccccccgccaccatgggcagcggcgacctgctgctgagcggcgagagccaggtggagaagaccaagctgagcagcagcgaggagttcccccagaccctgagcctgcccagaaccaccaccatctgcagcggccacgacgccgacaccgaggacgaccccagcctggccgacctgccccaggccctggacctgagccagcagccccacagcagcggcctgagctgcctgagccagtggaagagcgtgctgagccccggcagcgccgcccagcccagcagctgcagcatcagcgccagcagcaccggcagcagcctgcagggccaccaggagagagccgagcccagaggcggcagcctggccaaggtgagcagcagcctggagcccgtggtgccccaggagcccagcagcgtggtgggcctgggccccagaccccagtggagcccccagcccgtgttcagcggcggcgacgccagcggcctgggcagaagaagactgagcttccaggccgagtactgggcctgcgtgctgcccgacagcctgccccccagccccgacagacacagccccctgtggaaccccaacaaggagtacgaggacctgctggactacacctaccccctgagacccggcccccagctgcccaagcacctggacagcagagtgcccgccgaccccgtgctgcaggacagcggcgtggacctggacagcttcagcgtgagccccgccagcaccctgaagagccccaccaacgtgagccccaactgcccccccgccgaggccaccgccctgcccttcagcggccccagagagcccagcctgaagcagtggcccagcagagtgccccagaagcagggcggcatgggcctggccagctggagccagctggccagcacccccagagcccccggcagcagagacgccagatgggagagaagagagcccgccctgagaggcgccaaggacagactgaccatcggcaagcacctggacatgggcagcccccagctgagaaccagagacagaggctggcccagccccagacccgagagagagaagagaaccagccagagcgccagaagacccacctgcaccgagagcagatggaagagcgaggaggaggtggagagcgacgacgagtacctggccctgcccgccagactgacccaggtgagcagcctggtgagctacctgggcagcatcagcaccctggtgaccctgcccaccggcgacatcaagggccagagccccctggaggtgagcgacagcgacggccccgccagcttccccagcagcagcagccagagccagctgccccccggcgccgccctgcagggcagcggcgaccccgagggccagaacccctgcttcctgagaagcttcgtgagagcccacgacagcgccggcgagggcagcctgggcagcagccaggccctgggcgtgagcagcggcctgctgaagaccagacccagcctgcccgccagactggacagatggcccttcagcgaccccgacgtggagggccagctgcccagaaagggcggcgagcagggcaaggagagcctggtgcagtgcgtgaagaccttctgctgccagctggaggagctgatctgctggctgtacaacgtggccgacgtgaccgaccacggcaccgccgccagaagcaacctgaccagcctgaagagcagcctgcagctgtacagacagttcaagaaggacatcgacgagcaccagagcctgaccgagagcgtgctgcagaagggcgagatcctgctgcagtgcctgctggagaacacccccgtgctggaggacgtgctgggcagaatcgccaagcagagcggcgagctggagagccacgccgacagactgtacgacagcatcctggccagcctggacatgctggccggctgcaccctgatccccgacaagaagcccatggccgccatggagcacccctgcgagggcgtgtag

SEQ ID NO: 184706 - DNA, 2103 bp, Artificial Sequence
  derived and/or modified sequence
atggccctgggcgaggagaaggccgaggccgaggccagcgaggacaccaaggcccagagctacggcagaggcagctgcagagagcagccccccagactggaggccgagggcggcctgatcagccccgtgtggggcgccgagggcatccccgcccccacctgctggatcggcaccgaccccggcggccccagcagagcccaccagccccaggccagcgacgccaacagagagcccgtggccgagagaagcgagcccgccctgagcggcctgccccccgccaccatgggcagcggcgacctgctgctgagcggcgagagccaggtggagaagaccaagctgagcagcagcgaggagttcccccagaccctgagcctgcccagaaccaccaccatctgcagcggccacgacgccgacaccgaggacgaccccagcctggccgacctgccccaggccctggacctgagccagcagccccacagcagcggcctgagctgcctgagccagtggaagagcgtgctgagccccggcagcgccgcccagcccagcagctgcagcatcagcgccagcagcaccggcagcagcctgcagggccaccaggagagagccgagcccagaggcggcagcctggccaaggtgagcagcagcctggagcccgtggtgccccaggagcccagcagcgtggtgggcctgggccccagaccccagtggagcccccagcccgtgttcagcggcggcgacgccagcggcctgggcagaagaagactgagcttccaggccgagtactgggcctgcgtgctgcccgacagcctgccccccagccccgacagacacagccccctgtggaaccccaacaaggagtacgaggacctgctggactacacctaccccctgagacccggcccccagctgcccaagcacctggacagcagagtgcccgccgaccccgtgctgcaggacagcggcgtggacctggacagcttcagcgtgagccccgccagcaccctgaagagccccaccaacgtgagccccaactgcccccccgccgaggccaccgccctgcccttcagcggccccagagagcccagcctgaagcagtggcccagcagagtgccccagaagcagggcggcatgggcctggccagctggagccagctggccagcacccccagagcccccggcagcagagacgccagatgggagagaagagagcccgccctgagaggcgccaaggacagactgaccatcggcaagcacctggacatgggcagcccccagctgagaaccagagacagaggctggcccagccccagacccgagagagagaagagaaccagccagagcgccagaagacccacctgcaccgagagcagatggaagagcgaggaggaggtggagagcgacgacgagtacctggccctgcccgccagactgacccaggtgagcagcctggtgagctacctgggcagcatcagcaccctggtgaccctgcccaccggcgacatcaagggccagagccccctggaggtgagcgacagcgacggccccgccagcttccccagcagcagcagccagagccagctgccccccggcgccgccctgcagggcagcggcgaccccgagggccagaacccctgcttcctgagaagcttcgtgagagcccacgacagcgccggcgagggcagcctgggcagcagccaggccctgggcgtgagcagcggcctgctgaagaccagacccagcctgcccgccagactggacagatggcccttcagcgaccccgacgtggagggccagctgcccagaaagggcggcgagcagggcaaggagagcctggtgcagtgcgtgaagaccttctgctgccagctggaggagctgatctgctggctgtacaacgtggccgacgtgaccgaccacggcaccgccgccagaagcaacctgaccagcctgaagagcagcctgcagctgtacagagtgatctgcggccccggcagcggcctgttcccccacaagagcgtggccaagctgctggactacaaggtgaagagccagatcaccaacgtgtggtacgtgatcgcccagctgaccatcatccccgagatctag

SEQ ID NO: 184707 - DNA, 2274 bp, Artificial Sequence
  derived and/or modified sequence
atggcactgggcgaggagaaagccgaagctgaagcttcagaagatactaaggcacagagttacggacgtggatcctgcagggaaagagagcttgacatcccgggtccaatgagcggcgaacagccacctcgcctggaggcggaaggagggctcatttccccggtctggggagcagagggcatccccgccccaacttgctggatcggtaccgacccagggggcccctcgagagcccatcaaccccaggcctcagacgccaatcgcgaaccagtggcggagcggagcgagcccgccctgtccggcctgcctccggctactatgggctccggggacctgcttctttcgggcgaatcacaggtcgagaagactaaactgtccagttctgaagagttcccccagactttatcactacctaggactactaccatttgctctggccacgacgccgacaccgaagatgacccgtctctggcagaccttccccaagcgttggacctgagccaacaaccacatagctccggcctttcgtgtctttcccaatggaagtccgtgttgagtccgggctccgccgcccagccctcatcttgctctataagcgcctccagtactggatcctctctgcagggccatcaagagagagctgaaccccgagggggttccttagccaaagttagctcgtccctggaacctgtggtgcctcaggagccatcgagcgtcgtgggactaggccccaggccccagtggagtcctcagcccgtgttctctggcggggacgctagcggactgggccgaagaagactctccttccaggctgagtactgggcatgcgttctgcctgattccctacctcccagtcccgatcgccattcacccctgtggaacccgaataaggagtatgaggatcttttggattacacctacccgctgcgccctggaccccagctgcctaagcacctcgattcaagagtgccagctgacccagtgttacaggattccggcgtggatttggactcatttagcgtgtcccccgcaagtacactcaagtcaccaactaacgtgtctcctaactgcccgcctgccgaagccaccgcactgccattctctgggccgagggaaccctccctgaaacagtggcctagccgcgtcccccagaagcaaggagggatgggactcgcctcttggtcccagctagcctccacgccaagggcacctggttctcgtgacgctcggtgggagcgtcgtgagccagccctgaggggagcaaaggatcgactcaccatcggcaaacacctcgacatgggctcaccccagctgcgcactcgggaccggggttggcccagcccacgtcctgagagagagaaaagaacttctcagtcagcaaggcgaccaacgtgtaccgaatcacgatggaagtccgaggaggaggtcgaatctgatgacgaatatcttgcgttgcctgcacgactgacacaggtgtcctctctggtctcatacctgggctctatcagcacccttgtgactttaccaacaggagatattaagggccaaagcccactggaagtcagcgattccgacggacctgcttcatttccaagttcctccagccaatcccagttgcctcccggcgcagccttgcagggatccggcgaccccgagggtcagaacccctgtttcctgcgatcattcgtgcgtgcccacgactctgccggtgagggcagtctggggtcaagtcaagccttgggtgtatcctctgggctgctgaaaacacggccttctctgccagcccgcctggatagatggccctttagcgaccccgacgtcgaagggcagctgccaaggaaagggggtgagcagggcaaggaaagcctagttcagtgtgtcaagaccttctgctgccagctggaggagctgatctgttggctgtataacgttgccgacgtcacagatcacggaacagctgcacgctccaacctgaccagtctcaaatcctcccttcagttgtatcgacagttcaagaaagacatcgatgaacaccagtcactgaccgagagcgtcctgcaaaaaggagaaatattgctgcagtgtctcttagagaacacacccgtgttagaagacgtgcttgggaggatagccaaacaaagcggagagctggaatcgcacgcagaccggctgtacgactctatactcgcctccctggacatgttagcaggttgcaccctgattcctgataagaaaccgatggcggctatggagcacccatgtgagggcgtctag

SEQ ID NO: 184708 - DNA, 2103 bp, Artificial Sequence
  derived and/or modified sequence
atggctctgggagaggagaaggcggaggctgaggcttccgaagatacaaaggcgcaatcctacggtagggggagttgcagggaacaaccccctcggctagaggcagaaggagggcttatctcacctgtctggggcgcggaaggaatacctgctcctacctgctggatcggcaccgatcccggcggcccctcgagagctcatcagcctcaggcgagtgatgcgaacagggagccagtcgcagaacggagcgaaccagcactgtccggccttcccccagctactatgggttctggtgatctgcttctgtctggagaaagccaagtggagaaaactaagctgagctcgagcgaggaattcccccagaccttgagtctcccccgcacaactacgatttgttccggtcacgatgccgacactgaggatgacccttccctcgcagatctcccccaggccctggacctgtcacaacagcctcactcaagcggcctgtcttgcctgagtcagtggaagtccgtgctcagccctggcagtgcggcgcagcccagcagctgttctatcagtgcctctagtaccggaagcagcctgcaggggcatcaggaacgagcagaaccacgcggcgggtcccttgctaaggtttcttcaagtttagaacctgtggtgccacaggaaccgtcgtccgttgttgggctgggtccaagaccccaatggagcccacagccagtgttctccggcggggatgcatctggtctaggccgaaggagactctcctttcaagcggagtattgggcttgtgtcctgccagactccttaccccctagccctgacagacactcaccactctggaatcctaataaggagtacgaagacttgctagattacacataccctttgaggcccggaccacagttacctaaacacctcgatagtcgtgtcccagccgatcccgtgctgcaggatagcggggtcgatctggatagtttttctgtatctcctgccagcacactcaaatccccaactaatgtcagccctaactgcccgcctgccgaggctaccgcactgccgttttctggccctcgggaacccagcctaaagcagtggccatcgagggtgccgcaaaagcagggaggcatgggactcgcttcttggtcacagctggcaagcacgccacgcgcacccggaagccgagatgccagatgggagcgcagagaaccagccttgcgcggagccaaggaccgtctgacaatcggaaaacacctcgacatgggcagcccccaactccgcacccgtgaccgcggctggccatctccaaggcctgagagggagaagaggacttcccagtctgcaaggagaccaacgtgtactgaaagcagatggaaaagtgaggaagaagtggagtcggatgacgagtaccttgccctccctgcccggttaacgcaagtaagctcccttgtcagttacctggggtctattagtaccctcgtcaccttgccgaccggagacatcaaggggcagagccccctggaggtatcggatagcgatgggcctgcgtcatttccatctagctcaagccagagtcagctgcccccgggcgcggctctgcagggctctggcgaccctgagggacagaatccctgctttctccggagcttcgtgagggcccatgactccgcgggagaaggaagtttgggttcaagtcaagcgctcggagtgtcttctggactcttaaagactagaccgtcgttaccagcccggctcgacaggtggcccttctcagacccggatgtcgagggccaactgccaaggaaaggcggcgaacagggaaaagaaagcctggtgcagtgtgtgaaaacattctgttgtcaactagaagaacttatttgttggctgtataacgtagccgacgtgaccgaccatggcaccgctgctaggtcgaacctgacttcattaaagtccagcctgcagctatatagggtcatatgtggccccggcagcgggctgtttccgcacaaatccgtcgcaaagctgttggactacaaggtcaagtctcaaataactaacgtgtggtatgtgatcgcacagctgacgataatccccgagatttag

SEQ ID NO: 184709 - DNA, 2274 bp, Artificial Sequence
  derived and/or modified sequence
atggccctgggggaggagaaggccgaggccgaggccagcgaggacaccaaggcccagagctatggccggggcagctgccgggagcgggagctggacatccctggccccatgtctggagagcagcccccccggctggaggccgagggcggcctcatcagccctgtgtggggcgctgagggcatcccagcccccacctgctggattggaacagaccccggcggccccagccgggcccaccagccccaggccagtgatgccaaccgggagcctgtggccgagaggtctgagcccgccctgagcggcctgcccccagccaccatgggcagcggggacctgctgctgtctggagagagccaggtggagaagaccaagctgagcagcagcgaggagttcccccagaccctgagcctgcccaggaccaccaccatctgcagcggccatgatgctgacacagaagatgaccccagcctggccgacctgccccaggccctggacctgagccagcagccccacagcagcggcctgagctgcctgagccagtggaagtctgtgctgagccctggcagcgctgcccagcccagcagctgcagcatcagcgccagcagcacaggcagcagcctgcagggccaccaggagcgggcagagccccggggcggcagcctggccaaggtgagcagcagcctggagcctgtggtgccccaggagcccagctctgtggtgggcctgggcccccggccccagtggagcccccagcccgtcttctctggaggagatgccagcggcctgggcagaagaaggctgtccttccaggccgagtactgggcctgtgtgctgcctgacagcctgccccccagcccagacagacacagccccctgtggaaccccaacaaggagtatgaggacctgctggactacacctaccccctgcggcccggcccccagctgcccaagcacctggacagccgggtgcctgctgaccctgtgctgcaggacagcggcgtggacctggacagcttctctgtgtccccagccagcaccctgaagagccccaccaacgtgagccccaactgccccccagctgaggccacagccctgcccttcagcggcccccgggagcccagcctgaagcagtggcccagccgggtgccccagaagcagggcggcatgggcctggcctcctggagccagctggccagcaccccccgggcccctggcagcagagatgcccgctgggagcggcgggagcccgccctgcggggggccaaggaccggctgaccatcggcaagcacctggacatgggcagcccccagctgcggacccgggaccggggctggcccagccccaggcctgagcgggagaagaggaccagccagagcgcccggcggcccacctgcacagagagccgctggaagtctgaggaggaggtggagagtgatgatgagtacctggccctgcctgcccggctgacccaggtgagcagcctggtgtcctacctgggcagcatcagcaccctggtgaccctgcccaccggggacatcaagggccagagccccctggaggtgtctgacagtgatggccctgccagcttccccagcagcagcagccagagccagctgcccccaggagctgccctgcagggcagcggggaccctgagggccagaacccctgcttcctgcggagctttgtgcgggcccatgacagcgctggggagggcagcctgggcagcagccaggccctgggcgtgagcagcggcctgctgaagacccggcccagcctgcctgcccggctggaccgctggcccttcagtgaccctgatgtggagggccagctgcccaggaagggcggggagcagggcaaggagagcctggtgcagtgtgtgaagaccttctgctgccagctggaggagctgatctgctggctgtacaacgtggctgatgtgacagaccacggcacagctgcccggagcaacctgaccagcctgaagagcagcctgcagctgtaccggcagttcaagaaggacattgatgagcaccagagcctgacagagagcgtgctgcagaagggggagatcctgctgcagtgcctgctggagaacacccctgtgctggaggatgtgctgggccgcatcgccaagcagagcggggagctggagagccatgctgaccggctgtatgacagcatcctggccagcctggacatgctggccggctgcaccctcatcccagacaagaagcccatggccgccatggagcacccctgtgagggcgtgtag

SEQ ID NO: 184710 - DNA, 5847 bp, Artificial Sequence
  derived and/or modified sequence
agcgcggccgaagggcgtggttggcgctcggtcctgccctgcgcgttttgggctgcggttggagggccgcagttgcagtcagggtccgccagctcggggccagcgcatggggctgctgagaccgctccggacgtgcgaagcgttcgcggtgcggtaggaagctgaagtcttcagcagaaccctgacctaggtagggagtctcaatggccctgggtgaagaaaaggcagaagcggaagcatctgaagacacaaaggcccagtcctatgggagagggagctgcagggagcgggagctggacatcccagggcccatgagtggggagcagcccccacgcctggaagctgagggagggctcatctcccctgtatggggggcagaagggatacctgcccctacttgctggattgggactgaccctggcggcccctctagagcccaccagccacaggccagtgatgccaacagagagcccgtagctgagaggtctgagcctgcactcagtggcctgcctcctgccaccatggggtctggagaccttctgctctccggggaaagccaggtggagaagaccaagctttcttcctccgaggagttccctcagactctgagccttcccagaacaacaactatttgctcaggacatgatgctgataccgaagatgatccatccctagcagatttgccccaggcactggacctcagccagcagcctcacagctcaggtctctcttgcctgtcacagtggaagtccgtgctgagcccaggttccgcagctcagccttccagctgcagcatctctgcttcctccacaggcagcagtctccagggtcaccaggagagggcggagcctcgtggtggttctctggccaaggtctcctcctccctggagccggtcgtcccccaggaaccttcctctgtggtggggctaggacctcggccccagtggtcaccacagcctgtgttctctgggggtgatgcttctgggctaggcaggagacgcctctccttccaggctgagtactgggcctgtgtgctgccagattccctgcctccatcacccgaccgccactcccctctctggaacccaaataaagagtatgaagatctgcttgactatacttacccactgaggcccgggcctcagctcccaaagcaccttgatagccgtgtgccagctgaccctgtcctgcaggactccggggtagacctggatagcttctctgtctctccagcaagcaccctcaaatcacctactaatgtctcccccaactgcccaccagcagaggccactgccctgccattttctgggcccagagagccaagccttaagcagtggccctccagagtaccccagaaacagggtggcatgggcttggcatcttggagccaacttgcatctacccccagagccccaggcagtagggatgctcgttgggagcgcagagagccagccctgaggggtgcgaaggaccggctgactataggcaagcaccttgatatgggctctccccagctaaggacacgggacagagggtggccctcgcccaggccagagagggagaagaggaccagccagagtgcccggcgccctacctgcacagagtctaggtggaaatcagaagaggaagtggaaagtgatgacgagtatcttgccctccccgctcggctgacacaggtttctagcctggtttcgtatctaggatccatttctaccttggttaccctgcccactggggatatcaaagggcagagccccttggaagtgtcagacagtgatgggccagcttccttcccttcaagctccagccaaagccagcttccccctggagctgccctccaaggatctggggatcctgagggccagaatccctgtttcctgcgctccttcgtccgtgcccacgactccgcaggggaaggcagtctggggagcagccaggccctcggggtctcctctggactgctgaaaacacgcccctccttgccagctaggttggaccggtggccattctcagacccagatgttgaagggcagcttcccaggaaaggaggagaacagggaaaagaatcactggtgcaatgtgtgaagacattttgctgtcagctggaagagctgatctgctggctgtataatgttgcagatgttactgaccacgggactgcagccaggtccaatcttacaagtctcaagtcttctctgcagctttaccggcaatttaagaaagatatagatgaacatcagtctctgacggagagtgtcttacagaagggggagattcttcttcagtgcctgttggagaacaccccagttttagaggatgtccttgggaggatcgcaaagcagtctggtgagctggagagccacgcagatcgcctgtatgactctatcttggcctctctggacatgctggctggctgcacccttatccctgacaaaaagcccatggcggcaatggagcacccatgtgaaggggtttaacctggcatcttctcaggcagaggtgcaacctgtcggccaaacactggctagtgagaaaaaaaaccttcaagaagtccttgcaagagccattcaacactgaagtcaagggggaaaccttcaatatactagctttaaaatgcctttctcctccctgaatggagggctgagttactatttttatttacaatgaatccttccaaactaaggttttccttttggtgcttctccacaaagagcgtgtagctttgcaatttttgataaaataagacgtgttgccttcccctctatcccattaaaaaagagcagataaagctcaaactattccacctggtagggtcatttaccaagggctggtaggagattccgaatactcaatattctcaggcatgcaagaggacctaagagactgaaaaaagtgaattgttggccagaaaccttgggtcttttcataaaaggaaatttgggcttgtcaatccctctttaaagatataggtagaaagaagagatttttaaccctttgtctgcaaaagaaaaagggttaaatgaagcatctatacagatgactttgggagattatgacaccttttgccatcttcagggcttacgtctttactttcttggctaaccagtttcttagaagaaaatgtgtcagggacttggggatctacagtcatgctttagcatggctatggagctaattatcaagcttaaagggtaactttgggaggactcctcccttcactcctagtctcccttggaagagcagtccaggctcagggaagggaacggataggatgacacagtaagtacagaaactgaagctgtcaatagtgaaggaaaaaggggaattcttcgttgctttggcattgacacataagtactttgattaaaaaaaaaaaaaactatggatcaaccattcaaagcatcaattctatagctttttgcagcaagatgatcagttattgctggtaactgcagattctacagaaaagcacttttaaagttctgttgggccatgaatgaacctggaaggaggaaagcacagtaacaatggaaactaaagtcctattattaatgtgacttttctgcttcagaatttctgagactttatagtcactggaaaatagccattaaattctttaaagattagctcttcaacagtagctacacataaaatgcagtatttcaagtgcctgatgctgctgtggtatgctttatcataatgcttaagggcatgatcaaaattaaaatggcttatgagtttgccatattaatcatcttagttccatacacactgagactttaaaagggaaaaaccactctagcaaataattgtcaattataaacctgtatgtaaaacattcttgaaaacctagagttggttaaaaaggtagagatgtctgacggcctcttcttaaattgatatattttaccttctcttagatgtacatttataagtaggaacatgtccttccactgagtatgttactgaatagcccttaggaaattaaacccatttatttactaatatttgacaggcatagaagtgtattaattagcataaaagttggagatgaaaaccctatagaaacaaattggccaatattatactaattgaatgcagaatgtggcattctattcccattcaactaataatcagcttcaactgacaggaatttgcacagaatgttacacaataccctgtttcccaagaaagtactaccttacctagagatgatctaagatatttttgttcatcctctgaataaggtgagactaaagggtgctaactccctggacctggctgtgaatgctactgaagagtatcaacacaactgttaattataccgccgtgctttaagtttaagacttaccttaaaactcaagctgaaggctgggcacggtggctcatgcctgtaatcccagcactttgggaggccgaggcgggtggatcacaaggtcaggagatcgagaccatcctggctaacacggtgaaaccccatctctactaaaaatacaaaaagaaattagccaggcgtggtgatgggcgcctgtagtcccagctacttgggaggctgaggcatgagaatggcatgaacccgggaggcggagcttgcagtgagctgagatggcaccactgcactccagcctgggcaacagagtgagactcttgtctcaaaaaaaaaaaatcaagctgaaattgtttcagcctagtaagatgctgccagcagcatttctatgagcaaacatggccaaattagagtcaagtagctgagcttgctaactgcactgtgatgccacactggaataacttagtagtcccttaaaattaatggaagttaaatccacagggaagtgatgatactcaaagctggatcagcagtttcaagatctgggttcttggagatccataggtaagctcagcaaatggaagacgacgtcaacacggctattttgaagcttaggtgggaatggaacacaaagaaggtttgaggtaagatatgctggaaaggcaagatgtaggctaagggaaattcaatccaaggtcgaagaataggaaattactgctcagaccacaatgactatcattctgaaaggatttcacagagtgtgcagctgcttagatttaagaacactcttcttcactatgtaaactaatttatggcagcaccttatatttagaacaagtggtaattccctttactaagtgaacagattattaaaacctgtagtagctttgaaccgtttgtacttgaaaatgggggtataaaggggtatatattttttccagaaccacatttattggcgtatacatagaagcaaatcttaaggcatgctgaaatttgttgtaaatcccaatctttactgccatggggaaaagaacgctggaattttccaaacttaagtctgtaaatatgctcatcttaagttcatgtaatgtttccgctaactcaccaagaataagctgacaatttaaacaacttttactgtgtaaaaatgaagtgcacggcatggcatcacagtatcttgacatttgttttgtgtcatttagctactttagaaaatagtttctgaactctttccccctttatactgtattaaggcaaaaacaaaacttctgaagcattaaagatcttcaccaaaataactattggtaacttcaggaatttgtcagttgccttatgtgaggatgaatagatccaccaagcacgcctataatacaaagtaaactatgatttttattgtgaaattttcatagatggaaaattgaatattctgtccatttcattttacaattatcttaccacttatttttgtaccatgtatttcaattgcctgtttagtgaaaaataaaaattaaaaaaaccta

SEQ ID NO: 184711 - DNA, 2103 bp, Artificial Sequence
  derived and/or modified sequence
atggccctgggggaggagaaggccgaggccgaggccagcgaggacaccaaggcccagagctatggccggggcagctgccgggagcagcccccccggctggaggccgagggcggcctcatcagccctgtgtggggcgctgagggcatcccagcccccacctgctggattggaacagaccccggcggccccagccgggcccaccagccccaggccagtgatgccaaccgggagcctgtggccgagaggtctgagcccgccctgagcggcctgcccccagccaccatgggcagcggggacctgctgctgtctggagagagccaggtggagaagaccaagctgagcagcagcgaggagttcccccagaccctgagcctgcccaggaccaccaccatctgcagcggccatgatgctgacacagaagatgaccccagcctggccgacctgccccaggccctggacctgagccagcagccccacagcagcggcctgagctgcctgagccagtggaagtctgtgctgagccctggcagcgctgcccagcccagcagctgcagcatcagcgccagcagcacaggcagcagcctgcagggccaccaggagcgggcagagccccggggcggcagcctggccaaggtgagcagcagcctggagcctgtggtgccccaggagcccagctctgtggtgggcctgggcccccggccccagtggagcccccagcccgtcttctctggaggagatgccagcggcctgggcagaagaaggctgtccttccaggccgagtactgggcctgtgtgctgcctgacagcctgccccccagcccagacagacacagccccctgtggaaccccaacaaggagtatgaggacctgctggactacacctaccccctgcggcccggcccccagctgcccaagcacctggacagccgggtgcctgctgaccctgtgctgcaggacagcggcgtggacctggacagcttctctgtgtccccagccagcaccctgaagagccccaccaacgtgagccccaactgccccccagctgaggccacagccctgcccttcagcggcccccgggagcccagcctgaagcagtggcccagccgggtgccccagaagcagggcggcatgggcctggcctcctggagccagctggccagcaccccccgggcccctggcagcagagatgcccgctgggagcggcgggagcccgccctgcggggggccaaggaccggctgaccatcggcaagcacctggacatgggcagcccccagctgcggacccgggaccggggctggcccagccccaggcctgagcgggagaagaggaccagccagagcgcccggcggcccacctgcacagagagccgctggaagtctgaggaggaggtggagagtgatgatgagtacctggccctgcctgcccggctgacccaggtgagcagcctggtgtcctacctgggcagcatcagcaccctggtgaccctgcccaccggggacatcaagggccagagccccctggaggtgtctgacagtgatggccctgccagcttccccagcagcagcagccagagccagctgcccccaggagctgccctgcagggcagcggggaccctgagggccagaacccctgcttcctgcggagctttgtgcgggcccatgacagcgctggggagggcagcctgggcagcagccaggccctgggcgtgagcagcggcctgctgaagacccggcccagcctgcctgcccggctggaccgctggcccttcagtgaccctgatgtggagggccagctgcccaggaagggcggggagcagggcaaggagagcctggtgcagtgtgtgaagaccttctgctgccagctggaggagctgatctgctggctgtacaacgtggctgatgtgacagaccacggcacagctgcccggagcaacctgaccagcctgaagagcagcctgcagctgtacagagtcatctgtggccctggcagcggcctcttcccccacaagtctgtggccaagctgctggactacaaggtgaagagccagatcaccaacgtgtggtacgtgattgcccagctgaccatcatccctgagatctag

SEQ ID NO: 184712 - DNA, 2274 bp, Artificial Sequence
  derived and/or modified sequence
atggccctgggcgaggagaaggccgaggccgaggccagcgaggacaccaaggcccagtcatatggcagaggaagctgtcgggaacgagagctggacatccctggcccgatgtctggagagcagcctccgaggctggaggctgagggcgggctcatcagtcctgtgtggggcgctgaggggataccggcccctacatgttggattggaacagaccctggggggccctcccgtgctcaccagccccaggcgtcggacgccaacagagagcctgtggcagaacggagcgagcccgccctctccggacttcctccagcaactatgggaagcggagacctgctgctaagcggcgagtcccaggtggagaagactaaactgagcagctctgaagagtttcctcaaacgctcagcctgcccaggacgactaccatctgttccgggcatgatgcagacactgaagacgacccaagtcttgcagacctgccacaggcactggacctgtctcagcagccacactctagcgggctctcttgcctaagccagtggaaatccgtactgtccccagggtcagctgcccagcccagctcctgttccattagcgctagtagtaccggctcgtcactgcagggccaccaggagcgtgccgaacctcgcggcggatccctggcaaaagtctccagcagccttgagcccgtcgttccccaagagccgtcctctgtagtgggactcgggcctcgacctcagtggagtccacaaccagtcttctccggaggggatgcttcgggtctcggccgcagacgattgtccttccaggctgagtattgggcctgcgtgctgcccgactcacttccaccgtcgcctgatcgccactcaccattgtggaatccaaacaaggagtatgaggatctgttggactacacctacccactgcgccccggccctcaattgcctaagcacctcgactcaagggtgcccgccgatccggtgctacaagacagtggcgtggatttagacagtttctcggtctccccagcgagtaccctgaagagccccacaaacgtgagtcccaactgtcctcccgctgaagcgaccgcacttcccttctccggcccccgcgagccatctctcaaacagtggccgtctcgagtcccacaaaaacagggagggatgggattggcttcttggagtcagctggctagcactccccgtgctcccggctcccgcgatgcccgctgggaacgtcgtgaacccgccttgcgtggggccaaggacaggctgaccataggcaaacatctggatatgggaagcccgcagcttcgtacaagggatcgtggctggccatctccccggcctgagcgagagaaaagaacatcccagagcgctagaagaccaacctgtaccgagtcccgatggaagagtgaagaggaggtcgagtccgacgatgaatacctagcgctcccagcacgccttacccaagtgagttctctggtgtcttacctgggatccatttccactcttgttactcttcccacaggggatatcaaaggacagagcccacttgaggtgtcagactcagatggcccagccagtttcccaagttcctcatctcagtctcagcttcctcctggagcggccctacaagggagtggagaccccgaaggccaaaacccctgctttctgcgatcattcgtgagagcacacgattccgccggagaaggatctctaggcagttctcaggccttgggcgtcagcagcggattgctcaagacaagaccctcgctccctgcaaggctagaccggtggcctttttccgatccagacgtggaggggcaactccctagaaagggaggcgagcagggtaaggaatctctcgtgcagtgcgttaagacattctgttgtcagctggaggaactgatttgctggctttacaatgtcgctgatgtgacagaccacggcaccgccgctaggtccaacctcacctccctgaagagctcactgcagctgtacagacaattcaagaaagacattgacgaacatcagagtctgactgaatctgtcctgcagaagggggagatcctgctgcaatgcctgctggagaataccccagtgttggaggacgtacttggccggatcgctaaacagagcggcgaattggaatcccatgccgatcgtttatatgacagcatcctggcttctctcgatatgctggctggctgcaccctcataccagacaagaagcctatggcggccatggagcatccctgtgaaggcgtgtag

SEQ ID NO: 184713 - DNA, 2103 bp, Artificial Sequence
  derived and/or modified sequence
atggccctgggcgaggagaaggccgaggccgaggccagcgaggacacaaaagcccagtcttacggacgcgggtcatgccgggagcagccacctcggctcgaggctgaaggcggccttatctctcctgtttggggtgctgagggcattcccgcacccacctgttggataggtacagaccccggcggaccttcaagggcacaccagcctcaggccagtgatgcaaaccgcgaaccagtcgccgaaagatctgaaccagccctctcaggtctgccaccagcaaccatgggctcaggggatcttctgctgagcggagaatcccaagtggaaaaaacaaaattgtcttcgagcgaagagtttccccagactttatcactgcctagaaccaccacaatctgctccggacatgatgctgacacagaagacgaccccagtctcgcagacttgcctcaggcgctggacttaagccaacagccccacagctcgggtctctcttgtctgtcccaatggaagagcgtcttgtcacccggtagcgctgctcagcctagctcttgtagtatctcagcgtccagcaccgggagcagcctgcaaggccaccaagagcgagctgagccaagaggcggatccctcgccaaagtctcttcgtcactggagcctgttgtgccccaggaaccgagctctgtagtggggctaggcccgcgcccacagtggtctccgcagcccgtgttttccggaggagacgcctccgggctcggaaggcggcgcctatccttccaggccgagtattgggcctgtgtgcttcccgactccctccccccatcacccgatagacactctccattgtggaatccgaataaggagtacgaagacctccttgattatacatacccattgcggcccgggcctcagctccccaaacacctggactctcgcgtgccggcagatcctgtacttcaagattcaggggtggatctggactccttcagtgtctccccagccagtacccttaagtcccccactaacgtcagtccgaactgccctcccgcagaagccacagcgctccctttctccggaccccgggagcctagcctcaagcaatggcccagcagagtcccccagaagcagggtggcatgggtctagcgagttggtcgcagctggcctccacgcccagagcccctggcagccgcgacgcccgctgggagagaagagaaccagctctccggggtgccaaagacaggctgacaatcgggaagcatctggacatggggtccccacaactaagaacacgcgaccggggctggccatcacctcggcccgaacgcgagaaacgcacttcgcagtccgcccggcgaccaacctgcactgagagccgctggaaaagtgaagaagaagttgaatctgacgacgaatatctggctctgccagccaggttgacccaggtgtcttccctggtgagctacctcggtagcatatccactcttgtaacactcccaactggcgatataaaaggccagtctccattggaagtgagcgattcagatggcccggcctcatttcctagctcaagcagccagtctcaactgcctccaggggcggctctgcagggctcgggggaccctgagggccagaatccatgttttctcaggtcatttgttcgcgcccacgattccgcaggagaaggtagtctgggaagtagccaagcgctgggcgtgtccagtgggctcctgaagacacgcccatcactgccagcaagattggaccggtggccatttagcgaccccgacgtggagggacagctgcctaggaagggaggtgagcaagggaaggagtctctggttcagtgtgtgaagacattctgctgtcagctggaagagctcatttgttggctgtacaatgtggctgacgtgacggatcacgggaccgccgccagatccaatcttacctccttgaaatcttcattgcaactgtatcgcgtgatctgcggtccaggtagcggtctctttccacataagtcagtcgctaaattactggattataaggtgaaaagtcaaattacgaacgtctggtatgtgatcgcacagctgactatcattccggaaatttag

SEQ ID NO: 184714 - DNA, 2274 bp, Artificial Sequence
  derived and/or modified sequence
atggcgctcggcgaagagaaggctgaagcggaagcttccgaggacactaaagcacagtcttacgggagaggttcctgtagggagagagagcttgacatcccaggcccaatgtccggcgagcagcctccacgcctcgaggctgagggaggactgatctcgcccgtttggggcgctgagggtatccccgctccaacttgttggatcgggacagaccccggaggtcctagtcgagcccatcagccccaagccagcgacgccaacagagagccagtggccgaaaggtcggaacctgctctgtcagggctacctcctgccaccatgggcagcggggacttactgttgtcaggggagtctcaagtagaaaaaacgaaattatcctcatcagaggagttcccccaaacccttagtctccccagaacgacaacgatctgcagcggtcatgatgctgatactgaggacgaccccagcctcgctgacctcccacaggctttagacctgtcacagcagcctcatagttccgggctgtcatgcctaagtcagtggaaaagtgttctgagtcctggcagcgccgctcagccgtcatcttgcagcatatcagccagctcaactgggtcttccctgcagggccaccaggagagggcggagccacgcggaggttccctagctaaggtgagttcttcgctggagcccgtggtgccacaggagccctcatcagttgttggcttaggcccaagaccccagtggtctcctcaaccagtattcagcggtggggacgccagcggactgggacgcaggcggttgtcttttcaagccgagtactgggcgtgtgtccttcccgacagtttacctccatcccccgataggcacagccccctttggaaccccaacaaagaatacgaggacctactggattacacttacccacttcggcctggccctcagctgcctaaacacttggatagcagggtgccggcagaccccgtcctgcaagactccggcgtggatctggatagtttttcagtctccccggctagtaccttgaaatcacctacgaacgtatcccccaactgtccacccgctgaggcgaccgcgctgccgtttagcggcccaagagagccctctctaaagcaatggccatcacgggttccccaaaagcaggggggaatgggacttgcgtcctggagccaactggcgtcaacaccgcgagccccagggagtcgcgacgcacggtgggagaggagggagcccgcacttcgcggagccaaggatcggctgacgattggcaagcatctcgatatgggctcaccgcagctccggacaagagatagaggttggccatcccctcggcctgaaagggagaaacgcacaagtcagtctgccagacgtcccacctgcacagaatccaggtggaaatcagaggaagaagttgagtcggatgacgagtacctcgctcttccagctcggctaactcaagtttcctctctggttagctatctaggaagtattagtacactcgttacactcccgaccggagatatcaaaggacagtcgccccttgaggtgtccgattccgatggaccagcttcatttcccagttcaagctctcagtcacagcttcccccaggcgctgcactgcagggaagtggggacccagagggccagaacccttgcttcctaagatccttcgttcgggcacatgacagtgccggtgaggggtctctcggatcgtcgcaggcactgggggtgtcctcaggactgttaaaaaccaggcctagcttgccagcccgtctcgatcgctggccattttcagacccagacgtggagggacagctaccaagaaaagggggtgagcagggaaaggagagccttgtccagtgtgtgaagacgttttgttgtcaacttgaggaactgatctgttggctctacaatgtagcggacgtcaccgatcacggaaccgcagctagatcgaatctgactagtttaaagtcctccttgcagctgtatcggcagttcaagaaggacattgacgagcaccaaagcctcaccgaatccgttctgcaaaagggcgagattctgttacagtgccttctggagaatactccagtgctggaagatgtcctaggtcgcatcgccaagcagagcggggaactggaaagccacgctgatagactatacgacagtattcttgcctcactggacatgcttgctgggtgcacacttatcccagataagaaaccaatggccgcaatggaacacccctgcgagggcgtctag

SEQ ID NO: 184715 - DNA, 2103 bp, Artificial Sequence
  derived and/or modified sequence
atggccctgggggaggaaaaggctgaagcggaggccagtgaggatacaaaggcgcagtcctacggcaggggctcctgcagagagcagccacccaggctggaggctgaagggggactgatttcacccgtatggggagccgaaggaattcccgcacccacatgctggattggaacagatcctggcggaccaagccgggcacaccagcctcaggcctctgatgcaaatagggagccggtggctgagcggagtgaaccagcactcagcggtctgccccctgccactatggggtccggcgacctcctgcttagtggggagagtcaggtagaaaagactaagctgtccagctctgaagagttcccccagacattaagccttccccgtaccacaacaatttgcagtggacacgacgccgataccgaggacgatccctcccttgccgatctgccccaggctctcgacctgtcccaacagccccattcaagtggccttagctgtctgtcacagtggaagtcagtcctctcaccgggtagcgcagcacagccttcttcttgtagcatatctgcctcaagcaccgggagctccttacagggccatcaagagcgggcagaaccaagaggagggagcctcgctaaggtgtctagcagcttggagcccgttgtgccccaggagcctagttccgtggtgggactgggccctcgccctcagtggagcccccagcctgtctttagcggaggtgacgccagcggcctgggaagacggaggttgagttttcaagccgaatattgggcttgcgtcctgcccgactccctccccccatcccctgatagacattctcccctgtggaacccaaataaggagtatgaagacctcctcgactacacctatcctctgaggcccggaccacaactgcctaaacacctggacagtagagtaccagcagatccagttcttcaggactcgggagtggacttggactccttcagcgtatctccagcaagcacgctcaagtcacctacgaacgtgtcaccaaattgcccacccgctgaggctacagccttgcctttttcaggaccaagggagccctcactcaagcaatggccgtctagggttccgcagaaacagggcggaatggggctcgccagttggtctcagctagctagtacccccagggcaccaggctcacgtgacgctcggtgggaacggagagaacccgctctgcggggtgccaaagatagattgacaatcgggaaacatctggacatgggctcaccccagctgcgtactagagacagaggatggccttcccccaggccagagagggaaaagcgcactagccagtccgcacggaggcccacttgcaccgaatccaggtggaaatcggaggaggaggttgagagcgacgatgaatacctggcactgcccgctaggctcactcaggtttcttcgctggtcagctatctggggagtataagcacgctggtcaccttacccacaggcgacatcaagggacagtctcccctcgaggtgtcagactctgacgggcctgcctctttcccttcgagcagttcccaatcacagctaccaccaggtgccgctctccaaggctctggagaccccgagggccagaatccctgcttcctgcggtcgtttgttagggcccatgattctgctggtgaaggcagtctgggatcttctcaggccctcggtgtcagctcaggactcctcaaaacccggccttccctgccagcccgacttgacagatggcctttttccgaccccgacgtagaaggacagttaccccgtaaaggcggtgagcagggtaaggagagcctcgtccaatgcgtgaaaaccttttgctgtcagctggaagaacttatttgttggctgtacaatgtggcggacgtgaccgaccacggaactgccgcacgatctaacctaacatctctgaagagctccctgcagctgtacagggtgatctgcgggcctgggtctggattgttccctcataaatctgtagccaaattactggactacaaagttaagtcccagatcacaaacgtatggtacgtgatagcacagctgaccattatcccagagatttag

SEQ ID NO: 184716 - DNA, 2818 bp, Artificial Sequence
  derived and/or modified sequence
atggccctgggtgaagaaaaggcagaagcggaagcatctgaagacacaaaggcccagtcctatgggagagggagctgcagggagcagcccccacgcctggaagctgagggagggctcatctcccctgtatggggggcagaagggatacctgcccctacttgctggattgggactgaccctggcggcccctctagagcccaccagccacaggccagtgatgccaacagagagcccgtagctgagaggtctgagcctgcactcagtggcctgcctcctgccaccatggggtctggagaccttctgctctccggggaaagccaggtggagaagaccaagctttcttcctccgaggagttccctcagactctgagccttcccagaacaacaactatttgctcaggacatgatgctgataccgaagatgatccatccctagcagatttgccccaggcactggacctcagccagcagcctcacagctcaggtctctcttgcctgtcacagtggaagtccgtgctgagcccaggttccgcagctcagccttccagctgcagcatctctgcttcctccacaggcagcagtctccagggtcaccaggagagggcggagcctcgtggtggttctctggccaaggtctcctcctccctggagccggtcgtcccccaggaaccttcctctgtggtggggctaggacctcggccccagtggtcaccacagcctgtgttctctgggggtgatgcttctgggctaggcaggagacgcctctccttccaggctgagtactgggcctgtgtgctgccagattccctgcctccatcacccgaccgccactcccctctctggaacccaaataaagagtatgaagatctgcttgactatacttacccactgaggcccgggcctcagctcccaaagcaccttgatagccgtgtgccagctgaccctgtcctgcaggactccggggtagacctggatagcttctctgtctctccagcaagcaccctcaaatcacctactaatgtctcccccaactgcccaccagcagaggccactgccctgccattttctgggcccagagagccaagccttaagcagtggccctccagagtaccccagaaacagggtggcatgggcttggcatcttggagccaacttgcatctacccccagagccccaggcagtagggatgctcgttgggagcgcagagagccagccctgaggggtgcgaaggaccggctgactataggcaagcaccttgatatgggctctccccagctaaggacacgggacagagggtggccctcgcccaggccagagagggagaagaggaccagccagagtgcccggcgccctacctgcacagagtctaggtggaaatcagaagaggaagtggaaagtgatgacgagtatcttgccctccccgctcggctgacacaggtttctagcctggtttcgtatctaggatccatttctaccttggttaccctgcccactggggatatcaaagggcagagccccttggaagtgtcagacagtgatgggccagcttccttcccttcaagctccagccaaagccagcttccccctggagctgccctccaaggatctggggatcctgagggccagaatccctgtttcctgcgctccttcgtccgtgcccacgactccgcaggggaaggcagtctggggagcagccaggccctcggggtctcctctggactgctgaaaacacgcccctccttgccagctaggttggaccggtggccattctcagacccagatgttgaagggcagcttcccaggaaaggaggagaacagggaaaagaatcactggtgcaatgtgtgaagacattttgctgtcagctggaagagctgatctgctggctgtataatgttgcagatgttactgaccacgggactgcagccaggtccaatcttacaagtctcaagtcttctctgcagctttaccgggtaatatgcggtcctggctctggcttgttccctcacaagagtgtggctaaattactcgattacaaagtaaaatctcaaataaccaatgtctggtatgttatagctcagttgactattatacctgaaatctaattagagcttcacattcttaaagcggaacgctttgtaaaatgcatgaattatttcccaggccaaatggagcttgaagatacaatatatttatctcaaatcaaaaatactttaggttttgggctggcaggtgcagtgggacaagtcttttatcccagctactctggaagctgagacaggaagattgcttgagcccaggagttcgagtacagcctgagcaacatagcaagacccccccccctcaaaaaaaagttttttcttaattaaaaacaaaaatactttagggtgatttgcaatataattttccaaatgtctcagggattataaatacagacttgcactattatgacgcctctagttatgtatggctattgaagtaaaattaaagactcagatttttttatttgcactagccacattctgcatgttcaaccatcacatttgtctagtggctaccacgtagaacagtgcagatgtagaacacttccatcaccacataaagtcctattggactgcaccactatttaaagatctgagctgaaattgtactgactccagaatctacaatagggcattttgatggtatttaaatagaaatctaggccaggcaccttggctcacactattaatcccagcactttgggatgctgaggctggaggatcgcttgagcccgggagttccagaccagcctgggcaatatagtgagacctcgtctct

SEQ ID NO: 184717 - protein, 803 aa, Artificial Sequence
  derived and/or modified sequence
MEVKPVGEPTQEVSKFKLSTKVESTGHWLVEDHVRIWEVLKTEESSIQDWGEEVEEGAVYHVTLKRVQIQQAANKGARWLGVEGDQLPPGHTVSQYETCKIRTIKAGTLEKLVENLLTAFGDNDFTYISIFLSTYRGFASTKEVLELLLDRYGNLTSPNCEEDGSQSSSESKMVIRNAIASILRAWLDQCAEDFREPPHFPCLQKLLDYLTRMMPGSDPERRAQNLLEQFQKQEVETDNGLPNTISFSLEEEEELEGGESAEFTCFSEDLVAEQLTYMDAQLFKKVVPHHCLGCIWSRRDKKENKHLAPTIRATISQFNTLTKCVVSTILGGKELKTQQRAKIIEKWINIAHECRLLKNFSSLRAIVSALQSNSIYRLKKTWAAVPRDRMLMFEELSDIFSDHNNHLTSRELLMKEGTSKFANLDSSVKENQKRTQRRLQLQKDMGVMQGTVPYLGTFLTDLTMLDTALQDYIEGGLINFEKRRREFEVIAQIKLLQSACNSYCMTPDQKFIQWFQRQQLLTEEESYALSCEIEAAADASTTSPKPRKSMVKRLSLLFLGSDMITSPTPTKEQPKSTASGSSGESMDSVSVSSCESNHSEAEEGSITPMDTPDEPQKKLSESSSSCSSIHSMDTNSSGMSSLINPLSSPPSCNNNPKIHKRSVSVTSITSTVLPPVYNQQNEDTCIIRISVEDNNGNMYKSIMLTSQDKTPAVIQRAMLKHNLDSDPAEEYELVQVISEDKELVIPDSANVFYAMNSQVNFDFILRKKNSMEEQVKLRSRTSLTLPRTAKRGCWSNRHSKITL

SEQ ID NO: 184718 - DNA, 2412 bp, Artificial Sequence
  derived and/or modified sequence
atggaggtgaaacctgtgggggaacctacccaggaggtatcaaagtttaaactgagcaccaaagtggaatcaacaggccactggctagtggaagaccatgtccgcatctgggaggtgttgaagacagaagaatccagcattcaggactggggggaagaagtcgaggagggtgccgtttatcatgttaccctcaagagagtgcagatccaacaagccgcgaataaaggcgcaaggtggctcggagttgagggtgaccagctgccccctgggcatacagtgagccagtacgagacctgtaaaatcagaacaatcaaagcgggaacactcgaaaagttggtggaaaacctcttgaccgcctttggcgataatgacttcacgtacatctccatcttcctgtcaacataccgaggcttcgcctcgaccaaagaggtcctggagctcctgcttgacaggtatgggaacctgacaagtccaaactgtgaggaagatggtagccaaagctcttccgagtctaagatggtaattcgaaacgccattgcgtctattctgcgcgcctggctcgaccagtgcgctgaagacttcagagagccaccccatttcccttgtctgcagaagttgctcgactatctgacacgaatgatgccgggttccgacccggaacggagggcgcagaacttactggagcaattccagaagcaagaagtggaaaccgacaacgggctgccgaatactatctccttctccctcgaagaggaagaggagttggaaggcggcgagagcgctgaattcacttgctttagcgaggatctagtcgctgaacagttgacatatatggatgctcagctcttcaagaaggtcgttcctcatcattgtctgggctgtatctggagtcgcagagacaagaaagagaataagcacctggccccaactatacgagctaccatcagtcagttcaataccctcaccaaatgtgtggtgagcacaatcctcggaggtaaggaactgaaaacacagcagagagccaagatcatcgaaaaatggatcaatatcgcgcatgaatgtcggctactcaagaatttttcatcccttagagctattgtgagtgcccttcaatcgaactcaatctatagactgaagaagacctgggccgcagtcccacgggaccgcatgctgatgtttgaggagttgtctgacatattctccgatcacaataaccacctaactagcagagagctgctcatgaaggaaggtacttccaagttcgccaacctcgactcgtctgtcaaggagaaccaaaaacggacacagcgacggcttcagctgcagaaggacatgggcgttatgcaagggaccgttccgtacctggggacctttctcactgatttgactatgctggacaccgccctccaggactacatcgaggggggcctgattaatttcgagaaacggaggcgcgaatttgaggtaattgcccagataaagctgctgcagtctgcatgtaatagttattgtatgacccccgaccagaaatttatccagtggttccagcgccagcagcttctcactgaagaggaatcctatgccctgtcttgtgaaatcgaggccgctgccgacgccagtacgacgtccccgaagccgcggaaatcaatggttaaacgcctctcgttgctgttcttgggcagtgacatgattactagccccacaccaacaaaggaacagcccaaaagcaccgcttccggctctagcggggaatcaatggactcggtgtctgtgtcctcatgtgagagtaatcattcagaggccgaagaaggctctattacacccatggatacccccgacgagcctcagaaaaagctcagcgagtccagttcctcttgttccagcattcacagtatggacactaatagttcaggcatgtcatctctgatcaaccccctgtcctccccaccttcatgcaataataatcctaaaatacataagaggagtgtatccgttacttccatcacaagtactgtcctccctcctgtatataaccagcagaatgaagatacatgtataattcgtatttcagtggaggacaacaacggtaatatgtacaagagcatcatgctgacatctcaggacaaaaccccagcggtgatccagagggctatgcttaagcacaacctcgattctgatcctgcggaagaatacgaactggttcaagtcatctccgaagacaaagagctcgtgatcccagactcagcaaatgtattttatgctatgaattctcaggtgaattttgattttatcctccggaaaaagaactccatggaggaacaggtcaaattgagatcgagaacctctttgaccctgccccgcactgctaagcggggctgttggagcaaccgccatagtaagattaccttgtag

SEQ ID NO: 184719 - DNA, 2412 bp, Artificial Sequence
  derived and/or modified sequence
atggaagtgaagccggtgggcgagcccacgcaggaggtctctaaattcaaattgtccaccaaggtcgaatcaactggccattggttggtggaggatcatgttcgcatttgggaggtgctgaaaacagaggaatcatcaatccaggactggggcgaggaggtcgaggagggtgcagtgtaccacgtgactttgaaacgagtgcagatccagcaggccgccaataagggcgccagatggcttggggtagaaggtgatcagctcccaccagggcacactgtttcacaatacgagacatgcaagatccggaccattaaagccggaactctagaaaaactggtggagaatctcctcaccgcctttggcgacaatgacttcacatacatctccattttcctgagcacatacagaggctttgcttccaccaaagaagtattagaactgctcctcgatcgatacgggaatctgacaagtcctaattgcgaagaggatggaagtcagtcatctagcgaaagcaaaatggtcatacggaatgccatcgccagtatattaagagcgtggctggatcagtgcgccgaggactttcgcgaacctccacatttcccatgcctgcagaaactcctcgattacctgacaaggatgatgccaggttctgaccctgagagacgtgcacagaatctactggagcaattccagaaacaggaagttgaaacagacaatggccttcccaacaccatatctttttcactagaagaggaggaggaactcgaaggtggggaatctgctgagttcacatgcttttctgaggatcttgtagctgaacagctgacatacatggacgcccaattattcaagaaagtggttccacaccattgcctcgggtgtatctggagtaggagagataaaaaagagaacaaacatttagctcccacaatccgggctactatttctcagtttaacaccttgactaagtgcgtcgtgagcacgatacttgggggcaaggagttaaaaacacagcagcgagccaaaatcattgagaaatggattaatatcgcccacgagtgtcggctgctcaagaatttcagctccttaagggctattgtctcagctttgcagagcaactctatatacaggctgaagaaaacgtgggccgccgtgccccgggaccgcatgctgatgtttgaggaactctctgatatcttttctgaccataacaaccacttgacttctcgagaacttctgatgaaggaaggtaccagcaaattcgccaacctcgacagcagcgtcaaagaaaatcagaagcgcacccagcgccgcttacagttacagaaggacatgggcgttatgcaggggaccgtcccttatctagggacattccttaccgacctaacgatgctggatacagctttacaagattacatcgaggggggcttgattaacttcgaaaaaaggcgtcgcgagttcgaggtaattgcgcagataaaacttcttcagagcgcctgtaactcttattgcatgactccagatcaaaagtttatccaatggttccagagacagcagcttctcacagaggaggagtcatacgctctgtcatgtgaaatcgaggccgccgcggatgccagcacgacttcgcccaaacccaggaagtcaatggtcaagaggctgtcattactttttcttggctctgacatgatcaccagtcctacaccaactaaagagcaaccaaaatcaaccgcatcgggttcctcgggcgagagcatggactccgtgagcgtcagttcttgcgaaagtaatcactctgaagctgaagagggtagcatcacaccaatggacacccccgacgaaccccagaagaagctatcagaatcatcaagttcctgcagtagcattcattcgatggataccaatagcagcggcatgagttccctgatcaaccccctcagttccccgccgtcatgcaacaacaatccgaaaatccataagaggtccgtttcagtgacatctataaccagtactgtgttgccccctgtttacaatcagcagaatgaggatacctgtattattcgaatctcagtggaagacaataacggtaacatgtacaaaagtattatgctgacaagccaggataagaccccagccgtaatccagcgcgcaatgttgaagcacaatctggattcagatcccgctgaggagtatgaactagtccaggtgatctctgaagacaaggagctcgtgattcccgatagtgctaatgttttctatgcgatgaatagccaggtcaattttgattttatattacgaaaaaagaatagcatggaagagcaagtgaagctgaggtcacgcacgagtctgactctgccccggacggccaagcgaggctgttggtccaaccgccacagtaagatcactctgtag

SEQ ID NO: 184720 - DNA, 2412 bp, Artificial Sequence
  derived and/or modified sequence
atggaggtgaagcctgtgggggagcccacccaggaggtgtccaagttcaagctgagcaccaaggtggagagcacaggccactggctggtggaggaccacgtgcgcatctgggaggtgctgaagacagaggagagcagcatccaggactggggcgaggaggtggaggagggcgctgtgtaccacgtgaccctgaagagggtgcagatccagcaggccgccaacaagggggcccgctggctgggcgtggagggggaccagctgcccccaggccacacagtgtcccagtatgagacctgcaagatccgcaccatcaaggccggcaccctggagaagctggtggagaacctgctgacagccttcggggacaatgacttcacctacatcagcatcttcctgagcacctaccggggctttgccagcaccaaggaggtgctggagctgctgctggacagatatggcaacctgaccagccccaactgtgaggaggatggcagccagagcagcagcgagagcaagatggtgatcagaaatgccatcgccagcatcctgcgggcctggctggaccagtgtgccgaggacttccgggagcccccccacttcccctgcctgcagaagctgctggactacctgaccaggatgatgcctggcagtgaccctgagcggcgggcccagaacctgctggagcagttccagaagcaggaggtggagacagacaatggcctgcccaacaccatctccttcagcctggaggaggaggaggagctggagggcggggagagcgctgagttcacctgcttcagcgaggacctggtggccgagcagctgacctacatggatgcccagctgttcaagaaggtggtgccccaccactgcctgggctgcatctggagccggcgggacaagaaggagaacaagcacctggcccccaccatccgggccaccatcagccagttcaacaccctgaccaagtgtgtggtgtccaccatcctgggcggcaaggagctgaagacccagcagagggccaagatcatcgagaagtggatcaacatcgcccatgaatgtcggctgctgaagaacttcagcagcctgcgggccatcgtgtctgccctgcagagcaacagcatctaccgcctgaagaagacctgggccgctgtgccccgggacaggatgctgatgtttgaggagctgagtgacatcttcagtgaccacaacaaccacctgaccagccgggagctgctgatgaaggagggcaccagcaagtttgccaacctggacagctctgtgaaggagaaccagaagaggacccagaggcggctgcagctgcagaaggacatgggcgtgatgcagggcaccgtgccctacctgggcaccttcctgacagacctgaccatgctggacacagccctgcaggactacattgaaggaggcctcatcaactttgagaagagaagaagagaatttgaagtcatcgcccagatcaagctgctgcagagcgcctgcaacagctactgcatgaccccagaccagaagttcatccagtggttccagaggcagcagctgctgacagaggaggagagctatgccctgagctgtgaaattgaagctgctgctgatgccagcaccaccagccccaagcccaggaagtccatggtgaagaggctgagcctgctcttcctgggcagtgacatgatcaccagccccacccccaccaaggagcagcccaagagcacagccagcggcagcagcggggagagcatggacagcgtgtctgtgagcagctgtgagagcaaccacagcgaggccgaggagggcagcatcacccccatggacaccccagatgagccccagaagaagctgtctgagagcagcagcagctgcagcagcatccacagcatggacaccaacagcagcggcatgagcagcctcatcaaccccctgagcagcccccccagctgcaacaacaaccccaagatccacaagaggtctgtgtctgtgaccagcatcaccagcacagtgctgccccctgtgtacaaccagcagaatgaagacacctgcatcatccgcatctctgtggaggacaacaatggaaacatgtacaagagcatcatgctgaccagccaggacaagaccccagctgtgatccagagggccatgctgaagcacaacctggacagcgaccctgctgaggagtatgagctggtgcaggtgatcagcgaggacaaggagctggtgatcccagacagcgccaacgtgttctacgccatgaacagccaggtgaactttgacttcatcctgaggaagaagaacagcatggaggagcaggtgaagctgcggagcaggaccagcctgaccctgcccaggacagccaagaggggctgctggagcaacagacacagcaagatcaccctgtag

SEQ ID NO: 184721 - DNA, 2412 bp, Artificial Sequence
  derived and/or modified sequence
atggaggtgaagcccgtgggcgagcccacccaggaggtgagcaagtttaagctttccacaaaagtagagagcacgggccactggctcgtggaggatcacgtccggatttgggaggtcttgaaaactgaggagtcaagcattcaggattggggggaggaggtcgaggaaggggcagtgtatcatgtgactctgaagcgtgtgcagattcagcaggccgcgaataagggcgctcgatggctcggtgtggagggagaccagctgccccccggccacactgtcagccagtacgagacttgcaagataaggactattaaggctggtacattagaaaaattagtggagaacctgctgaccgcttttggagataatgatttcacttatatatcaatattcctgtctacctatcgcggcttcgcatcaactaaggaagtgctagaactgcttctagatcgttacggcaatctcacttccccgaactgcgaggaggatggaagccagagctccagcgagtcgaaaatggtgattcgcaatgcgattgcatccattcttagggcatggttggatcagtgtgcagaggactttcgcgaacctccccatttcccttgcctacaaaaactgctagactatttgactcgcatgatgccaggcagcgaccccgaacggcgggcccagaatttattggaacagtttcagaaacaagaggtggagaccgacaatggtttacccaacaccatctcattctccttagaagaggaggaggaattggaaggcggcgagagcgctgagttcacttgtttttcagaagatctcgtcgctgagcaactgacttatatggatgcgcagctgttcaagaaagttgtccctcaccactgcctgggatgcatctggagccgacgcgataagaaagagaacaagcacttggctcctaccatccgggcaacaatatctcaatttaatacactaactaagtgtgttgtgtccacaatcctcgggggcaaagagctgaagacacagcagcgggctaagatcatcgaaaagtggattaacattgcgcatgagtgtcgccttctgaagaatttctcctccctgcgcgccatcgtgagtgccctgcagtccaactccatctatcgtctcaaaaagacatgggcagctgtccctagggaccggatgcttatgtttgaggagctctctgacattttcagtgaccacaacaaccatctcaccagcagagaattgctgatgaaagaagggacttcgaagtttgctaacctcgacagctccgtgaaggagaaccagaagcgcacccagagacgcttgcagctccagaaggacatgggcgtcatgcagggcaccgtcccctacctggggacctttctgacagatctgaccatgctggacactgcacttcaggactacatagagggaggtctgattaatttcgagaagcggagacgcgaatttgaggttatagcccaaatcaaattgttgcagtccgcttgcaactcttactgcatgactcccgatcagaaatttatacagtggtttcagcgacagcaactgctgaccgaagaggaaagttatgctctgagctgcgaaatcgaggccgcagcagacgctagcactacgagtcccaagcctcggaaatccatggtgaagcgcctgtctctgctattcctagggtccgacatgattaccagtcctactccaacgaaagaacagcccaagtctaccgcgtctgggtcatctggcgaaagcatggacagcgtttccgtgtcatcctgcgagtccaaccactccgaagctgaagaggggtctattactccaatggacacacccgacgagccccaaaaaaagcttagcgaatcgtcaagtagctgtagttctatccattcaatggacacaaactcctctggtatgtcctccctcattaaccctctgtcatctccaccaagttgtaacaacaacccgaaaattcacaagaggtccgtgtctgtaacctcaattacaagcaccgtcctccccccggtgtacaaccagcagaacgaagacacatgtatcattcggataagcgtcgaagataacaacgggaacatgtataaatcaatcatgttaactagtcaggacaagactcctgctgtgatccagagagcaatgttgaaacacaacttggattcagatccagcggaagagtatgagctcgtgcaggtgattagcgaagataaggagctggtaatccctgattcagcaaacgtgttctacgccatgaactcacaagtgaatttcgacttcatcctcagaaaaaaaaattccatggaagaacaggtaaagctgagatcccgcacaagtttaacactgcccagaactgccaagcgcggctgctggtctaatcgacactcaaagatcacattatag

SEQ ID NO: 184722 - DNA, 2412 bp, Artificial Sequence
  derived and/or modified sequence
atggaggtgaagcccgtgggcgagcccacccaggaggtgagcaagtttaaactatccacaaaagtagagtctactggacactggctggtggaggatcacgtacggatttgggaggtattgaaaaccgaagaatcctcaatccaggactggggtgaggaagtggaagagggagcagtatatcatgtcacattgaaaagagtccagattcaacaagccgccaacaaaggcgctcgatggctaggtgtcgagggggatcagctccctcccgggcacacagtctcacagtatgagacctgcaaaataagaacgattaaagcggggaccctggaaaagctggtggaaaatctgctcacagcatttggggacaacgactttacatatattagcatctttttgtccacatatcggggcttcgctagtaccaaggaagtcctggaattactcttggatagatatgggaatctgactagccctaactgcgaggaagacggaagccagagctcctcggagagtaagatggtgatacgaaatgcgatcgcgtcaatattgcgggcatggttggatcagtgcgccgaggacttccgggagccccctcattttccttgcctgcagaaactgctggactatctgacaagaatgatgcccggtagcgatccagaaagaagagctcaaaacctccttgagcagtttcagaaacaggaagtggagacagataacgggctgcctaataccatttccttctcactcgaagaagaagaggagttggaaggtggggagtccgccgaattcacatgtttttcggaagatcttgttgcagagcaactgacatatatggatgcacagctgttcaagaaagttgtgccgcaccactgcttgggctgcatttggagcaggcgagacaaaaaagagaacaagcacctcgctccaacaattagagcaactatctcccaatttaataccctgactaagtgtgttgtgagcactatcttaggcggcaaagaactgaagacccagcaaagagccaaaataatagagaagtggatcaatatagcacatgaatgtcgattgcttaaaaacttttcgagtttgcgcgcaatcgtgagtgcactgcagagtaatagcatctacaggctaaaaaagacatgggccgctgtcccacgtgatcgaatgctaatgtttgaagagctcagtgatatctttagtgaccataataatcacttgacaagcagagaacttctgatgaaagagggcacctctaagttcgcgaacttggattcttctgtcaaagagaaccagaagcgcactcagcgacgcctccagttgcagaaggacatgggggtcatgcagggaaccgtgccctatctgggtactttcctcaccgacttgaccatgctggacactgcgctgcaggactatatcgagggggggttaatcaacttcgaaaaacgaaggagagagttcgaagtgatcgctcaaattaaactgctgcagtcggcttgtaattcctactgcatgactcctgatcagaagtttatacaatggttccagcgacaacagttgctaacagaggaagaatcctatgcgctcagctgcgagatagaagccgctgccgatgcttctactaccagtcccaaaccacgtaaaagtatggtgaaacgtctgtccctgttattcctgggttccgacatgatcacatcccctaccccaacaaaggagcaaccgaagagcaccgcttccggatcgtcaggggagagcatggatagcgtctcagtgtcttcttgcgagtcaaaccactcagaggccgaggaaggttccatcactcccatggatacgcctgacgagcctcagaaaaaactctcggaatcctcctcgagttgctcgagcatccattctatggacaccaattcatccggcatgtcctccctgatcaatcctctctccagccccccgtcctgcaataacaatcccaaaatccataaaaggtccgtgtctgtcacgagcatcacttcgactgtgctaccgccagtgtataatcagcagaatgaggacacttgcatcataaggatttccgtggaagataataatggtaatatgtataagtccatcatgctgaccagccaggacaaaactccggctgtgattcaaagagcaatgctcaaacataatttagattccgatcccgctgaagaatacgagctggtacaggtgattagtgaggacaaagaactggtgattcccgactcggcaaatgtgttctacgctatgaacagtcaggttaactttgacttcatcttgaggaaaaaaaatagcatggaagagcaagtgaagctacgctctaggaccagccttacgttgccacggaccgctaagagggggtgttggtcgaaccgacattctaaaattaccttgtag

SEQ ID NO: 184723 - DNA, 2412 bp, Artificial Sequence
  derived and/or modified sequence
atggaggttaaaccagtgggggagccaacccaggaggtcagtaagttcaaattgagcacaaaggtggagtctacgggtcactggctggtggaggatcatgtgcgaatctgggaagtgctgaaaaccgaggagagctcaatccaggattggggtgaggaagtagaggagggggctgtgtaccacgtaacccttaagagggttcagatccagcaggcagccaacaagggggctcgatggttgggggtggaaggagatcagctcccacccggacacactgtgtcacagtatgagacctgtaaaattaggacgatcaaggccggtaccttagaaaagctggtggagaatctcttaacagcctttggggacaatgattttacatatatttccatttttctgtccacctatagaggattcgccagcacgaaagaagtgctagaactgctcttagatcgatacggaaacctgactagtcctaattgtgaagaagacgggagtcagagctccagcgaatctaaaatggtcatccgtaatgcaatcgcctccatattgcgagcctggttagatcagtgtgccgaggatttccgtgagccaccgcactttccatgtttgcaaaaattgctcgactacctgaccagaatgatgcctggcagtgatccagagagacgggctcagaacctgttggagcagtttcagaaacaagaggtggagactgacaacgggcttcctaacactataagcttctccttggaagaggaggaggagctcgagggcggagaatctgccgagttcacatgtttttccgaggatttagtagcggagcagttgacttatatggacgcccaattatttaaaaaagtcgtcccacaccactgtctggggtgtatttggagtcggcgagataaaaaggagaacaaacacctggcccctacaatcagagccacaatctctcagttcaacactttaactaagtgcgttgtcagcacaatactcggcggtaaggagctcaagacacagcagagagctaagattatagagaagtggatcaacatcgcgcacgaatgtcggctgctcaagaactttagttctctgagggctatagtgagcgctctgcagtccaacagcatttaccggcttaagaagacatgggctgccgtgcctcgcgaccgcatgctgatgttcgaggagttaagcgacattttctctgatcacaacaaccatcttacatcccgggaactgcttatgaaagaaggcacaagtaagtttgctaatctcgattccagtgtgaaagaaaaccagaaaaggacacagaggaggttgcaattgcaaaaggacatgggagtcatgcagggcacggtgccatacttgggaacttttttgacagatttgacgatgctcgacacggcactgcaggactatatcgaagggggacttatcaattttgagaagcggcgaagggaattcgaggtcatcgcccagattaaattacttcaatcagcatgcaatagctactgtatgaccccagaccagaaattcattcagtggtttcagcgtcaacaattgttaaccgaggaagagagctacgccctctcttgcgagatagaggccgctgctgatgcctctaccacgtctcccaaacctaggaagagtatggtcaaacgcctgagtttgctctttctgggtagcgacatgatcacctcccccaccccgaccaaggagcagcccaagtctaccgctagcggatcatcaggcgagagcatggactccgtatccgttagctcttgtgagtcaaaccattccgaggcggaagaaggttcgatcacccccatggatactccggatgagcctcagaaaaagctgtctgaatcctcctcatcgtgtagttctatccattcaatggatacaaacagtagtggaatgagcagcctgataaatcccctctcctcacctccctcttgtaacaataaccctaaaatccataaaaggtctgtttctgttaccagtatcactagcaccgtgctgcctccagtatacaatcaacagaatgaagatacatgcatcattagaatttctgtggaggacaacaatgggaatatgtacaaatcaatcatgctcacatcacaggataagacccccgcagtgatacagagagccatgctaaaacacaatctcgattcagatcctgcagaggaatatgaactggttcaggttatctctgaggacaaggaactggtgatccctgacagcgcgaacgtgttttatgcaatgaattcccaggtcaactttgatttcatactgcgtaagaagaattccatggaggagcaggttaaactccgctcccgcactagccttaccctgcctcgcacagccaaaaggggctgttggtccaatcggcactcaaagataaccctctag

SEQ ID NO: 184724 - DNA, 2412 bp, Artificial Sequence
  derived and/or modified sequence
atggaggtgaaaccagtgggcgaaccaacccaggaggtgtcgaagtttaaactaagcacaaaggtggaatccacagggcactggctcgtagaagaccatgtgcgcatttgggaggtgctgaagaccgaggaaagttctatccaggactggggggaggaagtggaagagggcgcagtgtatcatgtgaccttaaaaagagtccagatccaacaagctgctaacaaaggcgctcgctggctgggcgtcgaaggcgatcaactgccacccggacacacagtcagtcaatatgaaacatgtaaaatccggacgattaaagctggcaccctcgagaagctggtggaaaacctactgacagcattcggtgacaatgacttcacatacatcagtatcttcctcagtacctaccggggattcgcgagtacgaaagaagtgctcgagttacttctggatcgatacgggaatctgaccagcccaaattgtgaggaggacggctcccagtcttcttccgagtccaaaatggtgatacgtaacgccatagcctctatcctaagagcctggcttgaccaatgcgctgaagattttagagagccccctcactttccttgcctccagaaactgttagattaccttaccaggatgatgcccggaagtgatcctgaaaggagggcacaaaatctgctcgaacagtttcaaaagcaggaagtggaaacagataacggactgcctaatactatcagctttagtttggaagaagaggaagagctggaaggaggtgaatcagccgaatttacttgtttcagtgaagatctggtggcagaacagttgacctacatggacgcgcagctttttaagaaggtcgtgccacaccattgcttaggctgcatctggagcagacgcgacaagaaggaaaacaagcatctggccccaaccatccgcgctactatctcacagttcaataccctcacaaagtgtgtggtgtccactattctgggaggtaaggaactgaaaacacaacagagagccaagatcattgagaaatggattaacatagctcacgaatgccgcctcctgaagaatttctcttcactccgcgcaatcgtgtccgcactgcaaagtaattccatttaccggctgaaaaaaacgtgggccgctgtcccccgagacagaatgctgatgtttgaggaactctctgacatcttcagcgaccataataaccacctaacatcacgtgagctgctcatgaaggagggaacctcgaagtttgccaaccttgacagctctgtgaaggagaatcaaaagcggacgcagaggcgccttcagctccagaaagacatgggcgtcatgcagggcacagtgccgtatctcggcacattcctgaccgatttgacaatgcttgacaccgcactgcaggattacatcgagggcggactgattaatttcgagaaaagacgtcgcgagtttgaagttatcgctcagattaagctcctgcagtcagcctgtaactcttattgtatgactcccgatcagaaatttatccaatggttccaaagacagcagctcttaacagaggaggaatcatacgccctcagctgcgaaattgaggccgcagcagacgcttcaacaacatctcctaagcctcggaagagtatggttaaaaggctttcactgctattcctgggctctgatatgatcactagcccaactcctaccaaggagcagcctaagagcactgcttccggctcttccggtgagtctatggacagtgtgtccgtttcatcctgtgagtctaatcattccgaggctgaagagggctctatcacacccatggacacacctgacgagccacagaaaaaactgtccgaatcctcttcctcctgttcatctatccatagtatggacacaaatagctccggcatgagttccctgataaatccactcagctcacctccctcatgcaacaacaaccccaagattcacaagcgctctgtgagtgtgaccagtattacctctaccgtgcttccccctgtatataatcagcagaacgaagacacgtgtataattaggatctccgtggaggataacaatggcaatatgtataagagcattatgctgacgtctcaagacaagactccagccgtcattcagagagctatgcttaaacacaacctggatagtgatcccgcagaggagtacgagttggtgcaggttatctctgaggacaaagagctggttattcccgatagcgctaacgtattttacgccatgaactcccaggtgaatttcgattttatccttcgtaagaagaattcgatggaggaacaggtgaagttgcggtctcgcaccagtctgacactgccaaggacagccaagagaggctgttggtccaacaggcattccaagatcaccctgtag

SEQ ID NO: 184725 - DNA, 5113 bp, Artificial Sequence
  derived and/or modified sequence
agaaacgcttttctgcggtccagtctagggggtctcagattggcggggatgggcagcagcggcaggtggccttggcttttgctgcagccgtcaacgacctatcatcggggtcctgcgtaaggtccggctggctgggacttggctgtgggtgggatggactggctgccggaccgagtgccctgcagttggtaggagtatgaggcagagtgatgcacacccgggcgcccagcatcgttctaattgccggagacattgcctcagactgtgcgctgctagaggctgcgttcctgagcaggaagcccgtttcctgggattggaactacccttcttggccagcgggaagtccccaaggacggagtcgaaaggtcaaatcttatctgtcagtgctgtgtgacagcatcgcaacgggatctgcagaacctgaactcgatccgtaatgcctcctgcctgcctctttcaagatggaggtgaaacctgtgggagaacctactcaagaggtgtctaaattcaaactttccaccaaggtagaaagcacgggacactggctggtggaagatcatgttcgaatatgggaagttttaaagacagaggagagctcgattcaggactggggtgaagaggtagaggaaggagctgtttaccatgtcaccctcaaaagagtccagattcaacaggctgccaataaaggagcaagatggctaggggttgaaggggaccagctgcctccaggacacacagtcagtcaatatgaaacctgtaagatcaggaccataaaagctggcaccttggagaagcttgtggagaacctgctgacagcttttggggacaatgactttacctatatcagcatctttctttcaacgtacagaggctttgcctccactaaagaagtgctggaactactgctggacaggtatggaaacctgacaagcccaaactgtgaagaagatggaagccaaagttcatcagagtccaaaatggtgatcaggaatgcaatcgcttccatactaagggcctggcttgaccagtgtgcagaagacttccgagagccccctcacttcccttgcttacagaaactgctggattatctcacacggatgatgccgggctctgacccagaaagaagagcacaaaatcttcttgagcagtttcagaagcaagaagtggaaactgacaatgggcttcccaacacgatctccttcagcctggaagaggaagaggaactggagggtggagagtcagcagaattcacgtgcttctcagaagatctcgtggcagagcagctgacctacatggatgcacaactcttcaagaaagtagtgcctcaccactgcctgggctgcatttggtctcgaagggataagaaggaaaacaaacatttggctcctacgatccgtgccaccatctctcagtttaataccctcaccaaatgtgttgtcagcaccatcctggggggcaaagaactcaaaactcagcagagagccaaaatcattgagaagtggatcaacatcgctcatgaatgtagactcctgaagaatttttcctccttgagggccatcgtttcggcactgcagtctaattccatctatcggttaaaaaagacttgggctgccgtcccaagggaccgaatgctgatgtttgaagaactttcagatatcttctcagaccataataaccatttgaccagccgagaactactgatgaaggaaggaacctcaaaatttgcaaacctggacagcagtgtgaaagaaaaccagaagcgtacccagaggcggctgcagctccagaaggacatgggtgtgatgcagggaactgtgccctacctgggcaccttcctgactgacctgaccatgcttgacactgcccttcaggactacatcgagggtggactgataaactttgagaaaaggagaagggaatttgaagtgattgcccagataaagctcttacagtctgcctgcaacagctattgcatgaccccagaccaaaagttcatccagtggttccagaggcagcagctcctgacagaggaggagagctatgccctgtcatgtgagattgaagcagctgctgacgccagcaccacctcgcccaagcctcggaagagcatggtgaagagactcagcctactgtttctagggtctgacatgatcaccagtcccactcccaccaaagagcagcccaagtccactgccagcgggagctctggtgaaagcatggactctgtcagcgtgtcatcctgcgagtcgaaccactcagaggctgaggagggctccattactcccatggacacccctgatgagcctcaaaaaaagctctctgagtcctcctcatcctgttcttctatccattccatggacacaaattcctcagggatgtcttccttaatcaaccccctctcctcccctccgtcctgcaacaacaaccccaaaatccacaagcgctctgtctcggtgacgtccattacctcgactgtgctgcctcctgtttacaaccaacagaatgaagacacctgcataatccgcatcagtgtggaagacaataacggcaacatgtacaagagcatcatgttgacgagccaggataaaacccccgctgtgatccagagagccatgctgaagcacaatctggactcagaccccgccgaggagtacgagctggtgcaggtcatctcggaggacaaagaacttgtgattccagactcagcaaatgtcttttatgccatgaacagccaagtgaactttgacttcattttgcgcaaaaagaactccatggaagaacaagtgaaactgcgtagccggaccagcttgacgttgcccaggacagctaaacggggctgctggagtaacagacacagcaaaatcaccctctgaagggagggaccagtggccccttgtttgccaaaggcagagtggggctgagaaacaggctgcggtgattgcaattaccatccggtgttcgaggatcattggtgaagtcagcagatatttattgagttcctgtggtgtgcaaagcattatgataggcaccgtggggaaactggaaatgaatttgacatgaaaaggatgaacgattcactgattctctttgactcatttgagactaaaatgcagaattaccaacatttaaaacatatatatgcacatgtatttggtatgcatgtgtatctatataaaaatatataagagggactttatgggatagtatggactatggaaaaacaaatttgcacaatggcctgggaagttgaggtcactttttacagggaaatagaagaaactgagaacctagtctcgtatattctgagtaaatggaatcagtcctgggaatagagagtgtcctttgtgccagtattacaagaagcccaaactttatttttataaagggagaggatgactttctcaatcaagtgccaccagataaaaacaactgcagaggctggaactgccacaggctgtatgaaaggccactttggaaagggtttggatgagctggtggccttcaacctctgcctgcatctgccactttctgctaccctagggaggccaggaggagcttcggaggaccatcgccccactggtctagccatcatgacacctctggaggtgtcaagctcctgaaacaagctcatttcagtttctggcaaccccgtgtatttccgttttccccctaaagaacatatcataatcattgcacaaataaccatgttctttggtaatgaagccagaaaagaaagcgcaaaagaatggtgactcatttggactcttatctgtcttggaatgtcactgcttcattgccttctctgattgccttttgcatgtaaaactatgtgtctggagtcttttgccatctggatcttagtacctctttattatgtgcaatttattcctcaggtgtggaaatttctactgcaattgactacgtttgattattttgagcttgtgaaagatttctgaacagtgattgtcccgttaatagcccctcagaagatgttccctgctgataacagcatcctattttacttacttttatagcattactgtgcctagtcgtggggaaagagatggggctgtatagattatctgaatcatttgtctaagaggtacattcttccagatggaatcaataacttttttttttccaggttcccgtgcttgctatcacagtatcattgttaagtgacacttttgtctctcataacaccatcacactcttccttccaagtctgagctgtgctggggtttgaactaaaagccatatgtggaatattgacatgtgtaagaagcactttcagaatgttgtcctttttaagaaatgattctcaaaataccagtttttattccaaaaatttagagaacaaacccggaatatgaagtgcagattgtaacatggagctatttttttttcttaatcccataatacagctcctaaaagttgtgtgggatttgcgttgcataaatagccatgtgaattccacaagaagcaccagggaaagtttagagatttgcggcaatggaccgaagaacgggccaggaagtcctccaatttcctttggtctttccaggagattggactacacattgtaaagactgactgggtttcaactagtcaaaaagcactttcttctgttttcaatccctgttcgatttgtgcttctgtgcttgtaggagagatggccagggtggcagccctcatgcaggttgaagtatatgtagcctcagcctgatattcttggtgcgaaggtaaaaaaaaaaaaataaataaaaccattggcctggttgagggcgtgaccaccaagacatatatgttgtgcccgtgttcatcctgtgtatttatactgtatatgtagagtctagatttatatactgcaatgtaaaatatatatatatttaccttttttaaagacaatggaaattccaagtagctaaaacttagcttcatttatttaatgccactttaaatgtcttaaatttgtttcctggtggacagccgggtaatgcttttagctgctcgcatgcttgtctttctgcatctccatcatctgtttaccttttggttaaactaataaactagtttgggacttggctggcatgtgctgccagacccaaaggga

SEQ ID NO: 184726 - DNA, 5068 bp, Artificial Sequence
  derived and/or modified sequence
ctgcggtccagtctagggggtctcagattggcggggatgggcagcagcggcaggtggccttggcttttgctgcagccgtcaacgacctatcatcggggtcctgcgtaaggtccggctggctgggacttggctgtgggtgggatggactggctgccggaccgagtgccctgcagttggtaggagtatgaggcagagtgatgcacacccgggcgcccagcatcgttctaattgccggagacattgcctcagactgtgcgctgctagaggctgcgttcctgagcaggaagcccgtttcctgggattggaactacccttcttggccagcgggaagtccccaaggacggagtcgaaaggtcaaatcttatctgtcagtgctgtgtgacagcatcgcaacgggatctgcagaacctgaactcgatggaggtgaaacctgtgggagaacctactcaagaggtgtctaaattcaaactttccaccaaggtagaaagcacgggacactggctggtggaagatcatgttcgaatatgggaagttttaaagacagaggagagctcgattcaggactggggtgaagaggtagaggaaggagctgtttaccatgtcaccctcaaaagagtccagattcaacaggctgccaataaaggagcaagatggctaggggttgaaggggaccagctgcctccaggacacacagtcagtcaatatgaaacctgtaagatcaggaccataaaagctggcaccttggagaagcttgtggagaacctgctgacagcttttggggacaatgactttacctatatcagcatctttctttcaacgtacagaggctttgcctccactaaagaagtgctggaactactgctggacaggtatggaaacctgacaagcccaaactgtgaagaagatggaagccaaagttcatcagagtccaaaatggtgatcaggaatgcaatcgcttccatactaagggcctggcttgaccagtgtgcagaagacttccgagagccccctcacttcccttgcttacagaaactgctggattatctcacacggatgatgccgggctctgacccagaaagaagagcacaaaatcttcttgagcagtttcagaagcaagaagtggaaactgacaatgggcttcccaacacgatctccttcagcctggaagaggaagaggaactggagggtggagagtcagcagaattcacgtgcttctcagaagatctcgtggcagagcagctgacctacatggatgcacaactcttcaagaaagtagtgcctcaccactgcctgggctgcatttggtctcgaagggataagaaggaaaacaaacatttggctcctacgatccgtgccaccatctctcagtttaataccctcaccaaatgtgttgtcagcaccatcctggggggcaaagaactcaaaactcagcagagagccaaaatcattgagaagtggatcaacatcgctcatgaatgtagactcctgaagaatttttcctccttgagggccatcgtttcggcactgcagtctaattccatctatcggttaaaaaagacttgggctgccgtcccaagggaccgaatgctgatgtttgaagaactttcagatatcttctcagaccataataaccatttgaccagccgagaactactgatgaaggaaggaacctcaaaatttgcaaacctggacagcagtgtgaaagaaaaccagaagcgtacccagaggcggctgcagctccagaaggacatgggtgtgatgcagggaactgtgccctacctgggcaccttcctgactgacctgaccatgcttgacactgcccttcaggactacatcgagggtggactgataaactttgagaaaaggagaagggaatttgaagtgattgcccagataaagctcttacagtctgcctgcaacagctattgcatgaccccagaccaaaagttcatccagtggttccagaggcagcagctcctgacagaggaggagagctatgccctgtcatgtgagattgaagcagctgctgacgccagcaccacctcgcccaagcctcggaagagcatggtgaagagactcagcctactgtttctagggtctgacatgatcaccagtcccactcccaccaaagagcagcccaagtccactgccagcgggagctctggtgaaagcatggactctgtcagcgtgtcatcctgcgagtcgaaccactcagaggctgaggagggctccattactcccatggacacccctgatgagcctcaaaaaaagctctctgagtcctcctcatcctgttcttctatccattccatggacacaaattcctcagggatgtcttccttaatcaaccccctctcctcccctccgtcctgcaacaacaaccccaaaatccacaagcgctctgtctcggtgacgtccattacctcgactgtgctgcctcctgtttacaaccaacagaatgaagacacctgcataatccgcatcagtgtggaagacaataacggcaacatgtacaagagcatcatgttgacgagccaggataaaacccccgctgtgatccagagagccatgctgaagcacaatctggactcagaccccgccgaggagtacgagctggtgcaggtcatctcggaggacaaagaacttgtgattccagactcagcaaatgtcttttatgccatgaacagccaagtgaactttgacttcattttgcgcaaaaagaactccatggaagaacaagtgaaactgcgtagccggaccagcttgacgttgcccaggacagctaaacggggctgctggagtaacagacacagcaaaatcaccctctgaagggagggaccagtggccccttgtttgccaaaggcagagtggggctgagaaacaggctgcggtgattgcaattaccatccggtgttcgaggatcattggtgaagtcagcagatatttattgagttcctgtggtgtgcaaagcattatgataggcaccgtggggaaactggaaatgaatttgacatgaaaaggatgaacgattcactgattctctttgactcatttgagactaaaatgcagaattaccaacatttaaaacatatatatgcacatgtatttggtatgcatgtgtatctatataaaaatatataagagggactttatgggatagtatggactatggaaaaacaaatttgcacaatggcctgggaagttgaggtcactttttacagggaaatagaagaaactgagaacctagtctcgtatattctgagtaaatggaatcagtcctgggaatagagagtgtcctttgtgccagtattacaagaagcccaaactttatttttataaagggagaggatgactttctcaatcaagtgccaccagataaaaacaactgcagaggctggaactgccacaggctgtatgaaaggccactttggaaagggtttggatgagctggtggccttcaacctctgcctgcatctgccactttctgctaccctagggaggccaggaggagcttcggaggaccatcgccccactggtctagccatcatgacacctctggaggtgtcaagctcctgaaacaagctcatttcagtttctggcaaccccgtgtatttccgttttccccctaaagaacatatcataatcattgcacaaataaccatgttctttggtaatgaagccagaaaagaaagcgcaaaagaatggtgactcatttggactcttatctgtcttggaatgtcactgcttcattgccttctctgattgccttttgcatgtaaaactatgtgtctggagtcttttgccatctggatcttagtacctctttattatgtgcaatttattcctcaggtgtggaaatttctactgcaattgactacgtttgattattttgagcttgtgaaagatttctgaacagtgattgtcccgttaatagcccctcagaagatgttccctgctgataacagcatcctattttacttacttttatagcattactgtgcctagtcgtggggaaagagatggggctgtatagattatctgaatcatttgtctaagaggtacattcttccagatggaatcaataacttttttttttccaggttcccgtgcttgctatcacagtatcattgttaagtgacacttttgtctctcataacaccatcacactcttccttccaagtctgagctgtgctggggtttgaactaaaagccatatgtggaatattgacatgtgtaagaagcactttcagaatgttgtcctttttaagaaatgattctcaaaataccagtttttattccaaaaatttagagaacaaacccggaatatgaagtgcagattgtaacatggagctatttttttttcttaatcccataatacagctcctaaaagttgtgtgggatttgcgttgcataaatagccatgtgaattccacaagaagcaccagggaaagtttagagatttgcggcaatggaccgaagaacgggccaggaagtcctccaatttcctttggtctttccaggagattggactacacattgtaaagactgactgggtttcaactagtcaaaaagcactttcttctgttttcaatccctgttcgatttgtgcttctgtgcttgtaggagagatggccagggtggcagccctcatgcaggttgaagtatatgtagcctcagcctgatattcttggtgcgaaggtaaaaaaaaaaaaataaataaaaccattggcctggttgagggcgtgaccaccaagacatatatgttgtgcccgtgttcatcctgtgtatttatactgtatatgtagagtctagatttatatactgcaatgtaaaatatatatatatttaccttttttaaagacaatggaaattccaagtagctaaaacttagcttcatttatttaatgccactttaaatgtcttaaatttgtttcctggtggacagccgggtaatgcttttagctgctcgcatgcttgtctttctgcatctccatcatctgtttaccttttggttaaactaataaactagtttgggacttggctggcatgtgctgccagacccaaaggg

SEQ ID NO: 184727 - DNA, 2412 bp, Artificial Sequence
  derived and/or modified sequence
atggaggtgaagcccgtgggcgagcccacccaggaggtgagcaagttcaagctgagcaccaaggtggagagcaccggccactggctggtggaggaccacgtgagaatctgggaggtgctgaagaccgaggagagcagcatccaggactggggcgaggaggtggaggagggcgccgtgtaccacgtgaccctgaagagagtgcagatccagcaggccgccaacaagggcgccagatggctgggcgtggagggcgaccagctgccccccggccacaccgtgagccagtacgagacctgcaagatcagaaccatcaaggccggcaccctggagaagctggtggagaacctgctgaccgccttcggcgacaacgacttcacctacatcagcatcttcctgagcacctacagaggcttcgccagcaccaaggaggtgctggagctgctgctggacagatacggcaacctgaccagccccaactgcgaggaggacggcagccagagcagcagcgagagcaagatggtgatcagaaacgccatcgccagcatcctgagagcctggctggaccagtgcgccgaggacttcagagagcccccccacttcccctgcctgcagaagctgctggactacctgaccagaatgatgcccggcagcgaccccgagagaagagcccagaacctgctggagcagttccagaagcaggaggtggagaccgacaacggcctgcccaacaccatcagcttcagcctggaggaggaggaggagctggagggcggcgagagcgccgagttcacctgcttcagcgaggacctggtggccgagcagctgacctacatggacgcccagctgttcaagaaggtggtgccccaccactgcctgggctgcatctggagcagaagagacaagaaggagaacaagcacctggcccccaccatcagagccaccatcagccagttcaacaccctgaccaagtgcgtggtgagcaccatcctgggcggcaaggagctgaagacccagcagagagccaagatcatcgagaagtggatcaacatcgcccacgagtgcagactgctgaagaacttcagcagcctgagagccatcgtgagcgccctgcagagcaacagcatctacagactgaagaagacctgggccgccgtgcccagagacagaatgctgatgttcgaggagctgagcgacatcttcagcgaccacaacaaccacctgaccagcagagagctgctgatgaaggagggcaccagcaagttcgccaacctggacagcagcgtgaaggagaaccagaagagaacccagagaagactgcagctgcagaaggacatgggcgtgatgcagggcaccgtgccctacctgggcaccttcctgaccgacctgaccatgctggacaccgccctgcaggactacatcgagggcggcctgatcaacttcgagaagagaagaagagagttcgaggtgatcgcccagatcaagctgctgcagagcgcctgcaacagctactgcatgacccccgaccagaagttcatccagtggttccagagacagcagctgctgaccgaggaggagagctacgccctgagctgcgagatcgaggccgccgccgacgccagcaccaccagccccaagcccagaaagagcatggtgaagagactgagcctgctgttcctgggcagcgacatgatcaccagccccacccccaccaaggagcagcccaagagcaccgccagcggcagcagcggcgagagcatggacagcgtgagcgtgagcagctgcgagagcaaccacagcgaggccgaggagggcagcatcacccccatggacacccccgacgagccccagaagaagctgagcgagagcagcagcagctgcagcagcatccacagcatggacaccaacagcagcggcatgagcagcctgatcaaccccctgagcagcccccccagctgcaacaacaaccccaagatccacaagagaagcgtgagcgtgaccagcatcaccagcaccgtgctgccccccgtgtacaaccagcagaacgaggacacctgcatcatcagaatcagcgtggaggacaacaacggcaacatgtacaagagcatcatgctgaccagccaggacaagacccccgccgtgatccagagagccatgctgaagcacaacctggacagcgaccccgccgaggagtacgagctggtgcaggtgatcagcgaggacaaggagctggtgatccccgacagcgccaacgtgttctacgccatgaacagccaggtgaacttcgacttcatcctgagaaagaagaacagcatggaggagcaggtgaagctgagaagcagaaccagcctgaccctgcccagaaccgccaagagaggctgctggagcaacagacacagcaagatcaccctgtag

SEQ ID NO: 184728 - protein, 578 aa, Artificial Sequence
  derived and/or modified sequence
MGCGLNKLEKRDEKRPGNIYSTLKRPQVETKIDVSYEYRFLEFTTLSAAELPGSSAVRLASLRDLPAQLLELYQQGFSLAALHPFVQPTHEREKTPLEHIFRAILIKKTDRSQKTDLHNEGYILELDCCSSLDHPTDQKLIPEFIKKIQEAASQGLKFVGVIPQYHSSVNSAGSSAPVSTANSTEDARDAKNARGDHASLENEKPGTGDVCSAPAGRNQSPEPSSGPRGEVPLAKQPSSPSGEGDGGELSPQGVSKTLDGPESNPLEVHEEPLSGKMEIFTLFNKPKSHQKCRQYYPVTIPLHVSKNGQTVSGLDANWLEHMSDHFRKGGMLVNAVFYLGIVNDSLHGLTDGVFIFEAVSTEDSKTIQGYDAIVVEQWTVLEGVEVQTDYVPLLNSLAAYGWQLTCVLPTPVVKTTSEGSVSTKQIVFLQRPCLPQKIKKKESKFQWRFSREEMHNRQMRKSKGKLSARDKQQAEENEKNLEDQSSKAGDMGNCVSGQQQEGGVSEEMKGPVQEDKGEQLSPGGLLCGVGVEGEAVQNGPASHSRALVGICTGHSNPGEDARDGDAEEVRELGTVEEN

SEQ ID NO: 184729 - protein, 114 aa, Artificial Sequence
  derived and/or modified sequence
MGCGLNKLEKRDEKRPGNIYSTLKRPQVETKIDVSYEYRFLEFTTLSAAELPGSSAVRLASLRDLPAQLLELYQQGFSLAALHPFVQPTHEREKTPLEHIFRAILIKKTDRSQK

SEQ ID NO: 184730 - protein, 149 aa, Artificial Sequence
  derived and/or modified sequence
MGCGLNKLEKRDEKRPGNIYSTLKRPQVETKIDVSYEYRFLEFTTLSAAELPGSSAVRLASLRDLPAQLLELYQQGFSLAALHPFVQPTHEREKTPLEHIFRAILIKKTDRSQKTDLHNEGYILELDCCSSLDHPTDQKLIPEFIKKIQ

SEQ ID NO: 184731 - protein, 275 aa, Artificial Sequence
  derived and/or modified sequence
MGCGLNKLEKRDEKRPGNIYSTLKRPQVETKIDVSYEYRFLEFTTLSAAELPGSSAVRLASLRDLPAQLLELYQQGFSLAALHPFVQPTHEREKTPLEHIFRAILIKKTDRSQKTDLHNEGYILELDCCSSLDHPTDQKLIPEFIKKIQEAASQGLKFVGVIPQYHSSVNSAGSSAPVSTANSTEDARDAKNARGDHASLENEKPGTGDVCSAPAGRNQSPEPSSGPRGEVPLAKQPSSPSGEGDGGELSPQGVSKTLDGPESNPLEVHEEPLSG

SEQ ID NO: 184732 - DNA, 1737 bp, Artificial Sequence
  derived and/or modified sequence
atgggctgcggcctgaacaagctggagaagagagacgagaagagacccggcaacatctacagcaccctgaagagaccccaggtggagaccaagatcgacgtgagctacgagtacagattcctggagttcaccaccctgagcgccgccgagctgcccggcagcagcgccgtgagactggccagcctgagagacctgcccgcccagctgctggagctgtaccagcagggcttcagcctggccgccctgcaccccttcgtgcagcccacccacgagagagagaagacccccctggagcacatcttcagagccatcctgatcaagaagaccgacagaagccagaagaccgacctgcacaacgagggctacatcctggagctggactgctgcagcagcctggaccaccccaccgaccagaagctgatccccgagttcatcaagaagatccaggaggccgccagccagggcctgaagttcgtgggcgtgatcccccagtaccacagcagcgtgaacagcgccggcagcagcgcccccgtgagcaccgccaacagcaccgaggacgccagagacgccaagaacgccagaggcgaccacgccagcctggagaacgagaagcccggcaccggcgacgtgtgcagcgcccccgccggcagaaaccagagccccgagcccagcagcggccccagaggcgaggtgcccctggccaagcagcccagcagccccagcggcgagggcgacggcggcgagctgagcccccagggcgtgagcaagaccctggacggccccgagagcaaccccctggaggtgcacgaggagcccctgagcggcaagatggagatcttcaccctgttcaacaagcccaagagccaccagaagtgcagacagtactaccccgtgaccatccccctgcacgtgagcaagaacggccagaccgtgagcggcctggacgccaactggctggagcacatgagcgaccacttcagaaagggcggcatgctggtgaacgccgtgttctacctgggcatcgtgaacgacagcctgcacggcctgaccgacggcgtgttcatcttcgaggccgtgagcaccgaggacagcaagaccatccagggctacgacgccatcgtggtggagcagtggaccgtgctggagggcgtggaggtgcagaccgactacgtgcccctgctgaacagcctggccgcctacggctggcagctgacctgcgtgctgcccacccccgtggtgaagaccaccagcgagggcagcgtgagcaccaagcagatcgtgttcctgcagagaccctgcctgccccagaagatcaagaagaaggagagcaagttccagtggagattcagcagagaggagatgcacaacagacagatgagaaagagcaagggcaagctgagcgccagagacaagcagcaggccgaggagaacgagaagaacctggaggaccagagcagcaaggccggcgacatgggcaactgcgtgagcggccagcagcaggagggcggcgtgagcgaggagatgaagggccccgtgcaggaggacaagggcgagcagctgagccccggcggcctgctgtgcggcgtgggcgtggagggcgaggccgtgcagaacggccccgccagccacagcagagccctggtgggcatctgcaccggccacagcaaccccggcgaggacgccagagacggcgacgccgaggaggtgagagagctgggcaccgtggaggagaactag

SEQ ID NO: 184733 - DNA, 345 bp, Artificial Sequence
  derived and/or modified sequence
atgggctgcggcctgaacaagctggagaagagagacgagaagagacccggcaacatctacagcaccctgaagagaccccaggtggagaccaagatcgacgtgagctacgagtacagattcctggagttcaccaccctgagcgccgccgagctgcccggcagcagcgccgtgagactggccagcctgagagacctgcccgcccagctgctggagctgtaccagcagggcttcagcctggccgccctgcaccccttcgtgcagcccacccacgagagagagaagacccccctggagcacatcttcagagccatcctgatcaagaagaccgacagaagccagaagtag

SEQ ID NO: 184734 - DNA, 450 bp, Artificial Sequence
  derived and/or modified sequence
atgggctgcggcctgaacaagctggagaagagagacgagaagagacccggcaacatctacagcaccctgaagagaccccaggtggagaccaagatcgacgtgagctacgagtacagattcctggagttcaccaccctgagcgccgccgagctgcccggcagcagcgccgtgagactggccagcctgagagacctgcccgcccagctgctggagctgtaccagcagggcttcagcctggccgccctgcaccccttcgtgcagcccacccacgagagagagaagacccccctggagcacatcttcagagccatcctgatcaagaagaccgacagaagccagaagaccgacctgcacaacgagggctacatcctggagctggactgctgcagcagcctggaccaccccaccgaccagaagctgatccccgagttcatcaagaagatccagtag

SEQ ID NO: 184735 - DNA, 828 bp, Artificial Sequence
  derived and/or modified sequence
atgggctgcggcctgaacaagctggagaagagagacgagaagagacccggcaacatctacagcaccctgaagagaccccaggtggagaccaagatcgacgtgagctacgagtacagattcctggagttcaccaccctgagcgccgccgagctgcccggcagcagcgccgtgagactggccagcctgagagacctgcccgcccagctgctggagctgtaccagcagggcttcagcctggccgccctgcaccccttcgtgcagcccacccacgagagagagaagacccccctggagcacatcttcagagccatcctgatcaagaagaccgacagaagccagaagaccgacctgcacaacgagggctacatcctggagctggactgctgcagcagcctggaccaccccaccgaccagaagctgatccccgagttcatcaagaagatccaggaggccgccagccagggcctgaagttcgtgggcgtgatcccccagtaccacagcagcgtgaacagcgccggcagcagcgcccccgtgagcaccgccaacagcaccgaggacgccagagacgccaagaacgccagaggcgaccacgccagcctggagaacgagaagcccggcaccggcgacgtgtgcagcgcccccgccggcagaaaccagagccccgagcccagcagcggccccagaggcgaggtgcccctggccaagcagcccagcagccccagcggcgagggcgacggcggcgagctgagcccccagggcgtgagcaagaccctggacggccccgagagcaaccccctggaggtgcacgaggagcccctgagcggctag

SEQ ID NO: 184736 - DNA, 1737 bp, Artificial Sequence
  derived and/or modified sequence
atgggttgtggccttaataaactggagaagagggacgagaaacgacccggcaacatctactccactctcaagagaccacaggtggagactaagatcgacgttagttacgagtatagatttctcgagttcacaacactcagtgccgccgagctgcccggctcgtctgccgtcagactcgcctcgctccgcgatctgccagcccagttactggagctgtatcagcaggggttttcgcttgccgcactgcaccccttcgtccagcccacacatgagagagaaaaaaccccgttagagcacatttttagggctatcctaatcaagaagactgatagaagccagaagaccgatctgcacaatgaggggtacatcctcgagttggattgctgttccagtctcgaccaccctactgatcaaaagctgatccctgaatttattaagaaaatccaggaggccgcatcccaggggttgaaattcgttggtgtcatcccccagtaccattccagtgtgaatagcgctggcagctctgcgccggtcagcacagcgaattcaactgaggatgctcgcgacgcaaagaatgctcgtggggatcatgcctctttggaaaatgaaaaacctggcaccggagatgtctgctcggcgccagccggacggaatcagtcaccagaaccttccagtggaccgagaggcgaggtacccttggccaagcagcctagctcccccagcggagagggtgacggcggggagctctcaccacaaggtgtatcaaagactctggacgggccagaatcaaacccccttgaagtgcacgaggagcccctaagcgggaaaatggaaattttcacactgtttaacaagcctaagagccaccagaaatgcaggcagtattacccggtgactattcctctccatgtttcaaaaaatggtcagaccgtgagtgggctggatgcgaattggctggaacatatgtcggatcattttcgaaaaggcggcatgctggtcaacgctgtcttttatctggggattgttaacgatagtctgcatgggttgaccgacggtgtctttatttttgaagcagtgtccacggaagattcgaaaaccatccagggctatgatgcaatcgtggtcgagcagtggaccgttctggagggagtggaagtgcagacagactacgtgcctttgctgaattctctggctgcctacggttggcagctcacctgcgtcctgccaacacccgtagtaaagactaccagcgaaggcagcgtgagcactaagcaaattgtcttccttcagcgaccatgcctccctcagaagataaaaaaaaaagaatctaagtttcagtggagattctcccgtgaggaaatgcacaacagacagatgaggaagagcaaagggaagctatcagcccgagacaagcaacaggcagaggaaaatgagaagaacctggaagatcaatccagcaaagcgggagatatgggcaactgcgtgtccggacaacagcaggagggaggggttagcgaagaaatgaaaggccccgtgcaagaggacaagggtgagcagctctcccccggtggcttgctgtgtggcgtgggcgtcgagggtgaagcagtccagaacggtccggcctctcactcaagagctttggtggggatttgcacaggccactccaatcctggcgaggatgcacgggacggtgatgccgaagaagtgcgcgagttgggaaccgtggaagaaaattag

SEQ ID NO: 184737 - DNA, 345 bp, Artificial Sequence
  derived and/or modified sequence
atgggctgtgggcttaataagctggaaaagcgggacgaaaagagacctgggaacatctactccacactcaagaggcctcaggtcgagaccaagattgacgtgtcctatgagtatcggtttctcgagttcactacactttccgcagccgaattgcctggatcctcggctgttagattagcttccctgagggatctacctgcacagctcctggagctgtaccagcaaggattctctcttgcagcacttcatcccttcgtccagccgacccacgaaagggagaagacccctctggaacatatatttagggccatcctcatcaagaaaacagacaggtctcagaaatag

SEQ ID NO: 184738 - DNA, 450 bp, Artificial Sequence
  derived and/or modified sequence
atgggctgtggactcaacaagctggaaaaaagagacgagaaacgtcccggcaacatctacagcacacttaagagaccccaagtggagactaagattgacgtgagctatgagtatcggttcctcgagttcacgaccctatcagccgcagaactgcctggatccagtgcagtgcgcttagcctctctgagagatctgcctgctcaactgctcgagctttatcagcagggattctcactggcggccctgcatccatttgtgcagcccacacatgagcgagaaaaaactcccttagagcatatatttcgggccatccttatcaagaaaaccgataggagccagaagactgacttgcacaatgaagggtacatcttagaactggactgctgtagttctttggaccatccgacagaccaaaaactgatcccagaattcatcaaaaagattcagtag

SEQ ID NO: 184739 - DNA, 450 bp, Artificial Sequence
  derived and/or modified sequence
atgggctgtggtcttaataaactagaaaagcgcgacgaaaaaagacctggcaacatctattctaccctaaagaggcctcaagttgaaacaaagatcgatgtgagttatgaatacagattcctggaatttacaaccctctccgcagctgagctgccaggttcttctgctgtaaggcttgccagtcttagagaccttcctgctcagctgctggaactctaccagcagggcttctccctggcagcactccatcccttcgtacaacctacgcacgagcgtgagaagacaccactagaacatatttttagggccatcctgattaagaagacagatagatcacagaagacagacctgcacaacgagggatacattcttgaattagattgctgctcttccttggatcacccgacagatcagaagctcatcccagaattcattaaaaagatccagtag

SEQ ID NO: 184740 - DNA, 828 bp, Artificial Sequence
  derived and/or modified sequence
atgggctgcggactgaacaagttggagaagcgggatgagaaaagacctggtaacatttattccaccctgaagagaccacaggttgaaactaaaatcgacgtgtcctacgaatacagattcctggagtttaccactttatccgccgcagaactacccggcagctccgcagttcgcttggcctcactgagggacctgccggcgcagctcctagaattatatcaacaaggtttttctttggctgccctgcacccatttgtccaacctacgcatgagagagagaaaacacccctcgaacatatctttcgggccatcttgattaagaagacagaccggtcacagaagacagacctgcacaatgaagggtatatcctggagttagactgctgttcttcactggatcatcccactgatcagaaactcatacctgaattcatcaaaaaaattcaggaggctgctagccagggcctcaagttcgtgggagtgatccctcagtaccatagcagcgtgaacagcgctggcagctccgcccctgtgtcaaccgctaattcaaccgaggatgcgagagacgctaaaaatgctcggggagatcatgcgagcttagaaaatgagaaaccaggcaccggagacgtctgttctgctcccgcagggagaaaccagtctcctgaacctagcagtggaccacggggagaggttcctcttgctaaacaaccgtcttctccttcaggagaaggggacggcggcgaactcagccctcagggggtgagcaagacactggacggaccagagagcaatccactcgaggtacatgaggagcccctttctggatag

SEQ ID NO: 184741 - DNA, 1737 bp, Artificial Sequence
  derived and/or modified sequence
atgggctgcggcctgaacaagctggagaagagagatgagaagaggcctggcaacatctacagcaccctgaagaggccccaggtggagaccaagattgatgtgtcctatgagtaccgcttcctggagttcaccaccctgtctgctgctgagctgcccggcagcagcgctgtgcggctggccagcctgcgggacctgcctgcccagctgctggagctgtaccagcagggcttcagcctggccgccctgcacccctttgtgcagcccacccatgagcgggagaagacccccctggagcacatcttccgggccatcctgatcaagaagacagacaggagccagaagacagacctgcacaatgaaggctacatcctggagctggactgctgcagcagcctggaccaccccacagaccagaagctgatccctgagttcatcaagaagatccaggaggccgccagccagggcctgaagtttgtgggcgtcatcccccagtaccacagctctgtgaacagcgctggcagcagcgcccctgtgtccacagccaacagcacagaagatgccagagatgccaagaatgcccggggggaccacgccagcctggagaatgagaagccaggcactggagatgtgtgcagcgccccagctggaagaaaccagagccctgagcccagcagcggccccagaggagaggtgcccctggccaagcagcccagcagccccagcggggagggagatggaggagagctgagcccccagggcgtgtccaagaccctggatggccctgagagcaaccccctggaggtgcatgaggagcccctgagcggcaagatggagatcttcaccctcttcaacaagcccaagagccaccagaagtgccggcagtactaccctgtgaccatccccctgcacgtgtccaagaatggccagacagtgtctggcctggatgccaactggctggagcacatgtctgaccacttcaggaagggcggcatgctggtgaatgctgtgttctacctgggcatcgtgaatgacagcctgcacggcctgacagatggagtcttcatctttgaggccgtgtccacagaggacagcaagaccatccagggctatgatgccatcgtggtggagcagtggacagtgctggagggcgtggaggtgcagacagattatgtgcccctgctgaacagcctggccgcctacggctggcagctgacctgtgtgctgcccacccctgtggtgaagaccaccagcgagggctctgtgtccaccaagcagatcgtgttcctgcagaggccctgcctgccccagaagatcaagaagaaggagagcaagttccagtggaggttcagccgggaggagatgcacaaccggcagatgaggaagagcaagggcaagctgagcgcccgggacaagcagcaggccgaggagaatgagaagaacctggaggaccagagcagcaaggccggggacatgggcaactgtgtgtctggccagcagcaggagggcggcgtgtctgaggagatgaagggccctgtgcaggaggacaagggggagcagctgagccctgggggcctgctgtgtggggtgggcgtggagggggaggccgtgcagaatggacctgccagccacagccgggccctggtgggcatctgcaccggccacagcaaccctggagaagatgccagagatggagatgctgaggaggtgcgggagctgggcaccgtggaggagaactag

SEQ ID NO: 184742 - DNA, 345 bp, Artificial Sequence
  derived and/or modified sequence
atgggctgcggcctgaacaagctggagaagagagatgagaagaggcctggcaacatctacagcaccctgaagaggccccaggtggagaccaagattgatgtgtcctatgagtaccgcttcctggagttcaccaccctgtctgctgctgagctgcccggcagcagcgctgtgcggctggccagcctgcgggacctgcctgcccagctgctggagctgtaccagcagggcttcagcctggccgccctgcacccctttgtgcagcccacccatgagcgggagaagacccccctggagcacatcttccgggccatcctgatcaagaagacagacaggagccagaagtag

SEQ ID NO: 184743 - DNA, 450 bp, Artificial Sequence
  derived and/or modified sequence
atgggctgcggcctgaacaagctggagaagagagatgagaagaggcctggcaacatctacagcaccctgaagaggccccaggtggagaccaagattgatgtgtcctatgagtaccgcttcctggagttcaccaccctgtctgctgctgagctgcccggcagcagcgctgtgcggctggccagcctgcgggacctgcctgcccagctgctggagctgtaccagcagggcttcagcctggccgccctgcacccctttgtgcagcccacccatgagcgggagaagacccccctggagcacatcttccgggccatcctgatcaagaagacagacaggagccagaagacagacctgcacaatgaaggctacatcctggagctggactgctgcagcagcctggaccaccccacagaccagaagctgatccctgagttcatcaagaagatccagtag

SEQ ID NO: 184744 - DNA, 828 bp, Artificial Sequence
  derived and/or modified sequence
atgggctgcggcctgaacaagctggagaagagagatgagaagaggcctggcaacatctacagcaccctgaagaggccccaggtggagaccaagattgatgtgtcctatgagtaccgcttcctggagttcaccaccctgtctgctgctgagctgcccggcagcagcgctgtgcggctggccagcctgcgggacctgcctgcccagctgctggagctgtaccagcagggcttcagcctggccgccctgcacccctttgtgcagcccacccatgagcgggagaagacccccctggagcacatcttccgggccatcctgatcaagaagacagacaggagccagaagacagacctgcacaatgaaggctacatcctggagctggactgctgcagcagcctggaccaccccacagaccagaagctgatccctgagttcatcaagaagatccaggaggccgccagccagggcctgaagtttgtgggcgtcatcccccagtaccacagctctgtgaacagcgctggcagcagcgcccctgtgtccacagccaacagcacagaagatgccagagatgccaagaatgcccggggggaccacgccagcctggagaatgagaagccaggcactggagatgtgtgcagcgccccagctggaagaaaccagagccctgagcccagcagcggccccagaggagaggtgcccctggccaagcagcccagcagccccagcggggagggagatggaggagagctgagcccccagggcgtgtccaagaccctggatggccctgagagcaaccccctggaggtgcatgaggagcccctgagcggctag

SEQ ID NO: 184745 - DNA, 1737 bp, Artificial Sequence
  derived and/or modified sequence
atgggctgcggcctgaacaagctggagaagcgggacgagaagcggcccggaaacatttacagtaccctcaaaaggccccaggtggaaactaaaatcgatgtcagttacgagtataggttcttggaattcactactctatccgctgctgagcttcctggatccagtgccgtgcggctagcctctctccgtgatctgccggcccaattactggaactataccagcagggattcagtctggccgctttgcacccatttgtacaacctactcatgaacgggagaaaacccctcttgagcacatctttagagctatccttatcaagaagacggataggagccagaaaacggacctccataatgaagggtatatcctcgaattggattgctgcagtagtctggatcacccaacggaccagaaacttatacccgaatttatcaagaaaatacaggaggcagcaagccagggtctgaagttcgtaggtgtgatcccacagtaccacagctccgttaattctgcgggtagctcagctccagtcagcaccgcaaatagcactgaggatgctcgcgatgcaaagaacgctcgcggcgatcatgccagcctcgagaacgagaagcctgggactggcgacgtgtgcagtgctccagccggtcggaatcaatcccccgagcctagctcagggccaagaggtgaagttccacttgctaagcagccatcatccccttctggcgaaggtgacggtggagagctcagccctcagggagtgtccaagacacttgatgggccggagtcgaacccactggaagtccacgaagagcccctgagcggcaagatggagattttcacattgtttaacaagcccaagagtcatcagaagtgccggcagtactatccagtgaccatccctctccatgtgtccaagaacggtcagacagtgtctgggctggacgccaattggctggaacatatgagtgatcactttcgtaagggaggtatgctcgttaatgccgtgttctacctcggcatcgtgaacgatagcctccacggactgactgacggagtctttatttttgaggcagtgtctacggaggacagtaagacaatccaggggtacgacgctatcgtggtggaacagtggacggtgctggaaggcgtggaggttcagacagattacgtccctctgcttaacagcctcgcggcatacggctggcaactaacctgtgttctccccactcctgtcgtgaagactactagcgaggggagcgtttccacaaagcagatcgtgtttctccagcgcccttgtctgccacagaagatcaaaaagaaggaatcaaaatttcaatggagatttagccgggaagagatgcataacaggcagatgcgcaaatccaaagggaaacttagcgccagagacaaacaacaagccgaagaaaatgaaaagaacctagaagatcagtctagtaaagctggcgacatgggaaactgtgtgtctggccagcaacaggagggaggggtttctgaagagatgaagggaccagtgcaggaagacaagggagagcagctatctcccggcggtctcctgtgtggggtcggggtggagggtgaggccgtccaaaacggcccggccagccatagtcgcgccctggtgggaatttgtaccggacactccaatccaggggaggatgctagggacggggatgcagaggaggtccgcgaactgggaacagtggaagagaactag

SEQ ID NO: 184746 - DNA, 345 bp, Artificial Sequence
  derived and/or modified sequence
atgggctgcggcctgaacaagctggagaagcgggacgagaagcggcctggaaacatttacagtacactgaaaagaccccaggtggaaaccaaaatagatgtctcttatgagtataggttcctggaattcaccaccctctcggccgcagagctaccagggagttcagccgtgcgactagcatcactgcgtgatcttcccgcccaacttctggaactttaccagcagggtttctccctcgcagctcttcacccttttgtacagccgactcacgaaagagagaaaaccccgctcgagcatatcttccgcgcaattctgatcaaaaaaaccgatcgatcacagaagtag

SEQ ID NO: 184747 - DNA, 450 bp, Artificial Sequence
  derived and/or modified sequence
atgggctgcggcctgaacaagctggagaagcgggacgagaagcggccaggcaatatttattcaaccttgaaaaggcctcaggtggagacaaaaatcgatgtgtcttacgaataccgttttctggaattcacgacactctccgccgcggaattacccggaagctctgccgtgcggctcgcctccctcagggacttgcctgcacaactcctggaactgtaccagcagggattttctctggctgctctgcatccatttgtgcagcctacacacgaacgggaaaagacaccccttgagcacatttttcgcgctatccttataaaaaagactgatcggtctcagaaaactgacctgcacaatgaaggatacatcctggagctggattgctgcagctccctcgaccaccctaccgatcagaagttgattccagaattcattaaaaagattcagtag

SEQ ID NO: 184748 - DNA, 450 bp, Artificial Sequence
  derived and/or modified sequence
atgggctgcggcctgaacaagctggagaagcgggacgagaagcggccagggaacatctattccacactgaagagacctcaggtggaaaccaagatcgatgtgagttatgagtatcggtttttggagttcaccacgcttagcgcagccgaattacccggctctagtgccgtgcgcctggccagtctgcgcgatttaccggcgcagctgttagagctgtatcagcaaggcttttctctagcggctctgcaccccttcgtccagcctacgcacgagcgcgagaaaaccccacttgaacacattttcagagcaatccttattaaaaagaccgaccgctcccagaagaccgatctgcataacgagggatatatactggagctggactgttgtagcagcctcgaccatcctactgatcagaaactgatcccggaatttataaaaaaaatccagtag

SEQ ID NO: 184749 - DNA, 828 bp, Artificial Sequence
  derived and/or modified sequence
atgggctgcggcctgaacaagctggagaagcgggacgagaagcggcctgggaacatttacagtactcttaagaggcctcaagttgaaactaagatcgacgtctcctacgagtaccgttttctcgagtttaccaccctctccgcagccgagcttccaggaagctctgccgtgagactcgccagcttacgcgacctgcccgcacagctactggaactctatcagcaaggtttcagtctcgcggctctgcatccgtttgtgcagcctactcacgaacgtgagaaaactccactcgagcacatatttagggccatcctgataaagaaaaccgaccgctcacagaaaactgatctacacaatgagggttacattttggagctcgactgctgttcctctctcgatcatccaaccgatcagaaactgatccccgaatttatcaagaagatccaggaggctgctagccagggactgaagttcgtgggtgtgatccctcaatatcatagttcagtgaacagcgctggaagcagcgctccagtctctaccgcgaactctactgaagatgctagggatgccaagaatgctcgcggtgatcacgcgagcctggagaatgagaaacctggcaccggggacgtttgttcggctcccgcgggacgcaatcaatctcccgagcctagtagcggaccaagaggcgaggtgcctctggctaaacaaccatcgtccccctctggggaaggggatggtggggagctctctccccaaggagtgagcaagactctggacggaccagaaagcaatccactcgaggtgcacgaagaacccctgtccgggtag

SEQ ID NO: 184750 - DNA, 1737 bp, Artificial Sequence
  derived and/or modified sequence
atgggctgtggcttgaataaactggagaaacgtgatgagaagaggcccggaaatatctattcaaccctgaagaggccccaggtagagacaaaaattgatgtctcttacgagtaccgatttctggagttcacaacacttagcgcagccgaactgcctgggtcatccgcggtgaggctggcttccttacgcgaccttccagcccagcttttggaactttaccagcagggtttctcgctcgcagcactgcatcctttcgttcagccaactcacgagagagaaaagacaccactggagcatatattccgagccattctgataaagaaaaccgacaggtcccagaaaaccgacctacataatgaagggtatatcctggaattagactgttgttcctcactcgatcacccaacagatcaaaagttgattccagaatttatcaaaaaaattcaggaagcggctagccagggcctgaagtttgtgggagtaatcccacagtaccatagcagtgtcaacagcgccggttccagtgctccagtgagcaccgccaacagtacagaagacgctcgagatgctaaaaacgccagaggcgaccatgctagcctcgagaacgagaaaccaggaactggcgatgtttgttctgctcccgctggtagaaaccagtcccctgagccctcttccggccctcgtggcgaggtgcctcttgccaagcagccctcatcacctagtggcgaaggcgacgggggtgagctgagcccccagggagtgtcgaagactctcgacggcccagaatccaatcccctggaagtgcatgaggaacccttgtccggaaagatggagatttttacactgttcaataaaccaaagtctcatcagaaatgtcgccagtattacccggtgacaataccacttcacgtctctaagaacggacagaccgtgtccggccttgacgccaattggctggagcatatgagcgaccattttcgtaagggtgggatgctggttaatgctgtgttttatctgggaatcgtgaatgactctctgcacggcctgactgatggtgtctttatctttgaggccgtgtctacagaggattcaaagacgattcaaggctacgatgccatagtggttgaacaatggaccgtactggaaggcgtagaagttcaaactgattacgtgcctctgttaaattccttagcggcatacggctggcagctcacctgtgtgctgccgacccccgtcgtaaagacaacaagcgaaggctctgtgtcaactaagcaaatcgtctttctccagaggccctgtctccctcagaaaattaaaaagaaagagtcaaaattccaatggaggttctccagggaagagatgcataacaggcaaatgagaaagtctaagggtaaactatctgcgagagataagcagcaggcagaggagaacgagaaaaacttagaagaccagtccagcaaggccggagacatgggtaactgcgtgtcaggccagcagcaggagggaggagtaagcgaggagatgaaaggcccagtacaggaggataagggcgaacaactgagccctggaggtctgctatgcggtgtcggcgtggagggtgaggccgtgcagaacgggccagcatctcactcccgtgcactcgtggggatctgcacaggacactccaatccaggagaggacgcacgggacggagacgcggaagaagttcgcgagcttgggaccgtggaagaaaattag

SEQ ID NO: 184751 - DNA, 345 bp, Artificial Sequence
  derived and/or modified sequence
atgggatgtgggctgaacaaattagagaagcgggacgaaaagcgcccagggaatatctactcaacactgaagcgcccacaggttgaaacaaagattgatgtgtcatatgagtaccgatttctggagtttacaaccctatccgctgctgaactccccggttcatctgccgtgaggcttgctagcctgagagacctgcctgctcaattgctggaactataccagcagggattcagtcttgccgctttgcatccattcgtacaaccgacgcatgagagggagaagacgcccctggaacacatttttcgggcaattctaatcaaaaagactgaccggtctcagaagtag

SEQ ID NO: 184752 - DNA, 450 bp, Artificial Sequence
  derived and/or modified sequence
atgggctgtggtctgaacaaattggagaagcgcgacgagaagagacccggaaacatttacagcaccttgaaacggccacaggtggagaccaagattgatgtgtcttacgagtacagatttcttgagttcacaaccctgtctgcagccgaattacccggatcttcggctgtgcggttggcatctctgcgtgacctgcccgcacagctcctagaactgtaccagcaggggttcagtctcgcagctctccaccccttcgtccagcccactcacgaacgtgaaaagacaccgctggagcacattttccgggctattctcattaagaagacggatcggtcccagaaaactgatctccacaatgagggctacatcctggaactggactgttgcagttcactggaccatccgactgatcagaaactgatccccgagtttatcaaaaagatccaatag

SEQ ID NO: 184753 - DNA, 450 bp, Artificial Sequence
  derived and/or modified sequence
atgggatgcggactgaataagctcgaaaaaagggacgagaagcgcccaggtaacatttactccacgcttaagcgccctcaagttgagaccaagatcgatgtgagctacgaatatagatttcttgagttcactactttgtcagctgccgaactgccaggctcctcagcagtgcgcctggctagcctccgagacttaccagcccaactgttagaactttatcagcaggggttttccttggccgctttgcatccattcgtccagcctactcacgaacgggagaagacaccacttgaacatatctttagggccatcctgattaaaaagaccgatcgttcacagaagaccgacctgcataatgagggttacattctggaactggactgctgctcaagcttagaccacccaactgaccagaagcttatccccgaattcataaaaaaaatccagtag

SEQ ID NO: 184754 - DNA, 828 bp, Artificial Sequence
  derived and/or modified sequence
atggggtgtggacttaataagcttgaaaaacgcgacgagaaaaggcccggaaacatatacagtactttaaagagaccgcaggtggaaactaagatcgacgtaagctacgagtataggttccttgaatttactactctttctgctgctgaattgccgggatcttctgccgtccgactggccagcttaagagacctcccggctcagttgctagagctttatcaacaggggttttccctggcagcactccatcctttcgttcaaccaacccacgagagggagaaaacccctctggagcatatattccgcgcaatccttattaagaagactgacaggagccagaaaaccgacctccacaatgaaggctatatactagaattggattgttgctccagcctggaccacccaaccgaccagaaactgataccagagttcatcaaaaagatccaggaggccgcttcccagggactgaagttcgttggagtaatcccccagtatcacagcagcgtaaattcggctggcagctctgcgccagtctctacagcgaatagcacggaggacgccagggatgcgaagaacgcaaggggggaccacgcaagtctggaaaatgagaaaccaggtaccggagacgtgtgtagtgcacccgcaggcaggaaccagagccccgagccatcttccggcccacggggagaggtgccactcgccaaacagccctcttcaccaagcggcgagggtgacggcggagaactgagtccccagggtgtctccaagaccctggatggcccagagagcaacccactggaagtgcacgaagaaccactgtctggctag

SEQ ID NO: 184755 - DNA, 2982 bp, Artificial Sequence
  derived and/or modified sequence
cgtcggggctggagccggagcgcgccgggcgctgggcgcagcgagcgagagcgcggcggccgcgggctccggcgagggacagacgcaccgatcgccggagggacagacacacgaccacgcggcgccaccgcccacgcctccacccaccggcgcccaagtcctccccgcgccgcctcctctgtatggcacaaactttcctcccgggacggaacacgctgcctcagggagcccgcgaccgcgccttctcctccgccggtcccatacgctgctgaaatgggttgcggattgaacaagttagagaaacgtgatgaaaaacggcctgggaatatttattcaactttgaagaggcctcaggtggaaaccaagatagatgtgtcctatgaataccgcttcctggagttcacgactctgagtgctgcggagctccctgggtcctcagcagtgaggctggcctccctgcgtgacctgcccgcccagctcctggagctgtaccagcagggcttctcgctggcggccctgcaccccttcgtgcagcccacccatgagcgggagaagacgcccctggagcacatctttagagccatcctgatcaagaaaaccgacagatctcagaaaactgatcttcacaatgaaggctacatcttggaattagattgctgttcctccttagaccacccgacagaccagaaactcatcccagagttcattaagaagatccaggaggctgcaagccagggcctgaaattcgttggtgttatacctcagtaccattcctctgtgaactcggcaggcagcagtgctccggtgtctactgccaacagcaccgaggatgccagagatgcaaaaaacgcacgtggggatcacgcgtcactggagaatgagaaaccggggactggggatgtgtgcagtgctccggctgggagaaaccaaagcccagagcccagctcaggccccagaggggaggtgcccctcgccaagcagcccagctcaccctccggagagggagatggtggagaactttcaccacagggggtgagcaagacactggatggaccggagagcaaccccttggaggtgcatgaagagccactctcagggaaaatggagatcttcacccttttcaacaaaccgaagagccatcagaagtgccggcaatactaccctgtcaccattcctctccatgtctccaagaatggccagacagtgagcggtttggacgccaactggttagagcacatgagcgaccacttccggaaaggaggcatgctggtgaacgcagtcttctaccttggaatagtgaatgattccttacatggcttgacagatggagtattcatctttgaagctgtttccacagaagatagcaaaaccatacagggctatgatgctattgtggttgaacaatggacagtcctggaaggtgtcgaagtgcagacagactacgtgcccctgctgaactcgctggcggcctatggctggcagctcacctgtgtgctaccaactcccgtcgtcaagactaccagcgaggggagtgtatccaccaagcagattgtctttcttcagagaccttgtctacctcagaaaatcaagaagaaggaatcgaagtttcagtggcgattctccagagaagaaatgcacaacaggcagatgaggaaatcaaaaggtaaactcagtgccagagacaaacaacaagcagaagaaaatgagaagaacttagaagaccagtcttccaaagctggagacatgggaaactgtgtttcaggacagcagcaggagggtggagtctccgaggagatgaagggccctgtccaagaggacaagggagaacagctgtcccctggtggcctgctgtgtggggtgggtgtggagggtgaggctgtgcagaatggtcctgccagccacagcagggccctggtggggatttgcactgggcactccaatcctggagaggatgccagggacggggatgctgaggaagtcagagagcttggtacggttgaagaaaactgagtcttgggcaatttgtgctaaaactaggtgagttgccaaacccaaggcatcttaccaacagctggtttgggggctggtttccctggtgttgtgtgttacctaccctttggcttggcttgacctctccttgtgagctcacctgagccctcccagggccaggttcctgacagtgttggtttttgcacatccactggaaaggtgtcattaatgacccagtgttagaatgcaagaggtcaggttattctagccctcatggctgaaggcccagtcctggctccaccactcctccagccagagggtctggaccatccagtgcctgtcctcgccacagggcctccagggagcattcgggtcaaatccatggacaccctgggctacaaaccaaggctgctgttcatcccacatcgtgtggggcagtgtccatcccctgcagctacttggtgacttaacaactccaggagccctgtcagctgccctcctccacctaaaccccttcgactcttctgctttgacaaagaaaatgacattggggaggggaggtgctccgcctcccagcttttctcaaaatagtcctatagatactggtaatctggaaatgaagaagtaattctgtctctgcacctacttttgcagaatgttcaaggaagtattctgtgttagtattaatgccaaaaagttgtttttaaaggttttgtactcagcacatcatacaaaccacattacttctgtcacttcagggcatcgggactggctggcgcccttgttatgtgctattttaatcagtgtaacattggtcaagttgttacccatgtatgctgtgtttatcatgtgtatatcgtccagaaagtattaaggctttaggtagatgcaactggcgaaccttggagagggaatgctgattgtcttgaccaaacccacagcctgtctcttctcttgtttagttacttacggcaataaatcatctatgagtta

SEQ ID NO: 184756 - DNA, 555 bp, Artificial Sequence
  derived and/or modified sequence
aaatcttgaaggatccttgtctcccaggcgctcttcctgacagcacacaaccttgattaggaggggctgggagggaggatcgatgagcccctgacccctgggttctgaggctgccagggtcgcttgcagctcggccgcgtggaggtgaccgggcggaactccgagggggcgcggggagagctgggcgggcccaccgctccagcgctgctgaaatgggttgcggattgaacaagttagagaaacgtgatgaaaaacggcctgggaatatttattcaactttgaagaggcctcaggtggaaaccaagatagatgtgtcctatgaataccgcttcctggagttcacgactctgagtgctgcggagctccctgggtcctcagcagtgaggctggcctccctgcgtgacctgcccgcccagctcctggagctgtaccagcagggcttctcgctggcggccctgcaccccttcgtgcagcccacccatgagcgggagaagacgcccctggagcacatctttagagccatcctgatcaagaaaaccgacagatctcagaaaa

SEQ ID NO: 184757 - DNA, 599 bp, Artificial Sequence
  derived and/or modified sequence
gggtttgctctggggacagaggtgctggacgtgtaggagcagacatgccgcgcgctccgaggaagcgccggaaccaccagaagcacagggacgcgggtgccgagagtccccagcactgaaaacggggatctcctcttctcagctgctgaaatgggttgcggattgaacaagttagagaaacgtgatgaaaaacggcctgggaatatttattcaactttgaagaggcctcaggtggaaaccaagatagatgtgtcctatgaataccgcttcctggagttcacgactctgagtgctgcggagctccctgggtcctcagcagtgaggctggcctccctgcgtgacctgcccgcccagctcctggagctgtaccagcagggcttctcgctggcggccctgcaccccttcgtgcagcccacccatgagcgggagaagacgcccctggagcacatctttagagccatcctgatcaagaaaaccgacagatctcagaaaactgatcttcacaatgaaggctacatcttggaattagattgctgttcctccttagaccacccgacagaccagaaactcatcccagagttcattaagaagatccagga

SEQ ID NO: 184758 - DNA, 578 bp, Artificial Sequence
  derived and/or modified sequence
gaggtgctggacgtgtaggagcagacatgccgcgcgctccgaggaagcgccggaaccaccagaagcacagggacgcgggtgccgagagtccccagcactgaaaacggggatctcctcttctctgctgaaatgggttgcggattgaacaagttagagaaacgtgatgaaaaacggcctgggaatatttattcaactttgaagaggcctcaggtggaaaccaagatagatgtgtcctatgaataccgcttcctggagttcacgactctgagtgctgcggagctccctgggtcctcagcagtgaggctggcctccctgcgtgacctgcccgcccagctcctggagctgtaccagcagggcttctcgctggcggccctgcaccccttcgtgcagcccacccatgagcgggagaagacgcccctggagcacatctttagagccatcctgatcaagaaaaccgacagatctcagaaaactgatcttcacaatgaaggctacatcttggaattagattgctgttcctccttagaccacccgacagaccagaaactcatcccagagttcattaagaagatccagga

SEQ ID NO: 184759 - DNA, 1137 bp, Artificial Sequence
  derived and/or modified sequence
atggaccgggtctctggcgggtagtgggaaccgcgcgtggcgcctccctgcaggttgctctttgccggggctccggagctgccagagcagcaccccctggcccgcgtcggatggggacctgggctgatccttgggacgcctggatcttgggccaacttttttttgcggggaacgggtgtaggggagtcattcctggagcgatgtagggagaggcacttcggagcagcctgttgggggtcgtaggctctgcaggctcagaagcgcctaggaaggacgcagaggtgggggagcttggaggctacagctgctgaaatgggttgcggattgaacaagttagagaaacgtgatgaaaaacggcctgggaatatttattcaactttgaagaggcctcaggtggaaaccaagatagatgtgtcctatgaataccgcttcctggagttcacgactctgagtgctgcggagctccctgggtcctcagcagtgaggctggcctccctgcgtgacctgcccgcccagctcctggagctgtaccagcagggcttctcgctggcggccctgcaccccttcgtgcagcccacccatgagcgggagaagacgcccctggagcacatctttagagccatcctgatcaagaaaaccgacagatctcagaaaactgatcttcacaatgaaggctacatcttggaattagattgctgttcctccttagaccacccgacagaccagaaactcatcccagagttcattaagaagatccaggaggctgcaagccagggcctgaaattcgttggtgttatacctcagtaccattcctctgtgaactcggcaggcagcagtgctccggtgtctactgccaacagcaccgaggatgccagagatgcaaaaaacgcacgtggggatcacgcgtcactggagaatgagaaaccggggactggggatgtgtgcagtgctccggctgggagaaaccaaagcccagagcccagctcaggccccagaggggaggtgcccctcgccaagcagcccagctcaccctccggagagggagatggtggagaactttcaccacagggggtgagcaagacactggatggaccggagagcaaccccttggaggtgcatgaagagccactctcaggg

SEQ ID NO: 184760 - protein, 1571 aa, Artificial Sequence
  derived and/or modified sequence
MADRGCPLEAAPLPAEVRESLAELELELSEGDITQKGYEKKRAKLLARYIPLIQGIDPSLQAENRIPGPSQTTAAAPKQQKSRPTASRDERFRSDVHTEAVQAALAKYKERKMPMPSKRRSVLVHSSVETYTPPDTSSASEDEGSLRRPGRLTSTPLQSHSSVEPWLDRVIQGSSTSSSASSTSSHPGGRPTTAPSAAATPGAAATTALAGLEAHTHIDLHSAPPDVTTGLVEHSYFERPQVASVRSVPRGCSGSMLETADGVPVNSRVSSKIQQLLNTLKRPKRPPLKEFFVDDFEELLEVQQPDPNQPKPEGSETSVLRGEPLTAGVPRPPSLLATLQRWGTTQPKSPCLTALDTTGKAVYTLTYGKLWSRSLKLAYTLLNKLTSKNEPLLKPGDRVALVFPNSDPVMFMVAFYGCLLAELVPVPIEVPLTRKDAGSQQVGFLLGSCGVFLALTTDACQKGLPKAQTGEVAAFKGWPPLSWLVIDGKHLAKPPKDWHPLAQDTGTGTAYIEYKTSKEGSTVGVTVSHASLLAQCRALTQACGYSEAETLTNVLDFKRDAGLWHGVLTSVMNRMHVVSVPYALMKANPLSWIQKVCFYKARAALVKSRDMHWSLLAQRGQRDVSLSSLRMLIVADGANPWSISSCDAFLNVFQSRGLRPEVICPCASSPEALTVAIRRPPDLGGPPPRKAVLSMNGLSYGVIRVDTEEKLSVLTVQDVGQVMPGANVCVVKLEGTPYLCKTDEVGEICVSSSATGTAYYGLLGITKNVFEAVPVTTGGAPIFDRPFTRTGLLGFIGPDNLVFIVGKLDGLMVTGVRRHNADDVVATALAVEPMKFVYRGRIAVFSVTVLHDDRIVLVAEQRPDASEEDSFQWMSRVLQAIDSIHQVGVYCLALVPANTLPKAPLGGIHISETKQRFLEGTLHPCNVLMCPHTCVTNLPKPRQKQPEVGPASMIVGNLVAGKRIAQASGRELAHLEDSDQARKFLFLADVLQWRAHTTPDHPLFLLLNAKGTVTSTATCVQLHKRAERVAAALMEKGRLSVGDHVALVYPPGVDLIAAFYGCLYCGCVPVTVRPPHPQNLGTTLPTVKMIVEVSKSACVLTTQAVTRLLRSKEAAAAVDIRTWPTILDTDDIPKKKIASVFRPPSPDVLAYLDFSVSTTGILAGVKMSHAATSALCRSIKLQCELYPSRQIAICLDPYCGLGFALWCLCSVYSGHQSVLVPPLELESNVSLWLSAVSQYKARVTFCSYSVMEMCTKGLGAQTGVLRMKGVNLSCVRTCMVVAEERPRIALTQSFSKLFKDLGLPARAVSTTFGCRVNVAICLQGTAGPDPTTVYVDMRALRHDRVRLVERGSPHSLPLMESGKILPGVKVIIAHTETKGPLGDSHLGEIWVSSPHNATGYYTVYGEEALHADHFSARLSFGDTQTIWARTGYLGFLRRTELTDASGGRHDALYVVGSLDETLELRGMRYHPIDIETSVIRAHRSIAECAVFTWTNLLVVVVELDGLEQDALDLVALVTNVVLEEHYLVVGVVVIVDPGVIPINSRGEKQRMHLRDGFLADQLDPIYVAYNM

SEQ ID NO: 184761 - DNA, 4719 bp, Artificial Sequence
  derived and/or modified sequence
atggcagacagaggatgtccactggaggccgctcctttgccagcagaggtcagggaatcactggccgagctcgaattggagctgagtgaaggagatataactcagaaaggatacgaaaagaagcgtgctaaactgctagctcgctatattcccctgatccagggaattgatccatctctgcaagccgagaatcgcatcccgggtcccagtcagactaccgccgcagcacctaaacaacagaaatctcgtcctactgccagtagggacgagaggttccgcagcgatgtgcacacagaagccgtacaggccgccctcgcgaagtataaagaaagaaaaatgccaatgcctagcaaaagacgatctgtcctggtccactcctcagtcgaaacttatacgcccccagacaccagctccgcttctgaggacgagggaagcctgcggaggcctggtcgcttaacaagcacaccgctgcaaagtcatagtagcgtggaaccatggcttgatagggtgatacagggcagttcaacatcgtccagtgcctcatcaacttccagtcacccagggggcaggcccacaacagccccctccgctgctgcgacacctggagccgctgcaaccacagctctggcggggctcgaagcccatactcatatagctgaccttcactcggcgccacctgatgtgaccactggattggtggagcattcatatttcgagagaccacaggtggcaagcgtcaggtctgtgccccgtggatgctctggcagcatgttggagacagcagatggcgttcccgtaaattctagagtgtcatcaaagattcagcagttactgaatacccttaagcgccccaaaaggccgcctctgaaagaatttttcgtggatgattttgaagaacttctggaagtgcagcaacctgaccctaaccagccaaaacctgagggcagcgagacctctgtgctgagaggggaacccctgacagccggcgtaccacgcccacccagcttgctggctacactccagagatgggggacaactcaacccaaatccccttgcctcaccgccctggacacaacgggaaaagcggtgtacacactaacctatggtaaattatggagccggtctcttaagctggcttataccctgcttaataagctaacttcgaagaacgagcccttgcttaagcccggagatagagtggcgctcgtgttcccgaacagtgatccggtgatgttcatggtcgcattttatggttgcctgctggccgagttggtgccggtcccaatcgaggttccactgacccgcaaggacgcaggctctcagcaggttggattcctgctcggctcttgtggcgtgttcctggccctgaccacagatgcttgtcagaagggcctcccaaaagctcagaccggggaagtggccgctttcaagggatggcctccgctgagttggctcgtgattgacgggaaacacctggcgaaaccccctaaagactggcacccactggctcaggatacgggcaccggcactgcttatatcgagtataaaacgtcaaaagagggatcaacagtcggagtgaccgtcagccacgctagcctcctagcccagtgcagagctttgactcaggcctgcgggtacagtgaggctgagacccttaccaacgttctggatttcaaacgagacgcgggtctctggcacggggtcctgacatctgtgatgaaccgcatgcacgtggtctccgttccttacgctctgatgaaagcaaacccactgtcatggatccagaaagtttgcttctataaagccagggcggccttggtaaagagccgcgacatgcactggtccctgcttgcccagcgggggcagcgtgacgtgtccttgagctcattgcggatgctgatcgttgctgatggcgcgaatccttggagcatctcgtcatgtgacgcattcctgaacgtcttccaatctcgcgggctgcggccggaggtcatctgcccctgtgcaagtagcccggaggccctgaccgtcgccatacgccgccccccagatctcggcggcccaccgccacgcaaagccgtccttagtatgaacggtctgtcttatggtgtgattagagtagacacagaggagaaattgtccgtgctgaccgtacaggacgtaggccaagtgatgcccggcgctaacgtttgcgtcgtgaagctcgaagggacgccttacctgtgtaaaaccgacgaggtgggtgagatatgtgtgtcaagctccgcaacgggtacggcttactatggcctgctgggcattacaaagaacgtctttgaggccgtccccgttacaaccggcggggcacccattttcgacaggccctttacgcgcacaggtttgttgggctttattggcccagataacctggtgtttattgttggcaagctggacggtcttatggtaaccggggtccggcggcataacgccgacgatgtggtcgccacggctctagcagtcgaacccatgaagttcgtgtatcggggcagaattgctgtgttctctgttactgtgttgcatgacgaccggatcgtgcttgtggccgagcaacgccctgacgctagtgaggaagatagttttcaatggatgtcacgcgtgctgcaggccatcgacagtattcaccaggttggcgtctattgcctggccctcgtgccggccaatacccttccaaaggcccctctggggggcattcatatctccgaaactaaacagcgtttcctggaagggacgttacatccctgcaatgtcttgatgtgtccccacacatgtgtcacgaatcttcctaagcctcgtcagaagcagcccgaggtgggacccgctagtatgattgtgggcaatttagtcgccggcaagcggatagctcaagcttctgggcgggagttagcgcatctcgaggattccgaccaggccagaaaattcttgttccttgcggacgtattacagtggagggcacacactaccccagatcatcccctgttccttctacttaacgcaaaaggaactgtaacatcaactgctacctgcgttcaactccacaagagggcagaacgggtggccgccgccctcatggaaaagggaagactctcggtcggagaccacgtggccctggtttacccaccaggagttgacctaattgcggccttctatggctgcctgtactgtgggtgtgttcctgtgactgtcagaccgccacacccacagaatctgggcactacccttcccactgtgaagatgatcgtcgaagtctcaaagtccgcttgtgttcttaccacccaggcggtcacgcggttgttgagaagcaaagaagctgcagcagccgtggatatcaggacatggcctacaatcctggatactgatgatattcctaaaaagaagatcgccagcgtattcaggccacctagccccgacgtgctcgcttaccttgacttctcagtgagtaccacagggatcttagccggcgtcaagatgagccacgccgccacgtccgctctctgcagatcaatcaagcttcagtgcgaactatatcctagccgacagatcgccatttgcttagacccttactgtggcctgggttttgctctatggtgtctatgctctgtctacagcggtcatcagagcgtgctggttcctcctctggaactggaatcaaatgtgtcactctggctcagcgccgtgtcccagtacaaggccagggtcacattttgcagctactcagttatggagatgtgtactaagggtttaggggcacaaaccggtgtgctgcggatgaaaggggtcaacctgtcatgtgtaagaacgtgcatggtggtggccgaagagaggccccgaatcgccctgactcagtcgttttctaaattgttcaaggacctcggcctgccagctagagccgtgtctacgacatttgggtgcagagttaatgtggctatctgtttgcaggggacagctggccctgatcctactacagtgtatgtagatatgcgtgccctgcggcatgatcgtgttcgcctggtcgaacgcggcagtcctcactccctgcctctcatggaaagcggcaaaatcctacctggcgtcaaggtcataatcgctcatactgaaacaaaaggaccacttggcgactctcacctgggcgagatttgggtgtcgagcccccacaatgcgaccggctattataccgtgtacggcgaggaggcactgcacgctgatcacttctcggcgcgcctgagctttggtgatacccagacaatttgggctagaaccggctatctggggttcctccgacgcaccgaactgactgatgcctccggaggcaggcatgatgcattgtatgtggttggtagcctagatgagaccctggagctcaggggcatgagataccaccctatcgatatcgagactagtgtgatccgtgcccatcgctctatcgcagagtgtgctgtgtttacgtggacaaacctcctggtggtggtagtcgaacttgatggcctagaacaggatgccctcgacttagtggctctggttaccaatgtcgtactggaggagcattaccttgtggttggagtggtcgtgattgtcgaccctggggtgatccctatcaactcccgcggggagaagcagcgcatgcatctgagggacgggttcctagccgatcagctagatcctatttacgtggcctataatatgtag

SEQ ID NO: 184762 - DNA, 4716 bp, Artificial Sequence
  derived and/or modified sequence
atggctgacaggggttgcccccttgaagctgcacctctcccggccgaagtgcgagagtcgctggcagagctggaactcgagctcagtgaaggggacataactcagaaggggtacgagaagaagagggcaaaactgctagctcggtatattccactgattcaagggattgacccttctctgcaggccgaaaaccgcatccctggcccatcacagaccaccgcggccgctccaaaacagcagaagagtcgtccgacggcaagccgtgatgagcggttcagaagtgatgtgcataccgaggccgtgcaggcagcacttgccaagtacaaagaacgtaagatgccaatgcccagtaaacggcggagtgtcctggtgcactcaagtgtcgagacatacacaccacctgacacctcatcagcaagcgaggacgagggatcactgaggcgacccggccgcctcactagcacacctcttcagagtcactcaagtgttgaaccctggcttgaccgagtgatccagggatcctctacgagcagttccgcctcctctacgtccagtcatccagggggtcgaccaaccacagctcccagtgcagcagccacgccgggggccgcggccaccacagctctagctgggctcgaggctcacactcacatagatcttcactccgcccctccagatgtcactactgggctggtggagcacagttactttgaaagacctcaggtggcttcagtgcggagcgtaccacggggttgcagtggctcgatgctcgagacggcagatggggtgcccgtgaactccagggtgagctctaaaatccagcaattgctgaatacacttaaacggcctaaaaggccccccctcaaggagttcttcgtggacgactttgaagaactcttggaggttcagcagccagacccaaatcagccgaagccagaaggatccgagacctcagtgctgaggggggagcctcttacagctggagtcccacggcccccctccttattggccacattgcagaggtggggcaccactcaacccaaaagtccatgtctcacagcgcttgacaccacaggcaaagcagtgtacactctgacatacgggaaactgtggagtcggagcctcaagctcgcatataccctcctgaacaaacttacatccaaaaacgaaccactgctgaaaccaggcgatagggtggcactcgtgttccctaactctgatcctgttatgttcatggttgccttttacgggtgcctgttagctgagctcgtgcctgtgcctatcgaagttccactgaccaggaaggacgcgggctcccagcaagtgggtttcctcctcggttcctgtggtgtgttcttagctctgacgaccgacgcctgtcagaagggcctgccgaaggcacagacgggagaagtcgctgcgtttaaaggctggcccccgttgagttggctcgtgattgacggaaaacatttggctaaaccaccaaaggattggcacccgctggcccaggacacaggaacaggcacagcatacattgaatacaaaacatccaaagaaggtagcaccgtgggagtgactgtctcccatgcgtcccttctggcccagtgtcgggcactgacgcaagcatgtggctacagtgaagcggaaactttaactaacgtgctggattttaagcgggacgccgggctgtggcatggggtcctcacatccgtgatgaatcgcatgcatgtggtgtctgttccctacgcattaatgaaggccaatccactgtcatggatccaaaaagtatgcttctacaaagctagggctgcacttgtgaagtcacgggacatgcattggtctctgctggcgcaacggggccagcgagatgtatctcttagctcactgcgcatgctgattgtggcagacggggccaatccttggtcaatttctagctgcgatgcttttctgaacgtgtttcaatcccgcggactcagacccgaagtgatctgcccctgcgccagctctcccgaggccctgaccgtggccatcaggagacccccggacttaggtggcccgcccccccgtaaagcagtgttaagcatgaacggactttcatacggcgtgatcagggttgatacggaagaaaagcttagcgtattgaccgtacaagatgttggacaggtaatgccaggggcgaatgtgtgtgtcgtaaaactcgaaggtacgccatacctgtgtaaaaccgatgaggttggtgagatctgtgtttcttcctcagcaactggcaccgcttattatgggcttcttggaattaccaagaatgtatttgaagcagtgccggtcactacaggtggtgcacctatcttcgataggccattcaccaggactgggcttctgggattcataggcccagataatctagttttcattgtgggaaagctggatggtcttatggtcacaggtgtccgcaggcataacgccgacgatgtggtcgccaccgccttagccgtggagcccatgaaatttgtttaccggggacggatagcggttttttccgtgacagtcctgcatgatgatcggattgtgttggtagcggaacagagacctgacgctagtgaggaagattctttccaatggatgtccagggtgctgcaagcgatcgattccatccatcaggtgggagtgtattgcctggctcttgtgcccgcaaacacactgcctaaggcccccctggggggaattcacatctccgaaacaaagcagcggtttctagagggaactctgcacccctgcaacgtgctgatgtgcccgcatacttgtgtgaccaacttaccaaaaccacgccagaaacagccagaagtcgggcctgcctctatgatcgtcggtaatttagtcgccggaaagcgcatcgcacaggcctctggcagagagctcgcacatttggaggatagcgatcaggcccggaagttcctctttctcgctgacgtgctgcaatggcgcgcccatacaacgcccgatcacccattattcttgctgctgaacgccaagggcaccgtcacttccaccgccacgtgtgtgcagctacataaacgggcggaaagagtggccgcagccctcatggagaagggacgcctgtccgtgggcgaccatgtggccctagtctaccctcctggggttgatctgattgcagctttttacgggtgtctttattgcggatgcgtgcccgtaactgtgcgcccacctcatccacaaaatctgggaactacgctgcccacagtgaaaatgatcgtcgaggtatctaagtcagcctgtgttttgaccacacaggctgtgacacggttactgcgcagtaaagaggccgccgccgcggttgatattcgtacttggcctactatacttgacaccgatgatatccctaagaaaaagatagcaagtgtctttcgcccgccttcccccgatgtcttagcctatctggatttttctgtgagtacgaccggcatcctggcgggggtgaaaatgtcccacgccgccacgtctgcactctgtcgatccattaagctacagtgtgaattgtacccttcacggcagatagcaatatgcctcgatccttattgtggcctgggctttgccctctggtgtctctgctccgtatactctggccaccagtctgttctggtgcccccgctggagctcgagtctaatgtcagcctgtggttgtctgcagtgtcgcaatataaggcaagggtgacattctgctcttattccgtgatggagatgtgcactaagggcttaggggcgcagacaggtgtgcttagaatgaaaggggtgaatctgtcttgcgtgcggacttgcatggtggttgccgaagaacgcccgcgaatagcactcacacaatcattctcaaagctctttaaagaccttggccttcctgccagagcggtcagcacaactttcggttgccgcgtgaatgtggctatctgcctgcagggaaccgcaggtcctgaccccaccacagtgtatgttgatatgagagccctcagacacgacagagtgagacttgttgagcgggggtctccacacagtttgcccctgatggaatccggcaaaattctgccgggtgtaaaggttataattgcgcacacagagaccaagggtcccctaggcgacagtcacctcggggagatctgggtaagctcccctcataacgcaaccggctactatactgtgtacggcgaagaggctctacatgcagaccatttctctgcacggctcagcttcggcgatacccagactatatgggccagaacggggtacctggggtttttgcggcggactgaactgacggacgcatctgggggccgccacgatgccctttacgtcgtcggtagcctggatgagaccctggaacttaggggcatgaggtatcaccctatcgacattgagacctctgttatccgagctcacaggtccattgccgagtgtgctgtctttacgtggacaaacctccttgtggtcgtagtagaactggatgggcttgaacaggacgccctcgatttggtcgccctagtcaccaacgtggtgctcgaagaacactacctcgttgttggtgtcgttgtcatcgtcgaccctggagttatccctatcaacagccggggcgaaaaacagcggatgcacctcagggatggtttcctcgccgaccaattagatccaatctatgttgcctacaatatgtag

SEQ ID NO: 184763 - DNA, 2526 bp, Artificial Sequence
  derived and/or modified sequence
atggcggacagagggtgccctctggaggcagcacccctcccagctgaggtgcgcgagtcacttgctgagctcgaattggagttgagcgaaggggacattacccaaaaggggtatgaaaagaagcgagcaaagctcctggctcgctatattcctcttatacagggaattgatccgtccctgcaggccgagaaccgtataccaggacctagtcaaaccacagcagcagcccctaagcagcagaagtccaggccgactgctagtagagatgaacgcttccgatctgatgtgcacaccgaagctgttcaggcagcactggctaagtacaaggagcgcaaaatgccaatgccctccaagcgcaggtccgttttggtgcactcatctgtcgaaacctatacacctccagacacaagttccgcttcagaagatgagggctctctgaggaggccaggcagacttactagcaccccactgcagtcacattcatcggtagagccttggttggatcgggtgattcagggttcgagcacctcctcaagcgcctcatcaacgagcagtcatcccggcggtcgtcctacaacagccccatcggccgccgcgacccctggggcagcggcaacgacggccttggcaggcctggaggcgcatacacacattgatttgcactctgcgcctcccgatgtcacaacgggtttggtggaacactcctactttgagcgacctcaggtggcctcagtacgatcggtgccgagagggtgttctggtagcatgttggagacagcagatggcgtacccgtgaattcaagagtttcttctaaaattcagcagttactcaacacgttaaaacgacccaaacgacctcctctgaaagaattttttgtcgatgattttgaggagttactggaagtgcagcagccggaccccaaccagcccaagcccgagggctccgaaacctccgtgctgcggggcgagcctctgaccgctggcgtgccgaggcccccctcactcctggcaaccctgcagcggtgggggacaacgcagccgaagagtccgtgtttaaccgccctcgataccaccgggaaggccgtctataccctgacgtatgggaagttgtggagcaggtccctcaagctggcctacacactgctaaacaaattaacatctaaaaacgaaccccttttgaagccaggcgaccgggtggcactggtcttcccaaactctgacccagtaatgttcatggtagccttttatgggtgcctgttggctgagctcgttccagtgcctattgaggtacccctaactcgcaaagatgctgggtcacagcaggttggattcctgcttggctcctgtggcgtgttcctggcccttacaaccgatgcctgtcagaaagggctgcctaaggcgcaaactggagaagtggcagcgtttaagggctggcccccgctttcctggctcgttatcgacgggaaacatctcgctaaacccccaaaggactggcaccccttggcccaggacacggggaccggcacagcttacatcgaatacaaaacctcaaaggaaggctcaacagtcggggtgactgtatcacacgcttccctattagctcaatgcagggcacttacccaggcatgtggatactctgaggcggagacgctgacgaacgttctggatttcaagcgcgatgcagggctttggcacggtgtactgacctctgtgatgaatcgtatgcatgttgtcagtgtaccatacgcactcatgaaggcgaatccgctctcctggatccagaaggtatgtttttacaaggctcgggccgccctagtcaaatctcgggacatgcactggagccttctcgcgcaacgtggccagcgagacgtgagcctctcatccctgaggatgctgattgttgccgacggagcaaacccgtggagtatttcctcatgtgatgcgttcctgaatgtctttcaatctagaggtttgaggccggaggttatttgtccgtgcgcctcctccccagaggcacttaccgtggccatacgccggccacctgacttgggcggcccaccaccacgcaaggccgtgctcagcatgaatgggctgagttacggcgtgatccgagtcgatactgaggagaagctttccgtccttacggtacaggacgttgggcaggttatgcccggtgcgaacgtttgcgtggtcaagctcgaaggaaccccttatctgtgcaaaaccgatgaggtaggtgagatttgcgtgtcctcctcggccactggaaccgcctactacggattgctgggcattactaagaatgtgttcgaggcagtccctgtgacaacgggcggcgcacctattttcgatagaccttttacccggaccggtctgctggggtttataggccctgataacctggtctttattgtgggaaaactggatggattgatggttacgggagtgaggcggcataatgcagatgatgtcgtggctaccgccctggctgtagaaccaatgaaattcgtgtaccgggggagatag

SEQ ID NO: 184764 - DNA, 4719 bp, Artificial Sequence
  derived and/or modified sequence
atggctgaccggggctgccccctggaggccgcccccctgcctgctgaggtgcgggagagcctggccgagctggagctggagctgtctgagggggacatcacccagaagggctatgagaagaagagggccaagctgctggcccgctacatccccctcatccagggcatcgaccccagcctgcaggctgaaaatcgcatccctggccccagccagaccacagctgctgcccccaagcagcagaagagccggcccacagccagcagagatgagcgcttcagaagtgatgtgcacacagaggccgtgcaggccgccctggccaagtacaaggagaggaagatgcccatgcccagcaagagaagatctgtgctggtgcacagctctgtggagacctacaccccaccagacaccagcagcgcctctgaagatgagggcagcctgcggcggcccggccgcctgaccagcacccccctgcagagccacagctctgtggagccctggctggacagagtcatccagggcagcagcaccagcagcagcgccagcagcaccagcagccaccctgggggccggcccaccacagcccccagcgctgctgccaccccaggagctgctgccaccacagccctggccggcctggaggcccacacccacatcgctgacctgcacagcgcccccccagatgtgaccaccggcctggtggagcacagctactttgagcggccccaggtggcctctgtgcgctctgtgccccggggctgcagcggctccatgctggagacagcagatggagtgcctgtgaacagccgggtgagcagcaagatccagcagctgctgaacaccctgaagaggcccaagaggcctcccctgaaggagttctttgtggatgactttgaggagctgctggaggtgcagcagcctgaccccaaccagcccaagccagagggcagcgagacctctgtgctgcggggggagcccctgacagctggggtgcccaggcctcccagcctgctggccaccctgcagcgctggggcaccacccagcccaagagcccctgcctgacagccctggacaccaccgggaaggctgtgtacaccctgacctacggcaagctgtggagccgcagcctgaagctggcctacaccctgctgaacaagctgaccagcaagaatgagcccctgctgaagccaggggacagagtggccctggtgttccccaacagcgaccctgtgatgttcatggtggccttctacggctgcctgctggccgagctggtgcctgtgcccatcgaggtgcccctgaccaggaaggatgctggcagccagcaggtgggcttcctgctgggcagctgtggggtcttcctggccctgaccacagatgcctgccagaagggcctgcccaaggcccagacaggagaggtggccgccttcaagggctggccacccctgtcctggctggtgattgatggcaagcacctggccaagccacccaaggactggcaccccctggcccaggacaccggcaccggcacagcctacatcgagtacaagaccagcaaggagggcagcacagtgggcgtgacagtgagccacgccagcctgctggcccagtgccgggccctgacccaggcctgtggctacagcgaggccgagaccctgaccaacgtgctggacttcaagagagatgctggcctgtggcacggcgtgctgacctctgtgatgaacaggatgcacgtggtgtctgtgccctatgccctgatgaaggccaaccccctgtcctggatccagaaggtgtgcttctacaaggcccgggccgccctggtgaagagccgggacatgcactggagcctgctggcccagaggggccagagagatgtgtccctgagcagcctgaggatgctgattgtggctgatggagccaacccctggagcatcagcagctgtgatgccttcctgaatgtgttccagagccggggcctgcggcctgaggtgatctgcccctgtgccagcagccctgaggccctgactgtggccatcagaagacctccagacctgggcggccccccacccaggaaggctgtgctgtccatgaatggcctgtcctatggagtcatccgggtggacacagaggagaagctgtctgtgctgactgtgcaggatgtgggccaggtgatgcctggggccaacgtgtgtgtggtgaagctggagggcaccccctacctgtgcaagacagatgaggtgggggagatctgtgtgagcagcagcgccaccggcacagcctactacggcctgctgggcatcaccaagaatgtgtttgaagctgtgcctgtgaccaccggcggggcccccatctttgaccggcccttcaccaggacaggcctgctgggcttcatcggccctgacaacctggtgttcatcgtgggcaagctggatggcctgatggtgactggagtgcggcggcacaatgctgatgatgtggtggccacagccctggccgtggagcccatgaagtttgtgtaccggggcagaattgctgtgttttctgtgacagtgctgcatgatgaccgcatcgtgctggtggccgagcagaggccagatgcctctgaagaagattccttccagtggatgagccgggtgctgcaggccatcgacagcatccaccaggtgggcgtgtactgcctggccctggtgcctgccaacaccctgcccaaggcccccctgggcggcatccacatcagcgagaccaagcagcgcttcctggagggcaccctgcacccctgcaatgtgctgatgtgcccccacacctgtgtgaccaacctgcccaagccccggcagaagcagcctgaggtgggccctgcctccatgattgtgggcaacctggtggccggcaagagaattgcccaggccagcggccgggagctggcccacctggaggacagcgaccaggccaggaagttcctgttcctggctgatgtgctgcagtggagggcccacaccaccccagaccaccccctcttcctgctgctgaatgccaagggcaccgtgaccagcacagccacctgtgtgcagctgcacaagagagctgagcgggtggccgccgccctgatggagaagggccgcctgtctgtgggggaccacgtggccctggtgtacccacctggggtggacctgattgctgccttctacggctgcctgtactgcggctgtgtgcctgtgacagtgcggcccccccacccccagaacctgggcaccaccctgcccaccgtgaagatgattgtggaggtgtccaagagcgcctgtgtgctgaccacccaggccgtgacccggctgctgcggagcaaggaggccgctgctgctgtggacatccgcacctggcccaccatcctggacacagatgacatccccaagaagaagatcgccagcgtcttccggccccccagcccagatgtgctggcctacctggacttctctgtgtccaccaccggcatcctggccggcgtgaagatgagccatgctgccaccagcgccctgtgccgcagcatcaagctgcagtgtgagctgtaccccagccggcagatcgccatctgcctggacccctactgcggcctgggctttgccctgtggtgcctgtgcagcgtgtacagcggccaccagagcgtgctggtgccccccctggagctggagagcaatgtgtccctgtggctgtctgctgtgtcccagtacaaggcccgggtgaccttctgcagctacagcgtgatggagatgtgcaccaagggcctgggcgcccagacaggagtgctgaggatgaagggcgtgaacctgagctgtgtgaggacctgcatggtggtggccgaggagcggcccagaattgccctgacccagagcttcagcaagctgttcaaggacctgggcctgcctgcccgggctgtgtccaccaccttcggctgccgggtgaatgtggccatctgcctgcagggcacagctggccctgaccccaccaccgtgtatgtggacatgagggccctgcggcatgacagagtgcggctggtggagcggggcagcccccacagcctgcccctgatggagagcggcaagatcctgcccggggtgaaggtgatcatcgcccacacagagaccaagggccccctgggggacagccacctgggggagatctgggtgagcagcccccacaatgccaccggctactacacagtgtatggagaggaggccctgcacgccgaccacttcagcgcccggctgagctttggagacacccagaccatctgggccaggacaggctacctgggcttcctgcggaggacagagctgacagatgccagcggcggcagacatgatgccctgtatgtggtgggcagcctggatgagaccctggagctgcggggcatgagataccaccccattgatattgagaccagcgtcatccgggcccacaggagcattgctgaatgtgctgtgttcacctggaccaacctgctggtggtggtggtggagctggatggcctggagcaggatgccctggacctggtggccctggtgaccaacgtggtgctggaggagcactacctggtggtgggcgtggtggtgattgtggaccccggggtcatccccatcaacagcagaggagagaagcagaggatgcacctgagagatggcttcctggccgaccagctggaccccatctacgtggcctacaacatgtag

SEQ ID NO: 184765 - DNA, 4716 bp, Artificial Sequence
  derived and/or modified sequence
atggctgaccggggctgccccctggaggccgcccccctgcctgctgaggtgcgggagagcctggccgagctggagctggagctgtctgagggggacatcacccagaagggctatgagaagaagagggccaagctgctggcccgctacatccccctcatccagggcatcgaccccagcctgcaggctgaaaatcgcatccctggccccagccagaccacagctgctgcccccaagcagcagaagagccggcccacagccagcagagatgagcgcttcagaagtgatgtgcacacagaggccgtgcaggccgccctggccaagtacaaggagaggaagatgcccatgcccagcaagagaagatctgtgctggtgcacagctctgtggagacctacaccccaccagacaccagcagcgcctctgaagatgagggcagcctgcggcggcccggccgcctgaccagcacccccctgcagagccacagctctgtggagccctggctggacagagtcatccagggcagcagcaccagcagcagcgccagcagcaccagcagccaccctgggggccggcccaccacagcccccagcgctgctgccaccccaggagctgctgccaccacagccctggccggcctggaggcccacacccacatcgacctgcacagcgcccccccagatgtgaccaccggcctggtggagcacagctactttgagcggccccaggtggcctctgtgcgctctgtgccccggggctgcagcggctccatgctggagacagcagatggagtgcctgtgaacagccgggtgagcagcaagatccagcagctgctgaacaccctgaagaggcccaagaggcctcccctgaaggagttctttgtggatgactttgaggagctgctggaggtgcagcagcctgaccccaaccagcccaagccagagggcagcgagacctctgtgctgcggggggagcccctgacagctggggtgccccggccccccagcctgctggccaccctgcagcgctggggcaccacccagcccaagagcccctgcctgacagccctggacaccaccgggaaggctgtgtacaccctgacctacggcaagctgtggagccgcagcctgaagctggcctacaccctgctgaacaagctgaccagcaagaatgagcccctgctgaagccaggggacagagtggccctggtgttccccaacagcgaccctgtgatgttcatggtggccttctacggctgcctgctggccgagctggtgcctgtgcccatcgaggtgcccctgaccaggaaggatgctggcagccagcaggtgggcttcctgctgggcagctgtggggtcttcctggccctgaccacagatgcctgccagaagggcctgcccaaggcccagacaggagaggtggccgccttcaagggctggccacccctgtcctggctggtgattgatggcaagcacctggccaagccacccaaggactggcaccccctggcccaggacacaggaactggaacagcctacatcgagtacaagaccagcaaggagggcagcacagtgggcgtgacagtgtcccatgccagcctgctggcccagtgccgggccctgacccaggcctgtggctacagcgaggccgagaccctgaccaacgtgctggacttcaagagagatgctggcctgtggcatggagtgctgacctctgtgatgaacaggatgcacgtggtgtctgtgccctatgccctgatgaaggccaaccccctgtcctggatccagaaggtgtgcttctacaaggcccgggccgccctggtgaagagccgggacatgcactggagcctgctggcccagaggggccagagagatgtgtccctgagcagcctgaggatgctgattgtggctgatggagccaacccctggagcatcagcagctgtgatgccttcctgaatgtgttccagagccggggcctgcggcctgaggtgatctgcccctgtgccagcagccctgaggccctgactgtggccatccggcggcccccagacctgggcggccccccacccaggaaggctgtgctgtccatgaatggcctgtcctatggagtcatccgggtggacacagaggagaagctgtctgtgctgactgtgcaggatgtgggccaggtgatgcctggggccaacgtgtgtgtggtgaagctggagggcaccccctacctgtgcaagacagatgaggtgggggagatctgtgtgagcagcagcgccactggaacagcctactacggcctgctgggcatcaccaagaatgtgtttgaggccgtgcctgtgaccactggaggagcccccatctttgaccggcccttcaccaggacaggcctgctgggcttcatcggccctgacaacctggtgttcatcgtgggcaagctggatggcctgatggtgactggagtgagaagacacaatgctgatgatgtggtggccacagccctggccgtggagcccatgaagtttgtgtaccggggcagaattgctgtgttttctgtgacagtgctgcatgatgacagaattgtgctggtggccgagcagaggccagatgccagcgaggaggacagcttccagtggatgagccgggtgctgcaggccatcgacagcatccaccaggtgggcgtgtactgcctggccctggtgcctgccaacaccctgcccaaggcccccctgggcggcatccacatcagcgagaccaagcagcgcttcctggagggcaccctgcacccctgcaatgtgctgatgtgcccccacacctgtgtgaccaacctgcccaagccccggcagaagcagcctgaggtgggccctgcctccatgattgtgggcaacctggtggccggcaagagaattgcccaggccagcggccgggagctggcccacctggaggacagcgaccaggccaggaagttcctgttcctggctgatgtgctgcagtggagggcccacaccaccccagaccaccccctcttcctgctgctgaatgccaagggcaccgtgaccagcacagccacctgtgtgcagctgcacaagagagctgagcgggtggccgccgccctgatggagaagggccgcctgtctgtgggggaccacgtggccctggtgtacccacctggggtggacctgattgctgccttctacggctgcctgtactgcggctgtgtgcctgtgacagtgcggcccccccacccccagaacctgggcaccaccctgcccaccgtgaagatgattgtggaggtgtccaagagcgcctgtgtgctgaccacccaggccgtgacccggctgctgcggagcaaggaggccgctgctgctgtggacatccgcacctggcccaccatcctggacacagatgacatccccaagaagaagatcgcctctgtgttccggccccccagcccagatgtgctggcctacctggacttctctgtgtccaccaccggcatcctggccggcgtgaagatgagccacgccgccaccagcgccctgtgccgcagcatcaagctgcagtgtgagctgtaccccagccggcagatcgccatctgcctggacccctactgcggcctgggctttgccctgtggtgcctgtgcagcgtgtacagcggccaccagagcgtgctggtgccccccctggagctggagagcaatgtgtccctgtggctgtctgctgtgtcccagtacaaggcccgggtgaccttctgcagctacagcgtgatggagatgtgcaccaagggcctgggcgcccagacaggagtgctgaggatgaagggcgtgaacctgagctgtgtgaggacctgcatggtggtggccgaggagcggccccgcatcgccctgacccagagcttcagcaagctgttcaaggacctgggcctgcctgcccgggctgtgtccaccaccttcggctgccgggtgaatgtggccatctgcctgcagggcacagctggccctgaccccaccaccgtgtatgtggacatgagggccctgcggcatgacagagtgcggctggtggagcggggcagcccccacagcctgcccctgatggagagcggcaagatcctgcccggggtgaaggtgatcatcgcccacacagagaccaagggccccctgggggacagccacctgggggagatctgggtgagcagcccccacaatgccaccggctactacacagtgtatggagaggaggccctgcatgctgaccacttcagcgcccggctgagctttggagacacccagaccatctgggccaggacaggctacctgggcttcctgcggaggacagagctgacagatgccagcggcggcagacatgatgccctgtatgtggtgggcagcctggatgagaccctggagctgcggggcatgagataccaccccatcgacatcgagaccagcgtcatccgggcccacaggagcattgctgaatgtgctgtgttcacctggaccaacctgctggtggtggtggtggagctggatggcctggagcaggatgccctggacctggtggccctggtgaccaacgtggtgctggaggagcactacctggtggtgggcgtggtggtgattgtggaccccggggtcatccccatcaacagcagaggagagaagcagaggatgcacctgagagatggcttcctggccgaccagctggaccccatctacgtggcctacaacatgtag

SEQ ID NO: 184766 - DNA, 2526 bp, Artificial Sequence
  derived and/or modified sequence
atggctgaccggggctgccccctggaggccgcccccctgcctgctgaggtgcgggagagcctggccgagctggagctggagctgtctgagggggacatcacccagaagggctatgagaagaagagggccaagctgctggcccgctacatccccctcatccagggcatcgaccccagcctgcaggctgaaaatcgcatccctggccccagccagaccacagctgctgcccccaagcagcagaagagccggcccacagccagcagagatgagcgcttcagaagtgatgtgcacacagaggccgtgcaggccgccctggccaagtacaaggagaggaagatgcccatgcccagcaagagaagatctgtgctggtgcacagctctgtggagacctacaccccaccagacaccagcagcgcctctgaagatgagggcagcctgcggcggcccggccgcctgaccagcacccccctgcagagccacagctctgtggagccctggctggacagagtcatccagggcagcagcaccagcagcagcgccagcagcaccagcagccaccctgggggccggcccaccacagcccccagcgctgctgccaccccaggagctgctgccaccacagccctggccggcctggaggcccacacccacatcgacctgcacagcgcccccccagatgtgaccaccggcctggtggagcacagctactttgagcggccccaggtggcctctgtgcgctctgtgccccggggctgcagcggctccatgctggagacagcagatggagtgcctgtgaacagccgggtgagcagcaagatccagcagctgctgaacaccctgaagaggcccaagaggcctcccctgaaggagttctttgtggatgactttgaggagctgctggaggtgcagcagcctgaccccaaccagcccaagccagagggcagcgagacctctgtgctgcggggggagcccctgacagctggggtgccccggccccccagcctgctggccaccctgcagcgctggggcaccacccagcccaagagcccctgcctgacagccctggacaccaccgggaaggctgtgtacaccctgacctacggcaagctgtggagccgcagcctgaagctggcctacaccctgctgaacaagctgaccagcaagaatgagcccctgctgaagccaggggacagagtggccctggtgttccccaacagcgaccctgtgatgttcatggtggccttctacggctgcctgctggccgagctggtgcctgtgcccatcgaggtgcccctgaccaggaaggatgctggcagccagcaggtgggcttcctgctgggcagctgtggggtcttcctggccctgaccacagatgcctgccagaagggcctgcccaaggcccagacaggagaggtggccgccttcaagggctggccacccctgtcctggctggtgattgatggcaagcacctggccaagccacccaaggactggcaccccctggcccaggacacaggaactggaacagcctacatcgagtacaagaccagcaaggagggcagcacagtgggcgtgacagtgtcccatgccagcctgctggcccagtgccgggccctgacccaggcctgtggctacagcgaggccgagaccctgaccaacgtgctggacttcaagagagatgctggcctgtggcatggagtgctgacctctgtgatgaacaggatgcacgtggtgtctgtgccctatgccctgatgaaggccaaccccctgtcctggatccagaaggtgtgcttctacaaggcccgggccgccctggtgaagagccgggacatgcactggagcctgctggcccagaggggccagagagatgtgtccctgagcagcctgaggatgctgattgtggctgatggagccaacccctggagcatcagcagctgtgatgccttcctgaatgtgttccagagccggggcctgcggcctgaggtgatctgcccctgtgccagcagccctgaggccctgactgtggccatccggcggcccccagacctgggcggccccccacccaggaaggctgtgctgtccatgaatggcctgtcctatggagtcatccgggtggacacagaggagaagctgtctgtgctgactgtgcaggatgtgggccaggtgatgcctggggccaacgtgtgtgtggtgaagctggagggcaccccctacctgtgcaagacagatgaggtgggggagatctgtgtgagcagcagcgccactggaacagcctactacggcctgctgggcatcaccaagaatgtgtttgaggccgtgcctgtgaccactggaggagcccccatctttgaccggcccttcaccaggacaggcctgctgggcttcatcggccctgacaacctggtgttcatcgtgggcaagctggatggcctgatggtgactggagtgagaagacacaatgctgatgatgtggtggccacagccctggccgtggagcccatgaagtttgtgtaccggggccgctag

SEQ ID NO: 184767 - DNA, 4719 bp, Artificial Sequence
  derived and/or modified sequence
atggccgaccggggctgccccctggaggccgcccccctgcccgccgaagtcagggaaagcttagcagagttagaacttgagctatcagagggcgatattacgcagaaaggctacgagaagaagcgggcaaaactgcttgcaagatacattcctctcattcagggcattgacccctcgctccaggctgaaaatagaatccccgggccctctcagaccactgccgcagcccctaagcagcaaaaatctaggccaaccgcatcccgcgatgagcggttcaggtccgatgtgcacactgaagccgtccaggcggccctggctaagtacaaggaacgcaaaatgcctatgcccagcaaacgtcggagtgtgttagtgcactcgtccgtagaaacatacacacccccagacaccagcagtgcatccgaggacgaagggtctctgaggagaccggggagactcacctccaccccgctgcagagccactcctcagtagaaccttggctggatcgggtaatacaaggaagctccacctctagctcggcctcttccacgtcttcacacccaggcgggaggccaactactgcccctagcgctgctgccacccccggggcagccgccacaacagcacttgcggggctggaagcccacactcatatagccgacctgcacagcgctcctcccgacgtgacaacagggctggttgaacattcttactttgaacggccccaagtcgcctcagtgcgcagtgtcccgcgcggttgcagcgggtcgatgctggagaccgccgatggagtaccggtgaacagcagagtgtcttccaaaattcagcaattactcaatactctgaagagacccaaaaggccaccattgaaagagtttttcgtggacgacttcgaggaactccttgaggttcagcagcctgacccaaatcaaccaaaacctgaggggtcggaaacctcagttctgagaggagagccactgacagctggagttccacgccctccatcccttctggccaccctgcaaagatggggaacaacacaaccaaagtccccatgtttaaccgcattagataccaccggcaaagcagtgtatacactgacttatggcaaactgtggtctaggtctctgaagttggcctacactctactgaacaagctcaccagcaagaatgaacccctgctcaaacccggtgatagggtcgccctcgtattccctaacagcgaccccgttatgttcatggttgcattttacggctgcctgcttgctgagctggttcccgtgcccatcgaagtgcctctcacccggaaggacgccgggagccagcaggtcggtttcttgcttggtagttgtggggtgttcctggctcttaccactgatgcatgtcaaaagggcctgcctaaggcccagacgggcgaggtggccgcattcaaaggctggccgcctttgtcctggctggtgattgatggcaagcatttagccaagccacctaaggactggcacccactggctcaggatacaggaactggcacagcctacatcgagtacaaaacaagcaaggaggggagcaccgtgggagttaccgtctcccacgcatctctattggcccagtgccgggctctcactcaggcttgcggttactcggaggccgagacccttacgaacgtgctagattttaaacgggacgcaggcctttggcacggggtcttaacgagtgttatgaatagaatgcacgtcgtaagcgtgccctatgcgcttatgaaggccaaccccctcagctggatacagaaagtctgcttctataaagcaagggccgcattggtgaagagccgcgatatgcattggagcctattggctcagagagggcagcgtgatgtctctttgtccagcctgcggatgttgatcgtagccgacggagccaatccgtggtccatttcttcatgtgatgcctttctgaacgtgttccagtcccgcggcctgagaccagaagttatctgcccttgtgcgagttcacccgaagcactgaccgtggcaatccgaagaccccccgaccttggaggaccccctccgcggaaagccgttttaagtatgaatggtctgtcttatggagtaatacgcgtggacactgaggagaaattgtcagttcttacagtgcaagacgttgggcaggttatgcccggggccaatgtctgcgtggtgaaattagagggtacaccatacttgtgtaaaacagacgaagtcggagaaatatgcgtcagttcatccgccaccggcactgcctactatggtctgctcggtattacgaaaaacgtgtttgaggccgtgccggtgacgacaggaggagcccccatcttcgaccggccctttacccggacgggtctgctgggatttatcggccctgataaccttgtcttcatagtgggtaaactggacggcttgatggtcactggcgttagaaggcataacgccgatgatgtggtcgcgactgcacttgccgttgaaccaatgaagttcgtctatcgtggacgcatcgccgtcttctcagtcacggtcctccacgacgaccggatagtgctggtcgcagagcagcggccggatgcgagcgaggaggacagcttccagtggatgagcagggtgttacaggctatcgattccatccatcaggttggcgtgtattgcctggccttggtgcctgcaaacaccttacctaaagctcccctaggagggatacacatctcagagaccaagcagcgctttctggagggcaccctgcacccctgcaacgtcctcatgtgcccacacacatgcgttacaaacctgccgaagcccaggcagaagcaacccgaggtgggtcctgctagcatgatcgtagggaatcttgtggccggcaagaggatagcccaggcctcaggaagagaacttgctcacttagaggatagcgaccaggccagaaaatttctctttctcgcagacgtcctgcagtggcgggcccacactactcccgatcatcctctctttctgctgctcaacgccaaggggaccgtgacaagcacagccacttgcgtccagctgcacaagcgggcagaacgcgttgcggccgctcttatggagaaagggagactgagcgttggagaccacgtggccctcgtctatccccccggcgtcgatctcattgccgcgttctatggctgtctgtattgcggttgtgtccccgtaactgtgaggccacctcacccgcagaacctcggtaccactctgcctactgtgaaaatgatagtcgaggttagcaagtccgcatgcgtactcacaacacaggcagtgacccgactgctgcgtagtaaagaggctgccgctgctgtggatattcgcacatggccaaccatccttgacaccgatgatatccccaaaaagaaaatagcctcagttttccgtccccccagccctgatgtattagcgtaccttgactttagtgtttccactaccggaattctggcaggggtcaaaatgtctcatgcagccactagtgcgctgtgcaggagcataaagctgcagtgtgaattgtatccatcccgacagatagctatctgcctcgatccctattgtggcttaggctttgctttgtggtgcttgtgcagcgtgtatagcgggcatcagagtgtacttgtccctcctctggaactagagagcaacgtgtctctctggctgtccgccgtctcccagtacaaggcgcgcgtgacattttgttcatactccgtaatggagatgtgcaccaaagggctcggcgcccagacgggagtgctgcgtatgaagggagtgaacctcagttgcgttcgaacatgtatggtggtggccgaggagaggccgcggatcgcattgacccagagctttagcaagctgtttaaggatctgggtctacccgcaagggctgtgagtacaactttcggatgccgcgtgaacgttgccatttgtctgcagggcaccgccggccctgatcctacaacagtgtatgtggatatgagagccctgcggcatgaccgagtccggctcgtggagcgtgggtcgccacatagcctccccctgatggaatccgggaaaatcctgccaggggtaaaagtgattattgcccacaccgagacaaaaggccccttgggtgatagccacctgggggagatatgggtctctagtccacacaacgccaccggttactacactgtctatggggaagaggctctccacgccgaccatttcagtgccagactttcatttggcgatacacaaaccatttgggctcgcactggttatctaggctttctcagacgcaccgaactgaccgatgcctccggtggtcgccacgacgctctgtatgttgttggaagcttggacgagacccttgaactgagaggcatgaggtaccatcccatcgacatcgaaacttccgtgatccgcgcccacagatctattgccgagtgcgccgtgtttacctggaccaatctgctggtggtggtggtagaactggacggcctcgagcaagacgccctggatctcgtggctctcgtcacaaacgtcgttctggaagaacactacctcgtagtgggcgtggtagtgatcgtggatccgggggtgatccccataaattcaagaggggaaaagcaacggatgcatctgcgagatggcttcctcgcagatcaactggaccccatctacgtcgcctataacatgtag

SEQ ID NO: 184768 - DNA, 4716 bp, Artificial Sequence
  derived and/or modified sequence
atggccgaccggggctgccccctggaggccgcccccctgcccgccgaggttcgggagtcattagctgaactcgaactggagctctctgagggggacattactcaaaagggctatgagaaaaagcgtgccaagctgcttgcgcggtatatccccctgatccagggcatcgacccctctctccaggcagagaaccggattcctggccccagccaaaccactgccgccgcacctaagcaacagaagagtagacctaccgcttcgagggacgaaagatttcgctctgacgttcatactgaagctgtccaggccgctctggcaaaatacaaggaacgtaagatgccgatgccttctaagagaaggtccgtcctggttcactcgtctgtggaaacatatacgcctcctgacacctcttctgcatccgaggacgaggggagtctcaggagacccggtagacttacatctaccccactgcaaagtcactcctcggtggaaccctggctggatagggttattcagggctccagcacctcttcatccgcttcctcaacatcctctcatccgggcggaagacctactaccgcgccaagtgctgccgcaacacccggggcggccgcaacgacagccctggcaggcctggaggcgcacacacacatagaccttcactcggctcctcccgacgtgactactgggctggttgagcactcctacttcgaaagaccacaggtagcatccgtgaggagcgtgcctcgtggctgcagcggctctatgcttgaaactgcagacggtgtgcctgtcaacagtcgggtttctagcaaaatccaacaattgctgaatacactcaaaaggccaaagcgccctccactgaaggagtttttcgtggacgactttgaagagctcttagaggttcagcagcctgatcctaaccagccgaagcctgagggctcagagacctcagtccttcgtggggaaccgttaactgcaggggtgcccaggcccccaagcttgctggccaccttgcagcgctggggaactacgcaacccaagagtccgtgtctcaccgcgctcgacacaacaggcaaagcagtgtacaccctgacctatggaaaattgtggtccaggtcgctgaaactggcttacactctcctgaataagctgacgtctaaaaacgagcctttgctcaagcctggcgatagagttgcgctggtgttccctaactccgaccccgtcatgttcatggtcgcattctacggctgtctgctggccgaactggtacctgtccctattgaagttccactcaccagaaaggacgctggaagtcagcaggtgggatttctgttgggtagttgcggcgtctttctggcactcacgaccgatgcatgccagaaaggactccccaaggcccaaacgggcgaagttgcagctttcaagggatggcctcctctgagctggctggtgattgacggaaagcatcttgctaagcccccgaaggactggcaccctctggcccaggataccggtaccgggactgcatacattgagtacaaaaccagtaaagaaggctctacagtgggtgtaactgtaagccacgcttcactattggcgcaatgcagagcgctgacccaggcttgcggatactctgaggcagagacactgaccaatgtactggattttaagcgggatgctgggctttggcatggtgtcctcacctctgtgatgaaccggatgcacgtggtgtccgtgccttatgccctgatgaaggctaaccccctaagctggatccagaaggtgtgtttctacaaggctagagctgctttagttaaaagtcgggatatgcactggtctttgctagctcaacgtgggcagcgagacgtgagcctcagttcattacgcatgctgattgtggccgatggagcaaacccctggagtatcagtagctgcgacgctttcttgaatgtattccagtcccgcgggctgcggcccgaggtgatatgtccatgcgcctcatctcctgaagctctcactgttgccattcgccggccaccagacttgggcggccctccgccacgcaaggctgtgttgtcaatgaacgggcttagctacggagtcataagagttgacactgaagaaaaattaagcgttctgactgtgcaagacgttggtcaggtgatgccaggagctaatgtgtgtgtcgtaaaacttgaaggcacgccttatctgtgtaagaccgacgaggtcggcgagatttgcgtatcatcatctgcaacaggcaccgcgtattatggcctgctggggattacgaagaacgtctttgaagccgttcccgtgaccactgggggtgcgcctatctttgatcgaccttttacccgcacaggccttttggggttcattgggccagataatctggtctttatcgtgggcaaactggatggcctgatggtcaccggcgtgcgcaggcacaacgcggacgacgtggtcgctaccgctctagctgttgaacccatgaagtttgtttaccggggtagaatcgcagtattctctgtgaccgtgttacacgatgatcggatcgtcctagtagctgagcagcgtcctgatgctagcgaagaagatagcttccagtggatgtcaagagttttgcaggcaattgactccatccaccaggtgggcgtatactgcctggccctggtgcccgcaaatacactgcccaaagcaccattaggcgggattcatatcagcgagactaaacaacgctttctggaggggacccttcacccttgcaacgtgctcatgtgccctcacacctgcgtgactaacctccccaaaccacgccaaaagcaacccgaggtgggccctgctagcatgatagttggaaatcttgttgccgggaaaaggatcgcacaagcctctggtagggagcttgcacacctggaggatagcgatcaggctcggaaattcctctttcttgcagatgtgctgcagtggcgcgcccacacaactccagaccaccctctgttccttctgttaaacgccaaaggcactgtgacatccacagccacttgcgttcaattgcataagagagctgaacgcgtggctgctgctcttatggagaagggaagactcagcgttggggatcacgtagctcttgtctatccacctggggtcgacctgattgcagcattctacggctgtctgtattgtgggtgtgtgccagtgacagtcagaccccctcatccccagaatcttggaaccactctgcccactgttaaaatgatcgtggaagtttccaagtccgcctgtgtccttaccacgcaagccgtgacgcgcctgttgcgctcaaaggaggcagccgcagctgtggacatccgcacctggcctactatcctggatactgacgatattccaaaaaagaagattgccagtgtcttccgacccccaagtccagatgtgctcgcttacctagatttttcagtttctaccaccgggatcctggcaggcgtgaagatgtcccatgccgccacgtctgccctgtgcaggtccataaaactacagtgcgagctgtatccatctcgtcagatcgccatctgtctggacccatactgtgggttaggtttcgcgctgtggtgtctctgtagcgtttacagcggccatcaaagcgtcctggtcccccccctggaactcgagtcaaatgtgtcgttatggttgtccgctgtatctcagtacaaagcgcgcgttacattttgttcttactcagtgatggagatgtgcacaaaagggttaggcgcccaaactggggtgttaagaatgaaaggcgtcaacctgtcgtgcgtgagaacatgcatggttgtggcagaagaacggcccaggattgcacttacacagagttttagcaagctgttcaaggatctggggctgccagcccgggcagtaagcaccacttttggatgtcgtgtaaacgtcgcaatatgcctgcaaggaactgcaggacctgatcctacaaccgtttacgtggacatgcgagccctgcgtcacgatcgcgtccgccttgtcgagcgcggttccccccactcccttcccctgatggagagcggtaagattctgcctggagtgaaggtgattatagcccacactgaaacaaaagggcccctgggggattcgcaccttggcgagatctgggtatcaagcccacataatgcaacaggatactacactgtgtatggagaagaagctctacatgccgaccacttcagtgcacgactaagttttggagacactcagactatctgggcccgaacaggatacctcggcttcctaaggagaactgagctcaccgacgcatccggtggcaggcacgatgcattgtatgtcgtgggttcactggacgagaccctggaattacggggaatgcggtatcatccaattgatatagagactagtgtaatcagagcacatcggtccattgcagagtgcgctgtgttcacatggacgaatctgctcgtggtggtcgtggaactggacgggctggaacaggacgctttggatctggtcgcacttgtgactaacgttgtgctcgaagagcactatttggtggtcggtgtagttgtcatcgtggatcccggtgtgataccgataaatagcagaggtgagaaacaacggatgcacctaagagatggtttcttggcggaccagttggacccaatctacgtcgcgtacaacatgtag

SEQ ID NO: 184769 - DNA, 2526 bp, Artificial Sequence
  derived and/or modified sequence
atggccgaccggggctgccccctggaggccgcccccctgcccgccgaagtgagggagagtcttgctgagctcgaacttgaactgtctgagggagatattacacaaaaggggtatgagaaaaagcgagccaaactactcgcccggtatatcccactaattcaggggatcgatccaagtcttcaggctgaaaacagaattccaggtccatctcagacaactgctgcagccccaaaacagcaaaagagccggccaacggcatcaagggacgagcggttccgcagtgacgtccacacggaagctgtccaggcagcactggcgaaatacaaagagaggaagatgccaatgcccagcaaaaggcgttctgtgttagttcattcaagcgtggaaacctacacgccaccagacactagctctgcttctgaggacgaggggtctcttaggagacccgggcgactgacatctaccccactacaatctcatagttccgtcgaaccttggctagatagggtgatccaaggtagcagcacgagctcctcagcttcaagtactagttcccacccaggagggcgtccaacaaccgctcccagtgctgctgccaccccaggagccgcggccaccactgcattggccgggttggaggcacatacacacattgaccttcactccgccccacctgacgtcacgaccggcctagtcgaacatagctattttgaacgaccccaggtggccagcgtgagaagtgttccccgaggctgtagcggtagtatgctggagacagctgacggggttcccgtcaactcccgtgtaagctcgaagatacaacaactgctgaacaccctgaaaagaccaaagagacccccgctgaaagaatttttcgtagatgattttgaagagctgcttgaagtgcagcagccagaccccaaccagcccaaacctgaggggtctgagactagcgtgctcaggggagagcctctgaccgccggagtcccccgcccccctagcctgcttgccactcttcagcggtggggtactacccagccaaaatcgccgtgtttgactgcattagacacaactggaaaagctgtgtacactctgacatatggaaaattgtggtcacgtagtttgaagctcgcttatacattgctgaataagcttacatctaagaatgagccattgctcaaaccaggagacagagtcgcgttggtttttcccaacagcgatccggtaatgtttatggtggccttctatggttgcctgttggccgaacttgtacctgtgcctattgaggtgccattgactcgtaaagacgctgggtcccaacaagttggctttctgcttgggagctgcggagtgttcttggccttgaccactgacgcatgtcagaagggcctgcccaaagcccaaactggagaggtagccgctttcaagggctggccacctctgagctggctagtgatcgacgggaagcacctcgcaaagccccccaaggattggcacccgttggcccaggataccggcacaggaacggcgtacatcgaatataagaccagcaaagaagggtcaacagtgggcgtgaccgtttctcacgcatctctgctagcccagtgcagagccttgacacaggcctgcggctacagcgaagctgaaacactgacaaatgtgttggacttcaagcgcgacgccggcctgtggcacggagtgctcacctccgtcatgaacaggatgcacgttgtatctgtaccttacgccctaatgaaagctaacccactgtcttggatccagaaagtgtgtttctacaaggcacgcgctgcactcgtgaagtccagagatatgcactggtctctcctggcgcagcgcggacagcgggatgtatctttgagctcattgagaatgttgattgtggccgacggagctaatccctggagtatcagcagctgtgacgcgtttctcaatgtttttcaaagtcgtggcttgcgcccagaagtgatctgcccatgcgcttcatcaccagaggcactcacagttgctatccgcaggcccccagacctgggcggtccacccccacggaaggcagtgctctccatgaacggtctgtcctacggcgttattcgagtggataccgaagaaaagctatccgtactaaccgtacaggacgttgggcaagtgatgcccggggcaaacgtgtgcgtcgttaaactcgagggaaccccgtacctttgcaaaacggatgaggttggcgaaatctgcgttagtagctccgcaactggcacagcctattatggtctgctgggtataacgaagaacgtgttcgaagccgtgcccgtaaccacgggcggagccccaattttcgaccggcctttcactcgcacgggactgctcggcttcatagggcctgacaatctggtgttcatcgtggggaaactggacggacttatggtcacaggcgtacgccgccataatgctgacgacgtggtagccaccgcgttggctgtcgaaccaatgaagtttgtgtatagaggccggtag

SEQ ID NO: 184770 - DNA, 4719 bp, Artificial Sequence
  derived and/or modified sequence
atggccgacagaggatgccctctggaagccgcaccccttcccgcagaagtccgcgaatctttggctgagcttgaacttgaactcagcgaaggcgatatcacacaaaaggggtatgagaagaagagagccaagctcttggctagatacatacctctgatccaggggatcgacccatcgttgcaggccgagaaccgcatccctgggccttcccaaaccaccgctgcggcaccaaaacagcagaagagcaggcctactgcctcacgggatgagaggttccgctctgacgtgcacacggaagcagtacaggcagctctggcaaaatataaggagcggaaaatgccaatgcccagtaaacggcgaagcgtgcttgttcactcatcagtcgaaacatacacgccgcctgacacttctagcgcgtctgaagacgaggggtctttgagacggccaggtcggctcacgtctacaccactccaatctcacagctccgttgaaccatggctcgatagagtcattcaaggctcctccacctccagcagcgcctcgagtacgtcttcgcacccagggggacggcctaccactgcaccttctgctgcagcgacacccggtgcggcagcgacaacagcccttgcgggactggaggcccacactcacattgccgatctgcactcggcgccacctgacgtcactacgggtctggttgagcacagttactttgaaagaccgcaggtcgcatcggtgcggtctgttcctcgaggttgttcggggagtatgctcgagacagcagatggagttccagttaactcgcgagtaagctcaaagatacagcaactgctcaacacactgaagcgtcctaagcggccaccactgaaagaattttttgttgatgactttgaagagctgttagaagttcagcagcccgacccgaatcagcctaaaccagagggatccgagacttcagtgcttcgaggagagcctttgacagctggtgtgcctaggcctccttcgctcctggccacccttcagcgttgggggacgacccagcccaaatcaccatgcctaacagctttggacacaacaggaaaagctgtgtataccctaacgtacggcaagctctggtccagaagtctgaagctcgcgtataccctactgaataaactaacatccaaaaacgaaccgctgcttaagccaggcgacagagtggccctggtcttccctaatagtgaccccgtgatgtttatggtcgcattctatggctgcttgcttgctgagctcgtgcctgtgcctattgaggtaccactgacacgcaaggacgctgggagtcagcaagtaggctttctgctgggctcctgcggcgtcttcctggctctgacaacggatgcgtgtcagaaaggtctccccaaggcgcagaccggagaggtggccgctttcaaaggatggccacccctatcttggttagtcatcgacggaaaacacctcgccaaacctccgaaggattggcatcccttagctcaggatactggaactggcaccgcatacatagaatacaagacttccaaagaggggtctacagtgggcgtcaccgtgtcacatgcgtcattactggcacagtgtagagcactaacacaggcttgcgggtactcggaggctgaaacgttgaccaatgtgcttgacttcaagcgggatgcaggactatggcacggagtgctgactagtgtgatgaaccgcatgcacgtggtgagtgtcccctatgcactgatgaaagcgaacccactatcatggattcagaaggtatgtttctataaagctcgtgcagctcttgtgaaatctcgagacatgcactggagtctgctagcgcagcgagggcagagagacgttagtctcagctctctgcgtatgctgatcgttgctgacggagctaatccctggagtatcagcagttgtgatgcctttctaaacgtttttcagagtagagggctgcgccctgaggtaatctgcccttgcgcatcgagccccgaagctctgactgttgcaattcgcaggccaccagatctgggcggacctcctcccagaaaggcagtgctttcaatgaacggtctgtcctacggcgtcattcgtgtcgacacagaagaaaagctgtcagtcctgactgtgcaagacgtgggacaagtaatgcctggggctaacgtgtgtgtggttaagctggagggaaccccctacctctgtaagactgacgaggtcggggaaatctgcgtgtcgtccagtgccacagggacagcctattacggactactgggcatcacaaagaacgtgttcgaagctgtgccagtcactaccgggggtgccccaatcttcgatagaccctttacacgcaccggtctgttaggatttattggacctgacaacctggtgttcatcgtgggaaagctggacggcctgatggtcacgggcgtgcgacgtcataatgctgatgatgtggtagccaccgctctggctgtggaacccatgaagttcgtatacagagggagaatagccgttttttctgtcactgtgctgcatgacgaccggatcgtgctagtcgccgagcagagacctgatgcctctgaagaggactcctttcagtggatgtcacgagttttgcaggcgattgatagcattcatcaagtgggcgtatattgtctggctctggtgccagccaacacgctgccgaaagcccctctgggaggcatacacatctccgaaacaaagcagcgatttcttgagggcacactgcacccatgtaacgtcctgatgtgcccccacacatgcgtgactaacttgccgaagcctcgccagaaacagcccgaagttggacctgctagcatgatcgtcgggaacctagtggctggcaagagaatcgcacaggcgtctggtagagaactcgcgcatctggaagacagcgaccaggcaagaaaattcctctttttggcagacgttctgcagtggcgtgctcacaccaccccagatcatcccctttttctcctcctgaatgctaaggggacggtgaccagtacagctacctgcgtccaattgcacaaaagggctgagcgagtagccgctgcgctgatggagaaggggaggctgtcagtgggcgaccacgtggccctggtataccccccaggcgtcgacctcatagccgctttttacggctgtctatattgcgggtgcgtgcctgtaacagtgcggccaccgcacccccagaatttgggaactaccttgccgacagtgaaaatgatcgtggaagtcagtaagagcgcttgcgtgctgacaactcaggcggtgacccggctcctcaggtcaaaggaggcggcagcggctgtcgatattagaacttggccaacaattctagacactgatgacattccaaaaaagaagatcgcatccgtgttccgcccaccatcaccggacgtgctagcctacctcgacttctcggtaagtactaccgggatccttgctggtgtgaagatgtcccacgctgccacgagcgccctgtgtagaagtattaaactacaatgtgagctgtacccgtctcgccagattgccatctgcctcgatccttactgtggcctcgggtttgccctgtggtgcctgtgctcagtgtatagcgggcatcagagcgtcttggtgccacccctagaactagagtcaaatgtgtctttgtggttgagtgcagtgtctcagtacaaggccagagtcacattctgttcctatagcgtaatggaaatgtgtacaaaaggcttaggcgcacaaacaggtgtgttgagaatgaaaggcgtcaacttgagctgcgtgcggacatgtatggtggtagccgaggagcggcctagaatagccctaacacagagcttctcgaaacttttcaaagacttgggtcttccagctagggctgtctcaaccaccttcgggtgcagagtcaatgtagccatctgcctgcagggaactgccggtccggatccaactaccgtgtatgttgacatgagggcactcagacatgatcgcgtgcggcttgtggagcgtgggagtcctcactccctgcctctgatggagagtggaaagatactacccggagtcaaggtgatcatcgctcacactgagaccaagggtccgttaggagacagccacctgggggagatatgggtgtcttccccgcacaacgccacaggctactatacggtctatggcgaggaagccctgcatgctgaccatttctccgccaggctgagcttcggagacactcaaacaatatgggcacgtactggctacctgggtttcctgcgacggactgagcttaccgatgccagtgggggacggcacgatgctttatacgtggtgggaagcttagacgaaactttagaactaagagggatgagataccatcctatcgacattgaaactagtgtcatccgagctcatcgaagcatcgccgaatgcgccgtatttacctggacgaatttgctcgttgtggtggtagagctggacggactggaacaggacgccctcgacctggtggctcttgttactaatgtggtcctggaggagcactatctcgtcgttggagtggtcgtgatagtggatccaggtgtgatccctatcaactctaggggggaaaagcagagaatgcacctgcgggatggtttcttagctgatcagttagacccgatctatgttgcctacaacatgtag

SEQ ID NO: 184771 - DNA, 4716 bp, Artificial Sequence
  derived and/or modified sequence
atggctgatcggggatgtccattggaggcggcacccctgcctgctgaggttcgcgagtcgctggccgaactcgagctggagcttagtgagggggatatcacccagaagggatacgaaaaaaagcgggcaaaattactggctaggtatatacccctgattcaaggaatcgacccttccctccaggccgagaataggattcctggtcctagccagactaccgctgccgctcccaagcagcagaaaagtaggccaacggcatcaagagatgaacgctttagatccgacgttcataccgaggcagtgcaagcggcactggcgaaatataaggagcggaaaatgccaatgccatcgaaacgacggtccgttcttgttcacagtagcgtggagacatatacacctcccgatactagcagtgcctcagaagacgagggttctctccgaaggccgggtaggctcacgtccacaccactccagtcccatagctctgtggagccttggctggacagagtcatccaggggagctcaaccagctcctccgcgagtagcacctcttctcaccctggaggaaggcctaccacagcaccaagtgccgctgcaacacccggtgctgccgctaccactgctctggctgggctggaagctcacacacacatcgatctgcacagtgcaccgcctgacgtgacaactggccttgttgaacatagttacttcgagaggcctcaggtggcaagcgtgcgctcagtgccccgtggctgctcaggatctatgctggaaactgcagatggggtgcccgtaaattcacgcgtaagctcaaagattcagcagctgcttaacaccttgaagaggccaaagaggcctcctcttaaggaattttttgttgatgattttgaagaactcctggaggtacagcaaccggacccaaatcagcctaaacctgaaggatccgagacgagtgtgctaagaggtgagccattgacagctggggtgcctaggcctccctcactcctggccaccctgcaaagatggggaaccactcagcctaagtcaccctgtttaaccgccctggacacgacgggcaaggctgtctatacccttacatacggcaagctctggagcaggtccctgaagttggcctatactctgctaaacaagctcacctccaaaaacgagccactgctcaagccaggcgatcgcgtcgctctcgttttccccaacagcgatcctgttatgttcatggtagccttctacggttgcttgctcgccgagctcgtgcctgttcccattgaggtgcccctgactagaaaagatgccggttctcagcaggtaggctttctcctgggatcatgtggcgtgttcttggctttgaccaccgacgcctgtcagaagggtctccccaaggctcagacaggcgaagtggccgcatttaaggggtggccacctctgtcttggctcgtcattgacggaaagcatctcgctaagcccccaaaagattggcatccccttgctcaggacaccggtactgggaccgcttacatagaatacaaaacgagcaaggagggcagcaccgttggcgtgacagttagccatgcgtccctgctggcacagtgtagggccctgacccaagcctgcgggtactcagaggccgagaccctgacaaatgtacttgatttcaagcgagacgctggcctctggcacggagtcctgacttcagtaatgaataggatgcacgtggttagcgtgccctacgcactgatgaaggctaatcccttaagctggatccagaaggtctgcttttacaaagccagggcggcacttgtgaaaagcagagatatgcattggagccttttagcacagcgtggacagcgggacgttagtttgtccagcctgcgcatgctcatcgttgccgacggagctaatccttggagtattagttcttgcgacgctttcttgaacgtgtttcagagcagggggctccgccctgaagtgatttgcccctgtgcctccagccctgaagctctcacagtggcgattcggcgaccaccagacttgggcggaccaccccctagaaaagctgtgctgagtatgaacggactgagttacggcgtgatcagggttgatacggaagaaaaacttagtgtgctgaccgtgcaggatgttggccaagttatgccaggtgctaacgtgtgcgtagtaaagctcgaggggactccgtatctttgtaagactgacgaggtcggcgaaatctgcgtgtcctcctccgctacaggtactgcgtattacgggctcttgggcattactaaaaacgttttcgaggccgtccctgtgaccaccggtggcgcacctatttttgatagaccctttactaggactgggctcctgggttttatcggccctgataatctggtcttcattgtgggcaagctggacggcttaatggtaacaggagtgcggagacacaacgcagacgatgtcgtcgccaccgctttagcagttgaacccatgaaatttgtttatcgcggaaggattgcagtgtttagcgttaccgtcctgcatgatgatcgcatagtgctagtcgcggagcagcgtcctgacgccagtgaggaagactcctttcagtggatgtcccgtgtgctccaggccatagactccattcaccaggtcggagtgtactgccttgcgttagtgccagctaacaccttgcccaaagcgccacttggtggtattcacatctctgagaccaaacagcggtttctcgaggggacactgcatccatgcaatgtcctgatgtgtcctcatacctgcgttaccaatttgcctaagccccgacagaagcagcctgaagtgggaccagccagcatgattgtgggcaatctggtcgcgggaaaaagaattgcccaggctagcgggcgagagctcgcccatctggaggattcagatcaggcgaggaagtttctattcttggccgacgttctgcaatggcgggcacacacgacaccggatcaccccctttttctgctgttgaatgctaaaggcacagtcaccagcaccgctacttgcgtccagctccacaagcgcgctgagagagttgccgctgcgctgatggagaaaggcaggctaagtgtgggagaccatgtggcgctcgtctacccgcctggtgtcgacctgatcgccgctttttatggctgcctctattgtggatgtgtgccagttacggtgaggccgcctcacccacaaaaccttggtaccactctccccacagtgaaaatgattgtcgaggtatctaagagtgcatgtgtcctgacaacacaggctgttacaagattgctccgctcgaaggaagctgctgcagcggtcgatatcagaacgtggccaacaatcctcgacacggacgacattccgaagaaaaaaattgccagtgtgttccggcctccatctcctgatgtacttgcctacctggattttagcgtgtcaacaaccggcatcttggcaggggtgaaaatgagtcacgccgctacatcagctctttgccgctccatcaagctccagtgtgagctctatccatctagacaaatcgccatttgtctggatccctactgcggtctgggattcgccctgtggtgcttgtgcagtgtgtattcagggcaccagtccgttcttgtgcccccacttgagttggaaagtaatgtcagcctctggctttccgccgtcagccagtataaggcaagagtgactttttgcagctacagtgtcatggaaatgtgcactaagggcctaggggcacagaccggagttctgagaatgaaaggcgttaacctgtcatgcgttcggacatgtatggtcgtggccgaggagaggcctagaattgccctgacgcagtcattttcaaaactgtttaaagacctaggcctacccgctagagcggtgtcgactacttttgggtgccgggtcaatgtagctatttgcctgcaaggaactgccggacccgatcccacgaccgtgtatgtggatatgcgtgctctacggcatgaccgggtcagactcgtggagcggggtagcccgcacagtcttccgctgatggaatcgggcaaaattctaccaggagtgaaagtaattattgctcatacggagaccaaaggtccactcggcgatagccatcttggcgagatttgggtgtctagcccccacaacgctacaggttactacaccgtctacggagaggaggccctgcatgctgatcactttagcgccaggctgtcattcggggatacccagacaatttgggctagaaccgggtatctgggattcctgcggaggactgagctcaccgacgcaagcggaggccgacatgatgccctgtatgtggtcgggtccctggacgagactctagagctcagggggatgaggtaccacccaatcgatatcgagacgagcgtgatcagagcacatcgtagcatcgccgagtgcgcagtattcacgtggactaatctgctggttgtggtcgttgagttggatgggttggaacaggacgctttggaccttgtggccctggtgaccaacgttgtcctggaggagcactacctggtggtgggggtcgtcgtcatcgttgatcccggtgtgattcctataaattcacgcggagaaaaacagcgaatgcacctcagggacggattcctggctgatcagctcgacccaatatacgtggcgtacaacatgtag

SEQ ID NO: 184772 - DNA, 2526 bp, Artificial Sequence
  derived and/or modified sequence
atggccgacagaggctgccccctcgaagctgcaccactccctgcagaggtccgcgagagtttggctgaactggagctggaattgtcagagggggacatcacgcaaaaaggctatgaaaagaaacgagctaagctacttgccagatacattcccctgattcaggggatcgacccctcactccaggcggagaatcggattccgggtccaagtcagactacggcagccgctcccaaacagcagaaatcccggcctacagcttcccgcgacgagcgcttccggagtgatgttcatacggaggcagtccaggcagctctggccaagtataaggaacggaaaatgcccatgccctctaaaagacggtcggtcctggtgcatagttccgtcgaaacctacactcccccagatacaagcagcgcaagtgaagacgagggctcactcaggcggcctggaagactgacctccacacccctgcaatcgcactctagcgtcgaaccctggctcgatcgggttatccagggatcaagtacatcatcatccgccagcagcactagctcccatcctgggggacgcccaactacagcaccaagtgcagcggctacacctggtgccgctgccaccaccgccctggctggattggaggcccacactcatatcgatcttcacagtgcacccccagatgttaccaccgggctcgttgaacactcctacttcgagcgtccacaggttgcctcggtgcggtctgtgccaaggggatgtagcgggagcatgttagaaactgccgatggcgtcccagtcaatagccgggtgtcttccaagatacaacagctgctgaacacccttaaacgcccaaaaaggccccctctcaaggagttttttgtcgatgactttgaagagctgttagaagtccagcagcctgaccctaatcagcccaaacctgagggaagtgagacgagcgtgctccggggtgagccactcactgccggagtccccaggcctccgtccctcctcgcaacgctccagagatggggaactacccagccaaaatcaccgtgtttgacagccctggacacaacaggaaaagccgtgtacacactcacgtacgggaagctctggtctcgcagcctaaaactagcctacacgttattgaataagttaactagtaaaaacgagcctctcttaaaaccaggcgatagagtcgccctggtgttccctaattcagaccctgtcatgtttatggttgccttctatggttgtctgttggctgagctggtccccgttcccattgaggtgcctctgacgcggaaagacgcaggaagccagcaggtgggcttcctgttaggttcttgcggcgtgttcctagcgcttacgaccgacgcttgccagaagggtctcccgaaggctcagaccggcgaagttgcagccttcaagggctggccaccattgtcctggctggtgatcgacggcaagcatcttgcaaagcccccaaaagactggcatcccctggcgcaggatactgggacaggcacggcgtacattgaatataagacttcaaaagaagggtccaccgtgggagtcacagtgagtcacgcctccttgctggctcagtgtagagctctcacacaggcctgtggctacagtgaagctgaaacacttacaaatgtccttgactttaaaagggacgctgggctgtggcacggggtgctgacatccgtgatgaatcggatgcacgtagtttccgtgccctacgcactgatgaaagccaatccactgtcatggatccagaaggtctgtttctacaaggcgagagccgctctcgttaagtcacgggatatgcactggtctcttttggcccagcggggtcaacgagacgtgtcgctgtcatctctgaggatgttgattgtcgccgacggcgcaaatccatggtcaatatcttcgtgcgatgctttcctcaacgtctttcaaagcaggggcctcaggcccgaggtcatatgcccctgcgccagttctccggaagcactgactgtcgcaattagaagaccccctgatctaggtggccctcccccacgaaaggcagtcctttccatgaacggtctttcatatggcgtgattcgcgtggacacagaagagaagctgtcggttctaaccgtacaagatgtgggccaggtcatgcctggtgcgaatgtctgcgtcgtcaaactggagggaacaccctacctttgtaagacggatgaggtgggcgagatctgcgtttcctcttccgcaacagggacagcctactatgggctgctgggcatcactaagaatgtgttcgaggccgtacccgtgacaactgggggagcaccaatctttgaccgcccttttacgagaaccggtctgctgggattcatcgggccagacaatctagtctttatcgtgggcaaactggatggcctcatggtgaccggcgtccgtcgccacaacgccgatgatgtcgtggccacagcccttgcagttgagcctatgaagttcgtgtaccgaggcagatag

SEQ ID NO: 184773 - DNA, 7293 bp, Artificial Sequence
  derived and/or modified sequence
tccgcgctcgtgcccgcgcgggtgcgttgctgtcctggccgcgcccctgtcccgccgcctcccgctcctcgcctggcggatgtaggttgttggcctgaggggagctacgtagccgaggtttgcgctgccgccgccaggcccggtccggttccagcctctgcccggacgctagccggcctggccatggctgaccgcgggtgcccgctggaggcggcgccgctgcctgccgaggtgcgggagagcctggctgagctggagctggagctgtcggaaggtgacatcactcaaaaaggatatgaaaagaaaagggcaaagctgcttgcacgttatataccgcttattcaaggaatagacccatctctgcaagcagagaatagaattcctgggccctcacaaaccacggccgctgcacccaagcagcagaagtctcggcccaccgcctcgagggatgagcgcttccggtcagatgtccacactgaagccgtgcaagcagctttggccaaatacaaagagaggaagatgcctatgccttcgaagagacgttctgtccttgtgcattcgtctgtggaaacctacacccctccagacacgtcgtctgcctcagaagatgagggctctttacggcgacccgggcgactcacctccactccgctccagagccattccagcgtcgagccctggctcgaccgggtcattcagggctcgtccacctcatcctctgcatcctccacctcatctcacccgggagggagacccaccactgctcccagtgctgcagccacgccgggggccgccgctaccactgcactcgcaggcctcgaggcccacacccacatagcagatctgcattctgcccctcctgatgtcaccacgggcctcgtggagcattcgtactttgagcgtccacaggtggcttctgtgagaagtgttcctcgggggtgcagcgggagcatgctggaaacagcagatggtgtccctgtgaacagcagagtgtcctccaaaatccagcagcttctgaacaccctgaagaggccaaagcgccctccactgaaggagttctttgtggatgattttgaggaattgttggaagttcagcaaccagatccaaatcagccaaagcctgagggaagcgagacgagtgtgctgagaggggagcctctcactgcaggtgtcccccgaccgccgtcgctgttggccaccttgcagcgctggggcacaacacagcccaaatccccctgtctgactgccttggatacaactgggaaagccgtctacactctcacctatggtaaactttggagtcggagtttaaaactagcttatactctacttaataaactgacaagtaagaatgaacctctacttaaacctggagacagagtggcgctcgtgtttccgaatagtgaccctgtgatgttcatggttgcattttatgggtgtctcctggcagagctggttcctgtccccatagaagtgccattaacaagaaaggatgcaggcagccagcaggttgggtttctgctgggcagctgtggagtcttcttggccctgaccacagacgcttgtcagaaaggcctccccaaggcacagacaggagaggtggcagctttcaaaggttggcccccgctctcctggctagtgattgatgggaagcatctagccaagcccccaaaggactggcaccctctggcccaggacacagggactgggactgcctacattgagtataaaaccagcaaagaaggcagtacggtgggggtcacagtgtcccacgcatccctgctggcacagtgccgggctctgacccaggcgtgcgggtactcagaagctgaaacattaacaaacgtgctggatttcaaaagggatgctggtctgtggcatggcgtgttaacaagcgtcatgaacaggatgcacgtggtcagcgtcccctacgcgctgatgaaggcgaacccactctcctggatccagaaagtgtgcttctataaagctcgggccgcgctggtgaagtcgcgagacatgcactggtctctcctagctcagcggggccagagggacgtcagcctcagctcactgcgcatgctgattgtggccgatggtgccaacccgtggtcgatctcctcctgtgacgccttcctcaacgtcttccagtccagaggtctgaggccagaggtcatctgtccttgtgcaagttctcctgaggcgctgactgtcgccatccgcaggccacctgatctgggaggaccacctccaagaaaagcagtcctgtcgatgaacggtctaagttatggtgttatcagagtggatactgaagaaaagttgtcagtccttactgttcaggacgttggtcaggtgatgcctggagctaatgtatgtgttgtgaagttagaaggtaccccttatctttgtaaaactgatgaagtgggagaaatatgcgtcagttccagtgcaactggcacagcgtactatggattgcttggaatcacgaagaatgtgtttgaggcagttccggtcaccacaggaggagcacccatctttgacaggccattcaccaggacaggcctgctgggcttcatcgggcctgacaacctggtcttcatcgtgggcaaactggacgggctgatggtcactggagttcgcagacacaatgcagatgacgttgtggccaccgcactggccgtggagcccatgaagtttgtctacagaggcaggatcgctgtgttctctgtgaccgtgctgcacgacgaccggattgtcctggtggctgagcagcggccggatgcctcggaggaggacagcttccagtggatgagccgtgtgctgcaggccattgatagcatccaccaggtgggcgtgtactgtctggccctggttcctgccaacaccttgcccaaggctcctctcggagggattcacatttctgaaaccaaacagcgctttctggaagggacgctgcacccgtgtaatgtgctgatgtgccctcacacctgtgttaccaacctccccaaacctcgtcagaaacaaccagaggttggaccagcctcaatgatcgtggggaacctggttgctgggaagagaatcgctcaggcttccgggagagagctcgcccacctggaggacagcgaccaggcacggaagttcctgttcctggctgacgtgctgcagtggcgtgcccacaccactcctgaccacccgctgttcttgctgctgaacgccaagggcaccgtcacaagcactgcaacctgtgtccagctgcacaaaagggctgagagagtggccgcggctctgatggagaagggaagactgagtgttggggaccatgtggctctggtctacccaccaggggtggacctcattgccgcgttctatggctgcttgtactgtggctgcgtgcctgtcaccgtgcggcccccgcaccctcagaacctcggcaccacactgcccaccgtcaagatgatcgtggaggtcagcaagtctgcatgcgtcctcaccacgcaggctgtcacacggctgctcaggtccaaggaggctgctgctgccgtggacatcaggacctggcccaccatcctagacacagatgacatcccaaaaaagaagatagcaagcgttttcaggcccccctcccccgatgtcctcgcatacttggacttcagcgtgtcaaccactgggatattagcgggagtgaagatgtcgcacgcggccacaagcgccttatgccgctccataaagctgcagtgtgagctgtacccctcgcggcagatcgccatctgcctcgacccctactgtggccttggttttgccctgtggtgtctgtgcagtgtctactcgggacaccaatcagtgctggtgcccccgctggagctggagagcaacgtgtccctgtggctgtcggccgtcagccagtacaaggcccgcgtcaccttctgctcctactctgtgatggagatgtgcaccaagggcctaggcgcacagacgggtgtcctcaggatgaagggggtgaacctgtcatgtgtgcgcacgtgcatggtggtcgccgaggagcggcccaggattgcgctgacccagtccttctccaagctcttcaaggacctgggcctgccggcccgcgccgtaagcaccacgttcgggtgcagggtcaacgtggccatctgcctccagggcacagctggcccggaccccacaaccgtctacgtggacatgcgggcactgcgccatgacagggttcgtttggtagaacggggttctccgcacagcctgccattgatggagtctggaaagatcctccccggcgtgaaggtcatcatcgcacacaccgagaccaaaggacccttgggagactcacacctgggagagatctgggtaagcagcccccacaatgccaccgggtactacaccgtttacggggaggaggcgcttcatgccgaccacttcagtgcccggctgagttttggagacacacagaccatctgggcaaggaccggctaccttggcttccttcggcgaacagagctcactgatgccagtggagggcggcacgatgcactgtatgtggttgggtctctggatgaaactctggagctcagaggcatgcggtaccaccccatcgacattgagacctctgtcatccgagcacacaggagcatcgctgagtgtgccgtattcacctggaccaacctgctggtggtggtggtggagctggatgggctagagcaggatgccctggacctggtggccctggtgaccaacgtggtgctggaggagcactacctggtcgtgggagtggtggtcatcgtggacccaggggtgatccctatcaactctcggggtgagaagcagcgcatgcacctgcgggacggcttcctggctgaccagctggaccccatctatgtcgcctacaacatgtgagcgcagcacaccggcccaggtgccggagatgaatgagccccagcagtccaaggtgtgatgtgggaagacaccgcagagctcactcaccgggactcgcccttcctgtgctcttacagatccctctcaacaatccccgcatctccttttagaaagcacttcctgaattatttaaagaaatattttgaatctgccaagtacatttacaaaaacacggatgctggtattttaacagatggagagacaaggaaaggaaaggaaaggcctggcatgggcattgtgaggaatcacaggcaccgaggttgttctctgctgtactgcaagtttgcactttctttaggctaaaaatatagttcctgatttttaaaattcagttatttattcccacttcaaatgacaagttcatatatagaatttacgggagaaacttgagaccatttacggggagaaacttgattctgggaagatagcagagtacaaaccagctgcctcacttctgtttcacagggaggctgatggaaaaaggaagcaagctggacccatcctccctgctcacagagggcactgtggtcacacacagtgcctcctctgccagttcctttattgaaagaggtgtgctggctggccacggtggcttacacctgtaatcccagcactttgggaggccgaggcgagcagatcacgaggtcaggagaccgagaccatcctggctaacatggtgaaaccctgtctctactaaaaatacaaaaaattagccgggtgtggtggtgggcgcctgtagtcccagctacttgggaggctgaggcaggagaatggtatgaaccagggaggcggagcttgcagtgagccgagatcacgctactgcactccagcctgggtgacagcacgagatgccgtcttaaaaaaacaaaaaagaggtgtgctgcttgtcagcatgtattgtcacggacactcaataagtgccattttggactgtcaaatttagatgctttgtttcagaaagataagccagcatttagttttaaatcactttcctggtttgtaacttgatgctgtttagttaaattgctagttttcctaacactacaatattaattcttctcgtggaagtgtactgatttattatttttattccaagtcagcagatttggaagcattgtggtaaagtctaaggttttcatatccatagtgctgtttggtgagtaccggcagtacagttgaggggagcagggaacagcattgccccgtattgaaggtggagatggttacattcttcactgctttttgcattttgagttgtgtgcctataaaatttggccaaaccattttattattttgttcaaacttgactaagctgagtgatctaaaattatacagaacctaaatcaaagaagagaatgtaaagtcctttagttacttctaagaatttgaagtcaagcacgaatctaagacatagattatttttatatagctaatgaagagtatgttacgaaattgttgggtttttggggtattgagggtggcaaattttgtgaatcatgcatgcttcacagaaacaaccaggtttttccagaattagtctggatcagtgcctaacaaagctgttattaattctccacacatgagtctggctaactgggccagctctcatgttttactcctgtctggctacaaatagcactgtgcatagtagccctgtttccccatggtgttggactgtggtaaagtatgttgtgacatactggaattctaataatcctgttgtaagtatgtacagaatctatgtaacttattgttgacatacagaggtttgggaagtagtctaatggacattccttacaatagaatggctgggaagggaaagaaaaaaaaaaaaaaactacctaactccaatcttaatgttgtagttttatagcaaacaaaaattgtcagctttttgtattgaaaggtcagtggtggtaagacaaggtgtcttgtaaattaagattttaagaagtgcattaaaatgttttagaattactctgggaattctgtatatcacactaaaatttttatatcattatgttaataaaagttattgactttgtaattctgcattttgaaatgtgtgaaaagggtctttaaattaccccgaataggttgtatcttattttgctttttttctgactataaaagcagttatgcttatagcataaaatctagaaagcacattaaagtataaagaaaattaaaatttcttataattctacctctgagtaaacagcagcattcgtatgtaacataaaccctctcagggatttattttttctttttaaaaattttttacaaaattaggatcaagtgcttttttaaataatttgcttttgtacttaataaattatagactttaaaatc

SEQ ID NO: 184774 - DNA, 7161 bp, Artificial Sequence
  derived and/or modified sequence
tccgcgctcgtgcccgcgcgggtgcgttgctgtcctggccgcgcccctgtcccgccgcctcccgctcctcgcctggcggatgtaggttgttggcctgaggggagctacgtagccgaggtttgcgctgccgccgccaggcccggtccggttccagcctctgcccggacgctagccggcctggccatggctgaccgcgggtgcccgctggaggcggcgccgctgcctgccgaggtgcgggagagcctggctgagctggagctggagctgtcggaaggtgacatcactcaaaaaggatatgaaaagaaaagggcaaagctgcttgcacgttatataccgcttattcaaggaatagacccatctctgcaagcagagaatagaattcctgggccctcacaaaccacggccgctgcacccaagcagcagaagtctcggcccaccgcctcgagggatgagcgcttccggtcagatgtccacactgaagccgtgcaagcagctttggccaaatacaaagagaggaagatgcctatgccttcgaagagacgttctgtccttgtgcattcgtctgtggaaacctacacccctccagacacgtcgtctgcctcagaagatgagggctctttacggcgacccgggcgactcacctccactccgctccagagccattccagcgtcgagccctggctcgaccgggtcattcagggctcgtccacctcatcctctgcatcctccacctcatctcacccgggagggagacccaccactgctcccagtgctgcagccacgccgggggccgccgctaccactgcactcgcaggcctcgaggcccacacccacataggtgtccctgtgaacagcagagtgtcctccaaaatccagcagcttctgaacaccctgaagaggccaaagcgccctccactgaaggagttctttgtggatgattttgaggaattgttggaagttcagcaaccagatccaaatcagccaaagcctgagggaagcgagacgagtgtgctgagaggggagcctctcactgcaggtgtcccccgaccgccgtcgctgttggccaccttgcagcgctggggcacaacacagcccaaatccccctgtctgactgccttggatacaactgggaaagccgtctacactctcacctatggtaaactttggagtcggagtttaaaactagcttatactctacttaataaactgacaagtaagaatgaacctctacttaaacctggagacagagtggcgctcgtgtttccgaatagtgaccctgtgatgttcatggttgcattttatgggtgtctcctggcagagctggttcctgtccccatagaagtgccattaacaagaaaggatgcaggcagccagcaggttgggtttctgctgggcagctgtggagtcttcttggccctgaccacagacgcttgtcagaaaggcctccccaaggcacagacaggagaggtggcagctttcaaaggttggcccccgctctcctggctagtgattgatgggaagcatctagccaagcccccaaaggactggcaccctctggcccaggacacagggactgggactgcctacattgagtataaaaccagcaaagaaggcagtacggtgggggtcacagtgtcccacgcatccctgctggcacagtgccgggctctgacccaggcgtgcgggtactcagaagctgaaacattaacaaacgtgctggatttcaaaagggatgctggtctgtggcatggcgtgttaacaagcgtcatgaacaggatgcacgtggtcagcgtcccctacgcgctgatgaaggcgaacccactctcctggatccagaaagtgtgcttctataaagctcgggccgcgctggtgaagtcgcgagacatgcactggtctctcctagctcagcggggccagagggacgtcagcctcagctcactgcgcatgctgattgtggccgatggtgccaacccgtggtcgatctcctcctgtgacgccttcctcaacgtcttccagtccagaggtctgaggccagaggtcatctgtccttgtgcaagttctcctgaggcgctgactgtcgccatccgcaggccacctgatctgggaggaccacctccaagaaaagcagtcctgtcgatgaacggtctaagttatggtgttatcagagtggatactgaagaaaagttgtcagtccttactgttcaggacgttggtcaggtgatgcctggagctaatgtatgtgttgtgaagttagaaggtaccccttatctttgtaaaactgatgaagtgggagaaatatgcgtcagttccagtgcaactggcacagcgtactatggattgcttggaatcacgaagaatgtgtttgaggcagttccggtcaccacaggaggagcacccatctttgacaggccattcaccaggacaggcctgctgggcttcatcgggcctgacaacctggtcttcatcgtgggcaaactggacgggctgatggtcactggagttcgcagacacaatgcagatgacgttgtggccaccgcactggccgtggagcccatgaagtttgtctacagaggcaggatcgctgtgttctctgtgaccgtgctgcacgacgaccggattgtcctggtggctgagcagcggccggatgcctcggaggaggacagcttccagtggatgagccgtgtgctgcaggccattgatagcatccaccaggtgggcgtgtactgtctggccctggttcctgccaacaccttgcccaaggctcctctcggagggattcacatttctgaaaccaaacagcgctttctggaagggacgctgcacccgtgtaatgtgctgatgtgccctcacacctgtgttaccaacctccccaaacctcgtcagaaacaaccagaggttggaccagcctcaatgatcgtggggaacctggttgctgggaagagaatcgctcaggcttccgggagagagctcgcccacctggaggacagcgaccaggcacggaagttcctgttcctggctgacgtgctgcagtggcgtgcccacaccactcctgaccacccgctgttcttgctgctgaacgccaagggcaccgtcacaagcactgcaacctgtgtccagctgcacaaaagggctgagagagtggccgcggctctgatggagaagggaagactgagtgttggggaccatgtggctctggtctacccaccaggggtggacctcattgccgcgttctatggctgcttgtactgtggctgcgtgcctgtcaccgtgcggcccccgcaccctcagaacctcggcaccacactgcccaccgtcaagatgatcgtggaggtcagcaagtctgcatgcgtcctcaccacgcaggctgtcacacggctgctcaggtccaaggaggctgctgctgccgtggacatcaggacctggcccaccatcctagacacagatgacatcccaaaaaagaagatagcaagcgttttcaggcccccctcccccgatgtcctcgcatacttggacttcagcgtgtcaaccactgggatattagcgggagtgaagatgtcgcacgcggccacaagcgccttatgccgctccataaagctgcagtgtgagctgtacccctcgcggcagatcgccatctgcctcgacccctactgtggccttggttttgccctgtggtgtctgtgcagtgtctactcgggacaccaatcagtgctggtgcccccgctggagctggagagcaacgtgtccctgtggctgtcggccgtcagccagtacaaggcccgcgtcaccttctgctcctactctgtgatggagatgtgcaccaagggcctaggcgcacagacgggtgtcctcaggatgaagggggtgaacctgtcatgtgtgcgcacgtgcatggtggtcgccgaggagcggcccaggattgcgctgacccagtccttctccaagctcttcaaggacctgggcctgccggcccgcgccgtaagcaccacgttcgggtgcagggtcaacgtggccatctgcctccagggcacagctggcccggaccccacaaccgtctacgtggacatgcgggcactgcgccatgacagggttcgtttggtagaacggggttctccgcacagcctgccattgatggagtctggaaagatcctccccggcgtgaaggtcatcatcgcacacaccgagaccaaaggacccttgggagactcacacctgggagagatctgggtaagcagcccccacaatgccaccgggtactacaccgtttacggggaggaggcgcttcatgccgaccacttcagtgcccggctgagttttggagacacacagaccatctgggcaaggaccggctaccttggcttccttcggcgaacagagctcactgatgccagtggagggcggcacgatgcactgtatgtggttgggtctctggatgaaactctggagctcagaggcatgcggtaccaccccatcgacattgagacctctgtcatccgagcacacaggagcatcgctgagtgtgccgtattcacctggaccaacctgctggtggtggtggtggagctggatgggctagagcaggatgccctggacctggtggccctggtgaccaacgtggtgctggaggagcactacctggtcgtgggagtggtggtcatcgtggacccaggggtgatccctatcaactctcggggtgagaagcagcgcatgcacctgcgggacggcttcctggctgaccagctggaccccatctatgtcgcctacaacatgtgagcgcagcacaccggcccaggtgccggagatgaatgagccccagcagtccaaggtgtgatgtgggaagacaccgcagagctcactcaccgggactcgcccttcctgtgctcttacagatccctctcaacaatccccgcatctccttttagaaagcacttcctgaattatttaaagaaatattttgaatctgccaagtacatttacaaaaacacggatgctggtattttaacagatggagagacaaggaaaggaaaggaaaggcctggcatgggcattgtgaggaatcacaggcaccgaggttgttctctgctgtactgcaagtttgcactttctttaggctaaaaatatagttcctgatttttaaaattcagttatttattcccacttcaaatgacaagttcatatatagaatttacgggagaaacttgagaccatttacggggagaaacttgattctgggaagatagcagagtacaaaccagctgcctcacttctgtttcacagggaggctgatggaaaaaggaagcaagctggacccatcctccctgctcacagagggcactgtggtcacacacagtgcctcctctgccagttcctttattgaaagaggtgtgctggctggccacggtggcttacacctgtaatcccagcactttgggaggccgaggcgagcagatcacgaggtcaggagaccgagaccatcctggctaacatggtgaaaccctgtctctactaaaaatacaaaaaattagccgggtgtggtggtgggcgcctgtagtcccagctacttgggaggctgaggcaggagaatggtatgaaccagggaggcggagcttgcagtgagccgagatcacgctactgcactccagcctgggtgacagcacgagatgccgtcttaaaaaaacaaaaaagaggtgtgctgcttgtcagcatgtattgtcacggacactcaataagtgccattttggactgtcaaatttagatgctttgtttcagaaagataagccagcatttagttttaaatcactttcctggtttgtaacttgatgctgtttagttaaattgctagttttcctaacactacaatattaattcttctcgtggaagtgtactgatttattatttttattccaagtcagcagatttggaagcattgtggtaaagtctaaggttttcatatccatagtgctgtttggtgagtaccggcagtacagttgaggggagcagggaacagcattgccccgtattgaaggtggagatggttacattcttcactgctttttgcattttgagttgtgtgcctataaaatttggccaaaccattttattattttgttcaaacttgactaagctgagtgatctaaaattatacagaacctaaatcaaagaagagaatgtaaagtcctttagttacttctaagaatttgaagtcaagcacgaatctaagacatagattatttttatatagctaatgaagagtatgttacgaaattgttgggtttttggggtattgagggtggcaaattttgtgaatcatgcatgcttcacagaaacaaccaggtttttccagaattagtctggatcagtgcctaacaaagctgttattaattctccacacatgagtctggctaactgggccagctctcatgttttactcctgtctggctacaaatagcactgtgcatagtagccctgtttccccatggtgttggactgtggtaaagtatgttgtgacatactggaattctaataatcctgttgtaagtatgtacagaatctatgtaacttattgttgacatacagaggtttgggaagtagtctaatggacattccttacaatagaatggctgggaagggaaagaaaaaaaaaaaaaaactacctaactccaatcttaatgttgtagttttatagcaaacaaaaattgtcagctttttgtattgaaaggtcagtggtggtaagacaaggtgtcttgtaaattaagattttaagaagtgcattaaaatgttttagaattactctgggaattctgtatatcacactaaaatttttatatcattatgttaataaaagttattgactttgtaattctgcattttgaaatgtgtgaaaagggtctttaaattaccccgaataggttgtatcttattttgctttttttctgactataaaagcagttatgcttatagcataaaatctagaaagcacattaaagtataaagaaaattaaaatttcttataattctacctctgagtaaacagcagcattcgtatgtaacataaaccctctcagggatttattttttctttttaaaaattttttacaaaattaggatcaagtgcttttttaaataatttgcttttgtacttaataaattatagactttaaaatc

SEQ ID NO: 184775 - DNA, 6967 bp, Artificial Sequence
  derived and/or modified sequence
cggacgctagccggcctggccatggctgaccgcgggtgcccgctggaggcggcgccgctgcctgccgaggtgcgggagagcctggctgagctggagctggagctgtcggaaggtgacatcactcaaaaaggatatgaaaagaaaagggcaaagctgcttgcacgttatataccgcttattcaaggaatagacccatctctgcaagcagagaatagaattcctgggccctcacaaaccacggccgctgcacccaagcagcagaagtctcggcccaccgcctcgagggatgagcgcttccggtcagatgtccacactgaagccgtgcaagcagctttggccaaatacaaagagaggaagatgcctatgccttcgaagagacgttctgtccttgtgcattcgtctgtggaaacctacacccctccagacacgtcgtctgcctcagaagatgagggctctttacggcgacccgggcgactcacctccactccgctccagagccattccagcgtcgagccctggctcgaccgggtcattcagggctcgtccacctcatcctctgcatcctccacctcatctcacccgggagggagacccaccactgctcccagtgctgcagccacgccgggggccgccgctaccactgcactcgcaggcctcgaggcccacacccacatagatctgcattctgcccctcctgatgtcaccacgggcctcgtggagcattcgtactttgagcgtccacaggtggcttctgtgagaagtgttcctcgggggtgcagcgggagcatgctggaaacagcagatggtgtccctgtgaacagcagagtgtcctccaaaatccagcagcttctgaacaccctgaagaggccaaagcgccctccactgaaggagttctttgtggatgattttgaggaattgttggaagttcagcaaccagatccaaatcagccaaagcctgagggaagcgagacgagtgtgctgagaggggagcctctcactgcaggtgtcccccgaccgccgtcgctgttggccaccttgcagcgctggggcacaacacagcccaaatccccctgtctgactgccttggatacaactgggaaagccgtctacactctcacctatggtaaactttggagtcggagtttaaaactagcttatactctacttaataaactgacaagtaagaatgaacctctacttaaacctggagacagagtggcgctcgtgtttccgaatagtgaccctgtgatgttcatggttgcattttatgggtgtctcctggcagagctggttcctgtccccatagaagtgccattaacaagaaaggatgcaggcagccagcaggttgggtttctgctgggcagctgtggagtcttcttggccctgaccacagacgcttgtcagaaaggcctccccaaggcacagacaggagaggtggcagctttcaaaggttggcccccgctctcctggctagtgattgatgggaagcatctagccaagcccccaaaggactggcaccctctggcccaggacacagggactgggactgcctacattgagtataaaaccagcaaagaaggcagtacggtgggggtcacagtgtcccacgcatccctgctggcacagtgccgggctctgacccaggcgtgcgggtactcagaagctgaaacattaacaaacgtgctggatttcaaaagggatgctggtctgtggcatggcgtgttaacaagcgtcatgaacaggatgcacgtggtcagcgtcccctacgcgctgatgaaggcgaacccactctcctggatccagaaagtgtgcttctataaagctcgggccgcgctggtgaagtcgcgagacatgcactggtctctcctagctcagcggggccagagggacgtcagcctcagctcactgcgcatgctgattgtggccgatggtgccaacccgtggtcgatctcctcctgtgacgccttcctcaacgtcttccagtccagaggtctgaggccagaggtcatctgtccttgtgcaagttctcctgaggcgctgactgtcgccatccgcaggccacctgatctgggaggaccacctccaagaaaagcagtcctgtcgatgaacggtctaagttatggtgttatcagagtggatactgaagaaaagttgtcagtccttactgttcaggacgttggtcaggtgatgcctggagctaatgtatgtgttgtgaagttagaaggtaccccttatctttgtaaaactgatgaagtgggagaaatatgcgtcagttccagtgcaactggcacagcgtactatggattgcttggaatcacgaagaatgtgtttgaggcagttccggtcaccacaggaggagcacccatctttgacaggccattcaccaggacaggcctgctgggcttcatcgggcctgacaacctggtcttcatcgtgggcaaactggacgggctgatggtcactggagttcgcagacacaatgcagatgacgttgtggccaccgcactggccgtggagcccatgaagtttgtctacagaggcaggatcgctgtgttctctgtgaccgtgctgcacgacgaccggattgtcctggtggctgagcagcggccggatgcctcggaggaggacagcttccagtggatgagccgtgtgctgcaggccattgatagcatccaccaggtgggcgtgtactgtctggccctggttcctgccaacaccttgcccaaggctcctctcggagggattcacatttctgaaaccaaacagcgctttctggaagggacgctgcacccgtgtaatgtgctgatgtgccctcacacctgtgttaccaacctccccaaacctcgtcagaaacaaccagaggttggaccagcctcaatgatcgtggggaacctggttgctgggaagagaatcgctcaggcttccgggagagagctcgcccacctggaggacagcgaccaggcacggaagttcctgttcctggctgacgtgctgcagtggcgtgcccacaccactcctgaccacccgctgttcttgctgctgaacgccaagggcaccgtcacaagcactgcaacctgtgtccagctgcacaaaagggctgagagagtggccgcggctctgatggagaagggaagactgagtgttggggaccatgtggctctggtctacccaccaggggtggacctcattgccgcgttctatggctgcttgtactgtggctgcgtgcctgtcaccgtgcggcccccgcaccctcagaacctcggcaccacactgcccaccgtcaagatgatcgtggaggtcagcaagtctgcatgcgtcctcaccacgcaggctgtcacacggctgctcaggtccaaggaggctgctgctgccgtggacatcaggacctggcccaccatcctagacacagatgacatcccaaaaaagaagatagcaagcgttttcaggcccccctcccccgatgtcctcgcatacttggacttcagcgtgtcaaccactgggatattagcgggagtgaagatgtcgcacgcggccacaagcgccttatgccgctccataaagctgcagtgtgagctgtacccctcgcggcagatcgccatctgcctcgacccctactgtggccttggttttgccctgtggtgtctgtgcagtgtctactcgggacaccaatcagtgctggtgcccccgctggagctggagagcaacgtgtccctgtggctgtcggccgtcagccagtacaaggcccgcgtcaccttctgctcctactctgtgatggagatgtgcaccaagggcctaggcgcacagacgggtgtcctcaggatgaagggggtgaacctgtcatgtgtgcgcacgtgcatggtggtcgccgaggagcggcccaggattgcgctgacccagtccttctccaagctcttcaaggacctgggcctgccggcccgcgccgtaagcaccacgttcgggtgcagggtcaacgtggccatctgcctccagggcacagctggcccggaccccacaaccgtctacgtggacatgcgggcactgcgccatgacagggttcgtttggtagaacggggttctccgcacagcctgccattgatggagtctggaaagatcctccccggcgtgaaggtcatcatcgcacacaccgagaccaaaggacccttgggagactcacacctgggagagatctgggtaagcagcccccacaatgccaccgggtactacaccgtttacggggaggaggcgcttcatgccgaccacttcagtgcccggctgagttttggagacacacagaccatctgggcaaggaccggctaccttggcttccttcggcgaacagagctcactgatgccagtggagggcggcacgatgcactgtatgtggttgggtctctggatgaaactctggagctcagaggcatgcggtaccaccccatcgacattgagacctctgtcatccgagcacacaggagcatcgctgagtgtgccgtattcacctggaccaacctgctggtggtggtggtggagctggatgggctagagcaggatgccctggacctggtggccctggtgaccaacgtggtgctggaggagcactacctggtcgtgggagtggtggtcatcgtggacccaggggtgatccctatcaactctcggggtgagaagcagcgcatgcacctgcgggacggcttcctggctgaccagctggaccccatctatgtcgcctacaacatgtgagcgcagcacaccggcccaggtgccggagatgaatgagccccagcagtccaaggtgtgatgtgggaagacaccgcagagctcactcaccgggactcgcccttcctgtgctcttacagatccctctcaacaatccccgcatctccttttagaaagcacttcctgaattatttaaagaaatattttgaatctgccaagtacatttacaaaaacacggatgctggtattttaacagatggagagacaaggaaaggaaaggaaaggcctggcatgggcattgtgaggaatcacaggcaccgaggttgttctctgctgtactgcaagtttgcactttctttaggctaaaaatatagttcctgatttttaaaattcagttatttattcccacttcaaatgacaagttcatatatagaatttacgggagaaacttgagaccatttacggggagaaacttgattctgggaagatagcagagtacaaaccagctgcctcacttctgtttcacagggaggctgatggaaaaaggaagcaagctggacccatcctccctgctcacagagggcactgtggtcacacacagtgcctcctctgccagttcctttattgaaagaggtgtgctggctggccacggtggcttacacctgtaatcccagcactttgggaggccgaggcgagcagatcacgaggtcaggagaccgagaccatcctggctaacatggtgaaaccctgtctctactaaaaatacaaaaaattagccgggtgtggtggtgggcgcctgtagtcccagctacttgggaggctgaggcaggagaatggtatgaaccagggaggcggagcttgcagtgagccgagatcacgctactgcactccagcctgggtgacagcacgagatgccgtcttaaaaaaacaaaaaagaggtgtgctgcttgtcagcatgtattgtcacggacactcaataagtgccattttggactgtcaaatttagatgctttgtttcagaaagataagccagcatttagttttaaatcactttcctggtttgtaacttgatgctgtttagttaaattgctagttttcctaacactacaatattaattcttctcgtggaagtgtactgatttattatttttattccaagtcagcagatttggaagcattgtggtaaagtctaaggttttcatatccatagtgctgtttggtgagtaccggcagtacagttgaggggagcagggaacagcattgccccgtattgaaggtggagatggttacattcttcactgctttttgcattttgagttgtgtgcctataaaatttggccaaaccattttattattttgttcaaacttgactaagctgagtgatctaaaattatacagaacctaaatcaaagaagagaatgtaaagtcctttagttacttctaagaatttgaagtcaagcacgaatctaagacatagattatttttatatagctaatgaagagtatgttacgaaattgttgggtttttggggtattgagggtggcaaattttgtgaatcatgcatgcttcacagaaacaaccaggtttttccagaattagtctggatcagtgcctaacaaagctgttattaattctccacacatgagtctggctaactgggccagctctcatgttttactcctgtctggctacaaatagcactgtgcatagtagccctgtttccccatggtgttggactgtggtaaagtatgttgtgacatactggaattctaataatcctgttgtaagtatgtacagaatctatgtaacttattgttgacatacagaggtttgggaagtagtctaatggacattccttacaatagaatggctgggaagggaaagaaaaaaaaaaaaaaactacctaactccaatcttaatgttgtagttttatagcaaacaaaaattgtcagctttttgtattgaaaggtcagtggtggtaagacaaggtgtcttgtaaattaagattttaagaagtgcattaaaatgttttagaattactctgggaattctgtatatcacactaaaatttttatatcattatgttaataaaagttattgactttgtaattctgcattttgaaatgtgtgaaaagggtctttaaattaccccgaataggttgtatcttattttgctttttttctgactataaaagcagttatgcttatagcataaaatctagaaagcacattaaagtataaagaaaattaaaa

SEQ ID NO: 184776 - DNA, 2760 bp, Artificial Sequence
  derived and/or modified sequence
gtagccgaggtttgcgctgccgccgccaggcccggtccggttccagcctctgcccggacgctagccggcctggccatggctgaccgcgggtgcccgctggaggcggcgccgctgcctgccgaggtgcgggagagcctggctgagctggagctggagctgtcggaaggtgacatcactcaaaaaggatatgaaaagaaaagggcaaagctgcttgcacgttatataccgcttattcaaggaatagacccatctctgcaagcagagaatagaattcctgggccctcacaaaccacggccgctgcacccaagcagcagaagtctcggcccaccgcctcgagggatgagcgcttccggtcagatgtccacactgaagccgtgcaagcagctttggccaaatacaaagagaggaagatgcctatgccttcgaagagacgttctgtccttgtgcattcgtctgtggaaacctacacccctccagacacgtcgtctgcctcagaagatgagggctctttacggcgacccgggcgactcacctccactccgctccagagccattccagcgtcgagccctggctcgaccgggtcattcagggctcgtccacctcatcctctgcatcctccacctcatctcacccgggagggagacccaccactgctcccagtgctgcagccacgccgggggccgccgctaccactgcactcgcaggcctcgaggcccacacccacatagatctgcattctgcccctcctgatgtcaccacgggcctcgtggagcattcgtactttgagcgtccacaggtggcttctgtgagaagtgttcctcgggggtgcagcgggagcatgctggaaacagcagatggtgtccctgtgaacagcagagtgtcctccaaaatccagcagcttctgaacaccctgaagaggccaaagcgccctccactgaaggagttctttgtggatgattttgaggaattgttggaagttcagcaaccagatccaaatcagccaaagcctgagggaagcgagacgagtgtgctgagaggggagcctctcactgcaggtgtcccccgaccgccgtcgctgttggccaccttgcagcgctggggcacaacacagcccaaatccccctgtctgactgccttggatacaactgggaaagccgtctacactctcacctatggtaaactttggagtcggagtttaaaactagcttatactctacttaataaactgacaagtaagaatgaacctctacttaaacctggagacagagtggcgctcgtgtttccgaatagtgaccctgtgatgttcatggttgcattttatgggtgtctcctggcagagctggttcctgtccccatagaagtgccattaacaagaaaggatgcaggcagccagcaggttgggtttctgctgggcagctgtggagtcttcttggccctgaccacagacgcttgtcagaaaggcctccccaaggcacagacaggagaggtggcagctttcaaaggttggcccccgctctcctggctagtgattgatgggaagcatctagccaagcccccaaaggactggcaccctctggcccaggacacagggactgggactgcctacattgagtataaaaccagcaaagaaggcagtacggtgggggtcacagtgtcccacgcatccctgctggcacagtgccgggctctgacccaggcgtgcgggtactcagaagctgaaacattaacaaacgtgctggatttcaaaagggatgctggtctgtggcatggcgtgttaacaagcgtcatgaacaggatgcacgtggtcagcgtcccctacgcgctgatgaaggcgaacccactctcctggatccagaaagtgtgcttctataaagctcgggccgcgctggtgaagtcgcgagacatgcactggtctctcctagctcagcggggccagagggacgtcagcctcagctcactgcgcatgctgattgtggccgatggtgccaacccgtggtcgatctcctcctgtgacgccttcctcaacgtcttccagtccagaggtctgaggccagaggtcatctgtccttgtgcaagttctcctgaggcgctgactgtcgccatccgcaggccacctgatctgggaggaccacctccaagaaaagcagtcctgtcgatgaacggtctaagttatggtgttatcagagtggatactgaagaaaagttgtcagtccttactgttcaggacgttggtcaggtgatgcctggagctaatgtatgtgttgtgaagttagaaggtaccccttatctttgtaaaactgatgaagtgggagaaatatgcgtcagttccagtgcaactggcacagcgtactatggattgcttggaatcacgaagaatgtgtttgaggcagttccggtcaccacaggaggagcacccatctttgacaggccattcaccaggacaggcctgctgggcttcatcgggcctgacaacctggtcttcatcgtgggcaaactggacgggctgatggtcactggagttcgcagacacaatgcagatgacgttgtggccaccgcactggccgtggagcccatgaagtttgtctacagaggcaggtgatgcgctgcggacccccacgccgggagtagattccttcatttgcagctcgggaagtctttgtgcagtagatggaaagcccagcaaacttgaattcacaaagcctaaaaattgttgtacatcagaaaactcctaaagtaaaaggaaaatatttgcagcaat

SEQ ID NO: 184777 - DNA, 4719 bp, Artificial Sequence
  derived and/or modified sequence
atggccgacagaggctgccccctggaggccgcccccctgcccgccgaggtgagagagagcctggccgagctggagctggagctgagcgagggcgacatcacccagaagggctacgagaagaagagagccaagctgctggccagatacatccccctgatccagggcatcgaccccagcctgcaggccgagaacagaatccccggccccagccagaccaccgccgccgcccccaagcagcagaagagcagacccaccgccagcagagacgagagattcagaagcgacgtgcacaccgaggccgtgcaggccgccctggccaagtacaaggagagaaagatgcccatgcccagcaagagaagaagcgtgctggtgcacagcagcgtggagacctacaccccccccgacaccagcagcgccagcgaggacgagggcagcctgagaagacccggcagactgaccagcacccccctgcagagccacagcagcgtggagccctggctggacagagtgatccagggcagcagcaccagcagcagcgccagcagcaccagcagccaccccggcggcagacccaccaccgcccccagcgccgccgccacccccggcgccgccgccaccaccgccctggccggcctggaggcccacacccacatcgccgacctgcacagcgccccccccgacgtgaccaccggcctggtggagcacagctacttcgagagaccccaggtggccagcgtgagaagcgtgcccagaggctgcagcggcagcatgctggagaccgccgacggcgtgcccgtgaacagcagagtgagcagcaagatccagcagctgctgaacaccctgaagagacccaagagaccccccctgaaggagttcttcgtggacgacttcgaggagctgctggaggtgcagcagcccgaccccaaccagcccaagcccgagggcagcgagaccagcgtgctgagaggcgagcccctgaccgccggcgtgcccagaccccccagcctgctggccaccctgcagagatggggcaccacccagcccaagagcccctgcctgaccgccctggacaccaccggcaaggccgtgtacaccctgacctacggcaagctgtggagcagaagcctgaagctggcctacaccctgctgaacaagctgaccagcaagaacgagcccctgctgaagcccggcgacagagtggccctggtgttccccaacagcgaccccgtgatgttcatggtggccttctacggctgcctgctggccgagctggtgcccgtgcccatcgaggtgcccctgaccagaaaggacgccggcagccagcaggtgggcttcctgctgggcagctgcggcgtgttcctggccctgaccaccgacgcctgccagaagggcctgcccaaggcccagaccggcgaggtggccgccttcaagggctggccccccctgagctggctggtgatcgacggcaagcacctggccaagccccccaaggactggcaccccctggcccaggacaccggcaccggcaccgcctacatcgagtacaagaccagcaaggagggcagcaccgtgggcgtgaccgtgagccacgccagcctgctggcccagtgcagagccctgacccaggcctgcggctacagcgaggccgagaccctgaccaacgtgctggacttcaagagagacgccggcctgtggcacggcgtgctgaccagcgtgatgaacagaatgcacgtggtgagcgtgccctacgccctgatgaaggccaaccccctgagctggatccagaaggtgtgcttctacaaggccagagccgccctggtgaagagcagagacatgcactggagcctgctggcccagagaggccagagagacgtgagcctgagcagcctgagaatgctgatcgtggccgacggcgccaacccctggagcatcagcagctgcgacgccttcctgaacgtgttccagagcagaggcctgagacccgaggtgatctgcccctgcgccagcagccccgaggccctgaccgtggccatcagaagaccccccgacctgggcggccccccccccagaaaggccgtgctgagcatgaacggcctgagctacggcgtgatcagagtggacaccgaggagaagctgagcgtgctgaccgtgcaggacgtgggccaggtgatgcccggcgccaacgtgtgcgtggtgaagctggagggcaccccctacctgtgcaagaccgacgaggtgggcgagatctgcgtgagcagcagcgccaccggcaccgcctactacggcctgctgggcatcaccaagaacgtgttcgaggccgtgcccgtgaccaccggcggcgcccccatcttcgacagacccttcaccagaaccggcctgctgggcttcatcggccccgacaacctggtgttcatcgtgggcaagctggacggcctgatggtgaccggcgtgagaagacacaacgccgacgacgtggtggccaccgccctggccgtggagcccatgaagttcgtgtacagaggcagaatcgccgtgttcagcgtgaccgtgctgcacgacgacagaatcgtgctggtggccgagcagagacccgacgccagcgaggaggacagcttccagtggatgagcagagtgctgcaggccatcgacagcatccaccaggtgggcgtgtactgcctggccctggtgcccgccaacaccctgcccaaggcccccctgggcggcatccacatcagcgagaccaagcagagattcctggagggcaccctgcacccctgcaacgtgctgatgtgcccccacacctgcgtgaccaacctgcccaagcccagacagaagcagcccgaggtgggccccgccagcatgatcgtgggcaacctggtggccggcaagagaatcgcccaggccagcggcagagagctggcccacctggaggacagcgaccaggccagaaagttcctgttcctggccgacgtgctgcagtggagagcccacaccacccccgaccaccccctgttcctgctgctgaacgccaagggcaccgtgaccagcaccgccacctgcgtgcagctgcacaagagagccgagagagtggccgccgccctgatggagaagggcagactgagcgtgggcgaccacgtggccctggtgtacccccccggcgtggacctgatcgccgccttctacggctgcctgtactgcggctgcgtgcccgtgaccgtgagacccccccacccccagaacctgggcaccaccctgcccaccgtgaagatgatcgtggaggtgagcaagagcgcctgcgtgctgaccacccaggccgtgaccagactgctgagaagcaaggaggccgccgccgccgtggacatcagaacctggcccaccatcctggacaccgacgacatccccaagaagaagatcgccagcgtgttcagaccccccagccccgacgtgctggcctacctggacttcagcgtgagcaccaccggcatcctggccggcgtgaagatgagccacgccgccaccagcgccctgtgcagaagcatcaagctgcagtgcgagctgtaccccagcagacagatcgccatctgcctggacccctactgcggcctgggcttcgccctgtggtgcctgtgcagcgtgtacagcggccaccagagcgtgctggtgccccccctggagctggagagcaacgtgagcctgtggctgagcgccgtgagccagtacaaggccagagtgaccttctgcagctacagcgtgatggagatgtgcaccaagggcctgggcgcccagaccggcgtgctgagaatgaagggcgtgaacctgagctgcgtgagaacctgcatggtggtggccgaggagagacccagaatcgccctgacccagagcttcagcaagctgttcaaggacctgggcctgcccgccagagccgtgagcaccaccttcggctgcagagtgaacgtggccatctgcctgcagggcaccgccggccccgaccccaccaccgtgtacgtggacatgagagccctgagacacgacagagtgagactggtggagagaggcagcccccacagcctgcccctgatggagagcggcaagatcctgcccggcgtgaaggtgatcatcgcccacaccgagaccaagggccccctgggcgacagccacctgggcgagatctgggtgagcagcccccacaacgccaccggctactacaccgtgtacggcgaggaggccctgcacgccgaccacttcagcgccagactgagcttcggcgacacccagaccatctgggccagaaccggctacctgggcttcctgagaagaaccgagctgaccgacgccagcggcggcagacacgacgccctgtacgtggtgggcagcctggacgagaccctggagctgagaggcatgagataccaccccatcgacatcgagaccagcgtgatcagagcccacagaagcatcgccgagtgcgccgtgttcacctggaccaacctgctggtggtggtggtggagctggacggcctggagcaggacgccctggacctggtggccctggtgaccaacgtggtgctggaggagcactacctggtggtgggcgtggtggtgatcgtggaccccggcgtgatccccatcaacagcagaggcgagaagcagagaatgcacctgagagacggcttcctggccgaccagctggaccccatctacgtggcctacaacatgtag

SEQ ID NO: 184778 - DNA, 4716 bp, Artificial Sequence
  derived and/or modified sequence
atggccgacagaggctgccccctggaggccgcccccctgcccgccgaggtgagagagagcctggccgagctggagctggagctgagcgagggcgacatcacccagaagggctacgagaagaagagagccaagctgctggccagatacatccccctgatccagggcatcgaccccagcctgcaggccgagaacagaatccccggccccagccagaccaccgccgccgcccccaagcagcagaagagcagacccaccgccagcagagacgagagattcagaagcgacgtgcacaccgaggccgtgcaggccgccctggccaagtacaaggagagaaagatgcccatgcccagcaagagaagaagcgtgctggtgcacagcagcgtggagacctacaccccccccgacaccagcagcgccagcgaggacgagggcagcctgagaagacccggcagactgaccagcacccccctgcagagccacagcagcgtggagccctggctggacagagtgatccagggcagcagcaccagcagcagcgccagcagcaccagcagccaccccggcggcagacccaccaccgcccccagcgccgccgccacccccggcgccgccgccaccaccgccctggccggcctggaggcccacacccacatcgacctgcacagcgccccccccgacgtgaccaccggcctggtggagcacagctacttcgagagaccccaggtggccagcgtgagaagcgtgcccagaggctgcagcggcagcatgctggagaccgccgacggcgtgcccgtgaacagcagagtgagcagcaagatccagcagctgctgaacaccctgaagagacccaagagaccccccctgaaggagttcttcgtggacgacttcgaggagctgctggaggtgcagcagcccgaccccaaccagcccaagcccgagggcagcgagaccagcgtgctgagaggcgagcccctgaccgccggcgtgcccagaccccccagcctgctggccaccctgcagagatggggcaccacccagcccaagagcccctgcctgaccgccctggacaccaccggcaaggccgtgtacaccctgacctacggcaagctgtggagcagaagcctgaagctggcctacaccctgctgaacaagctgaccagcaagaacgagcccctgctgaagcccggcgacagagtggccctggtgttccccaacagcgaccccgtgatgttcatggtggccttctacggctgcctgctggccgagctggtgcccgtgcccatcgaggtgcccctgaccagaaaggacgccggcagccagcaggtgggcttcctgctgggcagctgcggcgtgttcctggccctgaccaccgacgcctgccagaagggcctgcccaaggcccagaccggcgaggtggccgccttcaagggctggccccccctgagctggctggtgatcgacggcaagcacctggccaagccccccaaggactggcaccccctggcccaggacaccggcaccggcaccgcctacatcgagtacaagaccagcaaggagggcagcaccgtgggcgtgaccgtgagccacgccagcctgctggcccagtgcagagccctgacccaggcctgcggctacagcgaggccgagaccctgaccaacgtgctggacttcaagagagacgccggcctgtggcacggcgtgctgaccagcgtgatgaacagaatgcacgtggtgagcgtgccctacgccctgatgaaggccaaccccctgagctggatccagaaggtgtgcttctacaaggccagagccgccctggtgaagagcagagacatgcactggagcctgctggcccagagaggccagagagacgtgagcctgagcagcctgagaatgctgatcgtggccgacggcgccaacccctggagcatcagcagctgcgacgccttcctgaacgtgttccagagcagaggcctgagacccgaggtgatctgcccctgcgccagcagccccgaggccctgaccgtggccatcagaagaccccccgacctgggcggccccccccccagaaaggccgtgctgagcatgaacggcctgagctacggcgtgatcagagtggacaccgaggagaagctgagcgtgctgaccgtgcaggacgtgggccaggtgatgcccggcgccaacgtgtgcgtggtgaagctggagggcaccccctacctgtgcaagaccgacgaggtgggcgagatctgcgtgagcagcagcgccaccggcaccgcctactacggcctgctgggcatcaccaagaacgtgttcgaggccgtgcccgtgaccaccggcggcgcccccatcttcgacagacccttcaccagaaccggcctgctgggcttcatcggccccgacaacctggtgttcatcgtgggcaagctggacggcctgatggtgaccggcgtgagaagacacaacgccgacgacgtggtggccaccgccctggccgtggagcccatgaagttcgtgtacagaggcagaatcgccgtgttcagcgtgaccgtgctgcacgacgacagaatcgtgctggtggccgagcagagacccgacgccagcgaggaggacagcttccagtggatgagcagagtgctgcaggccatcgacagcatccaccaggtgggcgtgtactgcctggccctggtgcccgccaacaccctgcccaaggcccccctgggcggcatccacatcagcgagaccaagcagagattcctggagggcaccctgcacccctgcaacgtgctgatgtgcccccacacctgcgtgaccaacctgcccaagcccagacagaagcagcccgaggtgggccccgccagcatgatcgtgggcaacctggtggccggcaagagaatcgcccaggccagcggcagagagctggcccacctggaggacagcgaccaggccagaaagttcctgttcctggccgacgtgctgcagtggagagcccacaccacccccgaccaccccctgttcctgctgctgaacgccaagggcaccgtgaccagcaccgccacctgcgtgcagctgcacaagagagccgagagagtggccgccgccctgatggagaagggcagactgagcgtgggcgaccacgtggccctggtgtacccccccggcgtggacctgatcgccgccttctacggctgcctgtactgcggctgcgtgcccgtgaccgtgagacccccccacccccagaacctgggcaccaccctgcccaccgtgaagatgatcgtggaggtgagcaagagcgcctgcgtgctgaccacccaggccgtgaccagactgctgagaagcaaggaggccgccgccgccgtggacatcagaacctggcccaccatcctggacaccgacgacatccccaagaagaagatcgccagcgtgttcagaccccccagccccgacgtgctggcctacctggacttcagcgtgagcaccaccggcatcctggccggcgtgaagatgagccacgccgccaccagcgccctgtgcagaagcatcaagctgcagtgcgagctgtaccccagcagacagatcgccatctgcctggacccctactgcggcctgggcttcgccctgtggtgcctgtgcagcgtgtacagcggccaccagagcgtgctggtgccccccctggagctggagagcaacgtgagcctgtggctgagcgccgtgagccagtacaaggccagagtgaccttctgcagctacagcgtgatggagatgtgcaccaagggcctgggcgcccagaccggcgtgctgagaatgaagggcgtgaacctgagctgcgtgagaacctgcatggtggtggccgaggagagacccagaatcgccctgacccagagcttcagcaagctgttcaaggacctgggcctgcccgccagagccgtgagcaccaccttcggctgcagagtgaacgtggccatctgcctgcagggcaccgccggccccgaccccaccaccgtgtacgtggacatgagagccctgagacacgacagagtgagactggtggagagaggcagcccccacagcctgcccctgatggagagcggcaagatcctgcccggcgtgaaggtgatcatcgcccacaccgagaccaagggccccctgggcgacagccacctgggcgagatctgggtgagcagcccccacaacgccaccggctactacaccgtgtacggcgaggaggccctgcacgccgaccacttcagcgccagactgagcttcggcgacacccagaccatctgggccagaaccggctacctgggcttcctgagaagaaccgagctgaccgacgccagcggcggcagacacgacgccctgtacgtggtgggcagcctggacgagaccctggagctgagaggcatgagataccaccccatcgacatcgagaccagcgtgatcagagcccacagaagcatcgccgagtgcgccgtgttcacctggaccaacctgctggtggtggtggtggagctggacggcctggagcaggacgccctggacctggtggccctggtgaccaacgtggtgctggaggagcactacctggtggtgggcgtggtggtgatcgtggaccccggcgtgatccccatcaacagcagaggcgagaagcagagaatgcacctgagagacggcttcctggccgaccagctggaccccatctacgtggcctacaacatgtag

SEQ ID NO: 184779 - DNA, 2526 bp, Artificial Sequence
  derived and/or modified sequence
atggccgacagaggctgccccctggaggccgcccccctgcccgccgaggtgagagagagcctggccgagctggagctggagctgagcgagggcgacatcacccagaagggctacgagaagaagagagccaagctgctggccagatacatccccctgatccagggcatcgaccccagcctgcaggccgagaacagaatccccggccccagccagaccaccgccgccgcccccaagcagcagaagagcagacccaccgccagcagagacgagagattcagaagcgacgtgcacaccgaggccgtgcaggccgccctggccaagtacaaggagagaaagatgcccatgcccagcaagagaagaagcgtgctggtgcacagcagcgtggagacctacaccccccccgacaccagcagcgccagcgaggacgagggcagcctgagaagacccggcagactgaccagcacccccctgcagagccacagcagcgtggagccctggctggacagagtgatccagggcagcagcaccagcagcagcgccagcagcaccagcagccaccccggcggcagacccaccaccgcccccagcgccgccgccacccccggcgccgccgccaccaccgccctggccggcctggaggcccacacccacatcgacctgcacagcgccccccccgacgtgaccaccggcctggtggagcacagctacttcgagagaccccaggtggccagcgtgagaagcgtgcccagaggctgcagcggcagcatgctggagaccgccgacggcgtgcccgtgaacagcagagtgagcagcaagatccagcagctgctgaacaccctgaagagacccaagagaccccccctgaaggagttcttcgtggacgacttcgaggagctgctggaggtgcagcagcccgaccccaaccagcccaagcccgagggcagcgagaccagcgtgctgagaggcgagcccctgaccgccggcgtgcccagaccccccagcctgctggccaccctgcagagatggggcaccacccagcccaagagcccctgcctgaccgccctggacaccaccggcaaggccgtgtacaccctgacctacggcaagctgtggagcagaagcctgaagctggcctacaccctgctgaacaagctgaccagcaagaacgagcccctgctgaagcccggcgacagagtggccctggtgttccccaacagcgaccccgtgatgttcatggtggccttctacggctgcctgctggccgagctggtgcccgtgcccatcgaggtgcccctgaccagaaaggacgccggcagccagcaggtgggcttcctgctgggcagctgcggcgtgttcctggccctgaccaccgacgcctgccagaagggcctgcccaaggcccagaccggcgaggtggccgccttcaagggctggccccccctgagctggctggtgatcgacggcaagcacctggccaagccccccaaggactggcaccccctggcccaggacaccggcaccggcaccgcctacatcgagtacaagaccagcaaggagggcagcaccgtgggcgtgaccgtgagccacgccagcctgctggcccagtgcagagccctgacccaggcctgcggctacagcgaggccgagaccctgaccaacgtgctggacttcaagagagacgccggcctgtggcacggcgtgctgaccagcgtgatgaacagaatgcacgtggtgagcgtgccctacgccctgatgaaggccaaccccctgagctggatccagaaggtgtgcttctacaaggccagagccgccctggtgaagagcagagacatgcactggagcctgctggcccagagaggccagagagacgtgagcctgagcagcctgagaatgctgatcgtggccgacggcgccaacccctggagcatcagcagctgcgacgccttcctgaacgtgttccagagcagaggcctgagacccgaggtgatctgcccctgcgccagcagccccgaggccctgaccgtggccatcagaagaccccccgacctgggcggccccccccccagaaaggccgtgctgagcatgaacggcctgagctacggcgtgatcagagtggacaccgaggagaagctgagcgtgctgaccgtgcaggacgtgggccaggtgatgcccggcgccaacgtgtgcgtggtgaagctggagggcaccccctacctgtgcaagaccgacgaggtgggcgagatctgcgtgagcagcagcgccaccggcaccgcctactacggcctgctgggcatcaccaagaacgtgttcgaggccgtgcccgtgaccaccggcggcgcccccatcttcgacagacccttcaccagaaccggcctgctgggcttcatcggccccgacaacctggtgttcatcgtgggcaagctggacggcctgatggtgaccggcgtgagaagacacaacgccgacgacgtggtggccaccgccctggccgtggagcccatgaagttcgtgtacagaggcagatag

SEQ ID NO: 184780 - protein, 2039 aa, Artificial Sequence
  derived and/or modified sequence
MDIVDTFNHLIPTEHLDDALFLGSNLENEVCEDFSASQNVLEDSLKNMLSDKDPMLGSASNQFCLPVLDSNDPNFQMPCSTVVGLDDIMDEGVVKESGNDTIDEEELILPNRNLRDKVEENSVRSPRKSPRLMAQEQVRSLRQSTIAKRSNAAPLSNTKKASGKTVSTAKAGVKQPERSQVKEEVCMSLKPEYHKENRRCSRNSGQIEVVPEVSVSSSHSSVSSCLEMKDEDGLDSKHKCNNPGEIDVPSHELNCSLLSETCVTIGEKKNEALMECKAKPVGSPLFKFSDKEEHEQNDSISGKTGETVVEEMIATRKVEQDSKETVKLSHEDDHILEDAGSSDISSDAACTNPNKTENSLVGLPSCVDEVTECNLELKDTMGIADKTENTLERNKIEPLGYCEDAESNRQLESTEFNKSNLEVVDTSTFGPESNILENAICDVPDQNSKQLNAIESTKIESHETANLQDDRNSQSSSVSYLESKSVKSKHTKPVIHSKQNMTTDAPKKIVAAKYEVIHSKTKVNVKSVKRNTDVPESQQNFHRPVKVRKKQIDKEPKIQSCNSGVKSVKNQAHSVLKKTLQDQTLVQIFKPLTHSLSDKSHAHPGCLKEPHHPAQTGHVSHSSQKQCHKPQQQAPAMKTNSHVKEELEHPGVEHFKEEDKLKLKKPEKNLQPRQRRSSKSFSLDEPPLFIPDNIATIRREGSDHSSSFESKYMWTPSKQCGFCKKPHGNRFMVGCGRCDDWFHGDCVGLSLSQAQQMGEEDKEYVCVKCCAEEDKKTEILDPDTLENQATVEFHSGDKTMECEKLGLSKHTTNDRTKYIDDTVKHKVKILKRESGEGRNSSDCRDNEIKKWQLAPLRKMGQPVLPRRSSEEKSEKIPKESTTVTCTGEKASKPGTHEKQEMKKKKVEKGVLNVHPAASASKPSADQIRQSVRHSLKDILMKRLTDSNLKVPEEKAAKVATKIEKELFSFFRDTDAKYKNKYRSLMFNLKDPKNNILFKKVLKGEVTPDHLIRMSPEELASKELAAWRRRENRHTIEMIEKEQREVERRPITKITHKGEIEIESDAPMKEQEAAMEIQEPAANKSLEKPEGSEKQKEEVDSMSKDTTSQHRQHLFDLNCKICIGRMAPPVDDLSPKKVKVVVGVARKHSDNEAESIADALSSTSNILASEFFEEEKQESPKSTFSPAPRPEMPGTVEVESTFLARLNFIWKGFINMPSVAKFVTKAYPVSGSPEYLTEDLPDSIQVGGRISPQTVWDYVEKIKASGTKEICVVRFTPVTEEDQISYTLLFAYFSSRKRYGVAANNMKQVKDMYLIPLGATDKIPHPLVPFDGPGLELHRPNLLLGLIIRQKLKRQHSACASTSHIAETPESAPPIALPPDKKSKIEVSTEEAPEEENDFFNSFTTVLHKQRNKPQQNLQEDLPTAVEPLMEVTKQEPPKPLRFLPGVLIGWENQPTTLELANKPLPVDDILQSLLGTTGQVYDQAQSVMEQNTVKEIPFLNEQTNSKIEKTDNVEVTDGENKEIKVKVDNISESTDKSAEIETSVVGSSSISAGSLTSLSLRGKPPDVSTEAFLTNLSIQSKQEETVESKEKTLKRQLQEDQENNLQDNQTSNSSPCRSNVGKGNIDGNVSCSENLVANTARSPQFINLKRDPRQAAGRSQPVTTSESKDGDSCRNGEKHMLPGLSHNKEHLTEQINVEEKLCSAEKNSCVQQSDNLKVAQNSPSVENIQTSQAEQAKPLQEDILMQNIETVHPFRRGSAVATSHFEVGNTCPSEFPSKSITFTSRSTSPRTSTNFSPMRPQQPNLQHLKSSPPGFPFPGPPNFPPQSMFGFPPHLPPPLLPPPGFGFAQNPMVPWPPVVHLPGQPQRMMGPLSQASRYIGPQNFYQVKDIRRPERRHSDPWGRQDQQQLDRPFNRGKGDRQRFYSDSHHLKRERHEKEWEQESERHRRRDRSQDKDRDRKSREEGHKDKERARLSHGDRGTDGKASRDSRNVDKKPDKPKSEDYEKDKEREKSKHREGEKDRDRYHKDRDHTDRTKSKR

SEQ ID NO: 184781 - DNA, 6120 bp, Artificial Sequence
  derived and/or modified sequence
atggacattgtggacaccttcaaccatctgattccaactgaacacctcgatgatgctctattcctgggctccaatctggagaatgaggtctgtgaggatttcagcgcatcccaaaatgtgctggaggactctttgaaaaatatgttgtccgataaagacccaatgttggggtctgctagcaaccagttctgtctgcctgtgctggattctaacgaccccaattttcagatgccttgctcaaccgttgttggcttagacgacataatggatgaaggggtggtgaaggaatctggaaatgacaccatcgatgaggaggaactcattttgcccaatcgtaacctgcgcgacaaagtggaggaaaactccgtgcggagccctcggaaaagcccaaggctcatggcgcaggaacaggtgcgttccctgagacagtctacgattgccaagcggtcaaatgcggcacctcttagcaacaccaaaaaagcttctggaaaaactgttagcacggcgaaagctggagtgaagcagccggaaagatcacaggtgaaggaggaggtgtgcatgtccctgaagccagaataccataaagagaataggcgatgctctcgtaatagtggccaaatcgaggtcgttcccgaagtcagcgtctccagtagccactcatctgtgtcctcttgcctcgaaatgaaggatgaggatggtctggactccaagcacaaatgcaacaatcctggggagatcgatgtgccttcccacgaattgaattgctctctcctgtctgagacctgtgtgaccataggagaaaaaaagaacgaggctcttatggagtgcaaagctaaacccgttggaagtccattattcaagttctccgacaaagaagagcatgaacaaaatgacagtatatcaggcaagaccggtgagacagtggttgaggagatgattgccacacgtaaggtcgaacaagactctaaggaaacagtgaagttgtcgcatgaggacgatcatatcctggaagatgccggatctagtgatatatcttcagatgccgcatgcacaaatccaaataagactgaaaatagcttggtgggtttgccaagctgtgtcgacgaggtgacagagtgtaacttggaactcaaggacaccatgggcattgcagacaagaccgaaaacactcttgagcgcaataagatcgagccactcggctattgcgaggacgccgaatctaaccggcagcttgagtctaccgagttcaacaagtcaaatctggaagtagttgatacctctacctttggacccgagagtaacatcttggaaaatgctatctgtgatgtgccagatcagaatagcaaacagctgaacgctatcgagtcaaccaagattgagtcccacgagacagctaatctgcaggacgaccggaattcccagagctctagtgtgtcttatctggaatctaagtccgtgaagtccaagcatactaaacccgtaattcacagcaaacagaacatgactactgacgccccaaagaagatcgtagccgccaaatatgaggtgatccactccaagaccaaggtgaacgttaaatccgtgaaacggaacaccgatgtcccagagtcccagcaaaacttccatagacccgtgaaggtacgaaaaaagcagattgacaaggaacccaaaattcagtcctgcaattccggggttaaatccgtaaaaaaccaggcgcacagcgtcctcaagaaaacactgcaggaccagacactagtacaaatatttaaaccgctgacacattccttgtcagacaagtcacatgctcacccgggatgtctgaaagagccacatcacccagcacagactggccacgtcagccatagctcacagaagcaatgtcataagccccagcagcaggcgccagcgatgaagactaacagtcatgtgaaggaggaattggaacatccaggggtagaacactttaaggaagaggacaaacttaagttgaagaaacctgagaagaaccttcagcctagacagcgcaggtcctctaagtccttttcactggatgaaccaccgctgtttatccctgacaacatagccacaatccgacgtgaaggctcagaccactcctcttcattcgagtccaaatatatgtggacaccaagtaagcagtgcggtttctgtaaaaagccgcacggtaacaggtttatggtgggctgtggtcgatgtgacgactggttccacggcgactgtgtgggcctctccttatcccaggcgcagcagatgggagaggaggataaggaatacgtgtgcgtcaagtgctgcgcagaagaagacaaaaaaacagagatactcgacccggataccctagaaaatcaggctactgtcgagttccactctggcgacaagaccatggaatgtgagaagttgggtctctccaagcatactacaaacgatcgtaccaagtacatcgacgacacagttaagcataaagttaagattttaaagagggagtccggtgaagggcgcaactcaagcgactgtagagacaatgaaatcaaaaaatggcagttggctcctctcaggaagatggggcagccagtactgcctagacgaagctcggaagagaagagcgaaaaaattcccaaggagtctaccacagtgacttgcacaggagagaaggcaagcaaacctggtacgcacgaaaaacaagagatgaagaagaaaaaggtcgaaaaaggagtgttgaacgttcaccctgcagccagtgcttcgaagcccagcgcggaccagatcaggcaaagcgtgcgacactccctgaaagatatactcatgaagaggctcacagatagcaatctgaaggtgcctgaggaaaaagctgcaaaagtcgccacaaagatcgagaaagagctgttctctttttttcgcgatacagatgccaaatacaagaacaagtatcgtagcctcatgttcaatctcaaagatccaaagaacaacatcctgttcaaaaaggtgctgaaaggggaggtgacacccgaccacctcatcagaatgtccccagaggagctggcgtcaaaagagttagctgcatggcggcggagagaaaacaggcataccatcgaaatgattgagaaagagcaacgcgaagtagaaaggcgccccataaccaaaattacccacaagggcgagattgaaatagagagcgatgcacctatgaaggagcaagaagccgccatggagatacaagagcccgctgccaacaagtccttggagaaacctgaaggatccgagaagcaaaaggaagaggtggactctatgtctaaggacacaacgagtcagcataggcagcatctttttgacttgaactgtaagatctgtatcgggcggatggcccctcccgtggatgacctcagtccaaagaaagtcaaggtcgtggtgggtgtagctcgaaagcatagcgataacgaggccgaatcaatcgctgacgcattgtcttccacctcaaacatcctggcttcggagttctttgaggaagagaaacaggagagcccgaaaagtactttttcacctgccccacgcccggaaatgccaggaacggttgaggttgagtcaacattcctggcgcgtctgaatttcatctggaaaggctttatcaacatgcccagcgtcgctaagtttgttacaaaggcatatcccgtatcaggatcccctgaatatctaacagaagacctccctgatagcatccaggttggagggaggattagtccccagactgtctgggactacgtagagaaaattaaagcctctgggaccaaagaaatctgcgttgttaggtttaccccagtgactgaggaagaccagatttcttataccctactgtttgcctattttagttcccggaagcggtatggcgtagccgcaaacaatatgaagcaagtgaaagacatgtacctcattccgttaggagccacagacaaaatcccccaccccctcgtcccgtttgacggacccggcctggagctccataggccaaacctgttgttagggttgattatacgccaaaaactgaagcggcaacacagcgcgtgtgccagtacttctcacattgctgaaaccccagagtctgccccaccgattgccctccctcccgataagaaaagcaagatcgaagtgtctacggaagaggcccctgaagaggagaatgattttttcaatagcttcacaactgttttacacaagcagcgtaacaagccgcagcaaaatctccaagaagacctgcctactgctgtagaacccctgatggaagttaccaaacaggaaccgccgaagcccttgcgatttctgcctggtgtgcttataggttgggagaaccagccgaccactctagagctcgcaaataaacccctgccagttgacgatattctccagtccttgctaggtacgactggacaggtgtacgaccaggcccagagtgttatggagcagaatacggttaaagaaattccgttcctgaacgaacagaccaattccaaaattgagaaaactgataacgtagaggttaccgacggcgagaataaagagattaaagtaaaggttgacaatatctccgaatcaaccgacaaatcggctgagatagaaacttccgtggtagggtctagtagcatcagcgccggcagccttacttcactgtcactgagaggtaagccgcctgacgtgtcaacagaggcatttctaaccaatctgtccattcagtccaagcaggaagaaacggtggaaagcaaagaaaagacgctgaagcggcagctgcaggaggaccaggagaacaatcttcaggataatcaaacctccaattcctcaccatgtcggtccaatgtggggaaaggcaatatcgatggcaatgtgtcttgttctgaaaacctggtcgcgaataccgctaggtctccacagttcataaatttgaagagggacccgcgacaggcagcagggagatcacagccagtgaccacttccgagtcaaaggacggcgactcttgcagaaacggagaaaagcatatgctgcccggcttaagccacaataaggagcacttgacagaacagataaatgtcgaggagaagctctgtagtgccgaaaagaactcgtgcgtgcaacagagtgacaatctgaaggtggcccaaaattctccttcagtggagaacattcagacgtcccaggccgaacaggcaaaaccactgcaggaagacatattgatgcaaaatattgagactgtgcatccgtttagaagagggtcggctgtggcaacctctcatttcgaggtagggaacacatgtccttccgaatttccatcaaagtccatcacatttacttctagatctacgtcccctcgcacatctacaaacttcagtcccatgcgcccccagcaaccaaatctgcagcatctgaagtccagcccacctggatttccctttcctggacctcccaactttccccctcagtctatgtttggattccctcctcatctaccacctccactgctaccccccccgggcttcggctttgctcagaaccccatggttccctggccccctgtcgtgcacttgccaggccagccccagagaatgatggggcccctgtctcaggcaagtagatatattggaccccagaatttttaccaggtgaaagatattcggaggccggagagaaggcactctgacccgtggggcagacaggaccagcagcagttggacaggccatttaatcgcgggaaaggtgaccgccagcgattctactctgactctcatcaccttaagcgggagaggcatgaaaaggagtgggagcaggaatccgagagacatagacggcgcgaccgaagtcaggacaaagaccgcgatagaaagtctcgggaagaagggcataaagacaaggaaagagcgcgcttgtcacatggggaccggggaaccgacggcaaagccagtcgcgatagtcggaacgtggacaagaaacctgataagccaaaaagcgaagattatgagaaggacaaggagcgggagaaatcaaagcatcgagaaggggaaaaagaccgtgatagatatcataaagatcgtgatcatacggatagaaccaagtccaaaaggtag

SEQ ID NO: 184782 - DNA, 6120 bp, Artificial Sequence
  derived and/or modified sequence
atggatatcgtcgacaccttcaaccatcttatccccaccgaacacctagatgatgccctcttcctgggaagtaacctcgaaaacgaggtttgcgaggacttctccgcctcacagaacgtgctggaagattctctcaaaaacatgctgtcagacaaagacccaatgctgggcagcgccagcaatcaattctgtctgccagtcttagacagcaacgatccaaattttcagatgccttgcagcactgtggtaggcctggacgacattatggacgagggcgtcgtgaaagaatctggtaatgacacaattgacgaggaggagctcattctgccgaataggaacctcagggataaggtggaggaaaattccgtgagaagcccacgcaagagtcctagactgatggcccaagaacaggttcgatcgctgcgccagagtacaatcgcgaaacggtctaatgcagcccctttgtcaaacacaaagaaggcttccgggaaaaccgtgtctactgcaaaagcgggtgtgaaacagcccgaaaggagccaggtcaaagaggaggtgtgcatgtccctaaaaccagaataccacaaggagaatcggcgttgtagccgcaactccggccagatcgaggtggtgcctgaggtgagtgtgagcagctcgcactcctccgtgagctcatgcctggagatgaaggatgaggatggactggattctaagcacaaatgcaataaccccggcgaaatagatgtgccaagtcatgagctcaactgctcattattgtccgagacttgtgtgacaatcggtgagaagaaaaatgaggccttgatggaatgtaaagctaaacccgtcggctctcccctgttcaaattctccgataaggaagagcacgagcagaacgacagtataagcggaaagactggcgagactgtcgtggaggaaatgattgctacacgcaaggttgagcaagacagcaaggaaaccgtgaaactctcacacgaggacgaccacatcctggaggatgcaggaagctctgatatctcctctgacgctgcctgcacaaaccccaacaaaactgagaacagcttggtcggcctccccagctgtgtggatgaagtgacagagtgtaatcttgaactgaaggatacaatggggattgccgataagactgagaacaccctggagcgcaataagattgagccactaggatactgtgaggacgccgagtctaatagacagttggaatcgacggagttcaacaaatctaacctggaggtcgtggacacgtccacattcggacccgaatccaatatcctagagaatgctatctgcgacgtgcctgatcagaattcaaagcagcttaacgccatcgaatccactaaaattgagagtcatgaaacagctaacctgcaagatgatagaaattcacagtcctcatccgtgagctacttagagagcaagtctgtcaagtcaaaacatacaaaaccagtcatccactccaaacaaaacatgaccactgacgctcctaagaagatcgtggcagcgaaatacgaggtgatacactccaagactaaagtcaatgtcaaatcagtgaagagaaataccgatgttccggagagtcagcagaatttccaccggcctgtgaaagtgcggaaaaagcagatcgacaaggagcctaaaatccagtcatgtaattctggggtcaaatctgttaaaaaccaggcccacagtgtgttgaaaaagacacttcaagatcaaacactcgtacagatcttcaagccactgacccatagcctgtctgacaagagccacgcacacccagggtgtttgaaggagcctcaccacccagcccagactggccacgtgagccattcaagtcagaagcagtgccacaaaccgcagcagcaagcacccgcgatgaaaactaatagtcatgtgaaggaagaactcgaacacccaggcgtcgaacactttaaggaagaagataaattgaaactcaagaagccagagaaaaaccttcaacctcggcaacgccggtcatctaagtctttttccttagatgagccccctctatttatccctgacaatatagccactatcagacgggagggttccgaccattcatcttcttttgagagcaaatatatgtggactccgagcaagcagtgtgggttttgcaaaaagccccatgggaacagattcatggtgggctgcggcagatgcgacgactggttccacggagattgcgtgggcctctcactgtcccaggcccagcagatgggcgaggaagacaaggaatacgtatgtgtgaaatgttgtgccgaggaggataaaaagaccgagatcctggatcccgatacgttagagaaccaggctaccgtcgagttccattctggcgacaagaccatggaatgcgagaagctcggactgagcaagcacaccaccaacgaccgcaccaaatatattgacgatacggtgaagcacaaggtaaagatcttgaagcgggaatcaggtgagggtaggaactcttcagattgtcgtgacaatgaaatcaagaaatggcagctggccccgctgaggaagatgggtcagcctgtcttaccgaggagaagcagcgaagaaaaatcagagaaaattcctaaagaaagcaccacagtgacctgcactggggagaaagcatcaaagcctgggacacatgaaaaacaggaaatgaaaaagaagaaggtcgagaagggcgtgcttaatgtgcaccccgctgcaagcgcttctaagccatctgccgatcagatacggcaaagtgtgcgccatagcctgaaagatattctgatgaagagacttaccgatagcaatcttaaggtccccgaggagaaggccgctaaagtagccacaaaaatcgagaaggaactgttttcttttttccgagacactgatgcaaagtacaaaaacaaataccgaagtctgatgttcaatctcaaggaccccaagaacaatatcttgtttaagaaggttcttaagggcgaggtgaccccagatcatctgattagaatgtcacctgaggaactggcatctaaggagttggctgcatggagacgccgggagaatcgccacaccatagaaatgattgagaaggagcaacgtgaggtggaacgccggcccataaccaaaataactcacaaaggggaaattgaaattgagtccgacgctcctatgaaagagcaggaggcggccatggagatccaggagccagccgcgaataagtcgttagaaaagcccgagggcagtgagaaacagaaagaggaagtggattccatgtccaaggatactacatcccagcacaggcagcacttattcgatctgaactgcaaaatttgcatcggccgcatggcgccccccgtggatgatctctctccaaaaaaggtgaaggtggtggtgggagtcgctcgcaagcacagcgataacgaggccgagagtattgccgacgccctgtcttccacctcgaatattctcgctagcgaatttttcgaggaggagaaacaagaatctcctaagtctacgttttcaccagcccccagacccgaaatgcccggcaccgtggaagtggagtcaacatttctggcccgcctgaacttcatatggaagggttttatcaacatgccttcagtggcaaaatttgtgaccaaggcctaccctgtgtctggcagtcctgaatatcttaccgaagatttgcccgactcaattcaagtcgggggtcgcatcagcccacaaaccgtatgggattacgttgagaaaatcaaggcgtctggaacaaaagagatttgtgttgtgcggtttactccagtcacagaggaggatcagatttcctatacgttgctctttgcctacttctcaagcagaaagagatatggagtcgctgctaataatatgaagcaggtaaaggacatgtacctgatccctctgggtgcaactgacaagattccccatcctctggtgccgtttgacggcccaggactcgaactgcaccgacctaatcttctcctgggcctgatcatcagacagaaactgaagagacagcatagcgcatgcgcttccacttcacacattgccgagactcccgagagcgcaccacctatcgcgctccccccggacaagaagtccaaaatcgaagtaagcactgaggaagctcccgaggaagagaacgacttttttaattccttcaccacggtactccataaacagaggaacaagcctcagcagaacctccaggaggacctgcccacggccgtagagcctttgatggaggtcacgaaacaggagccccctaagcctctcaggttcctccctggagttcttattggatgggaaaatcagcccaccacactggagcttgccaataagccactgcctgttgacgacatcctgcagtcgcttctcggaaccactggccaggtctacgatcaagcacagtcggttatggagcagaacaccgtaaaagaaatacctttcctgaacgagcaaacgaattctaaaatagagaagacggataacgtggaggtgacagatggagagaataaagaaatcaaggttaaggttgacaatataagcgagtccacagataagtcagcagagatagaaacttccgtggtaggctcctccagtatctccgcgggttcacttacgtccctctccctgcgcggaaaaccaccagacgtgagcacagaagctttcctgaccaacctctctatccagtcaaagcaagaggaaacagtggagtcaaaggaaaaaacgctcaagagacagctgcaggaagatcaggaaaataatctccaagataaccagaccagcaatagcagtccctgcaggtccaatgtgggcaagggtaatattgacgggaacgtctcctgtagcgagaacttggtcgccaatacagctcggtcaccacagtttatcaacctgaagcgagaccctcgccaggcagcggggcggagtcagcctgtgactacatctgaatcgaaggatggtgactcttgcaggaacggagagaaacacatgctaccaggccttagtcacaataaggagcacttaacggagcagataaacgtggaagaaaaactatgttcagctgagaagaactcctgcgtccagcaatctgacaatcttaaggtcgcgcagaactctccctcagtcgaaaatatccagaccagtcaagccgagcaggcaaagccactgcaggaggatatcctgatgcaaaacattgaaaccgtgcacccattccggagaggaagtgcggttgccacctctcactttgaagtaggcaacacctgcccgtccgagtttccatctaaatctattacattcacttcccggagcacctcgccccgaacctctactaacttttctcccatgcgcccccagcagcctaatttgcagcatttaaaatcaagcccaccaggattcccttttccagggccccctaattttcctccccagtctatgtttgggtttcccccccacctgcccccccccctgctcccgcctcccggatttggctttgcccaaaatcccatggttccttggccacctgtcgttcacctgccaggccaacctcagagaatgatgggtccactgtcccaggcaagcaggtacatcggtccccagaacttttatcaggtcaaggatattaggagacctgaacgccggcattccgacccttgggggagacaagatcagcagcagctcgacagaccattcaaccgtgggaaaggagaccgtcagcggttttattccgactcacatcacctcaagcgagagcggcacgaaaaagagtgggaacaggagagcgagaggcacagacggcgagacagaagtcaagacaaggaccgggatcggaaatcacgcgaagaaggtcataaggacaaagagcgtgccagattgtcccacggagaccgaggcaccgatggcaaagccagtcgggatagcaggaacgttgacaagaaacccgataaacccaagtccgaagattatgagaaggacaaagaacgagaaaagagcaaacaccgcgagggcgaaaaggatcgagatagatatcacaaagacagagaccatactgaccgcactaagagcaagagatag

SEQ ID NO: 184783 - DNA, 6120 bp, Artificial Sequence
  derived and/or modified sequence
atggacatcgtggacaccttcaaccacctgatccccacagagcacctggatgatgccctcttcctgggcagcaacctggagaatgaggtgtgtgaggacttcagcgccagccagaatgtgctggaggacagcctgaagaacatgctgagtgacaaggaccccatgctgggcagcgccagcaaccagttctgcctgcctgtgctggacagcaatgaccccaacttccagatgccctgcagcacagtggtgggcctggatgacatcatggatgagggcgtggtgaaggagagcggaaatgacaccattgatgaggaggagctgatcctgcccaacagaaacctgcgggacaaggtggaggagaacagcgtgcgcagccccaggaagagcccccggctgatggcccaggagcaggtgcgcagcctgcggcagagcaccatcgccaagaggagcaatgctgcccccctgagcaacaccaagaaggccagcggcaagacagtgtccacagccaaggccggcgtgaagcagcctgagaggagccaggtgaaggaggaggtgtgcatgagcctgaagccagagtaccacaaggagaacagacgctgcagcaggaacagcggccagatcgaggtggtgcctgaggtgtctgtgagcagcagccacagctctgtgagcagctgcctggagatgaaggatgaagatggcctggacagcaagcacaagtgcaacaaccctggagaaattgatgtgcccagccatgagctgaactgcagcctgctgtctgagacctgtgtgaccatcggggagaagaagaatgaggccctgatggagtgcaaggccaagcctgtgggcagccccctcttcaagttcagtgacaaggaggagcacgagcagaatgacagcatcagcggcaagacaggagaaacagtggtggaggagatgattgccaccaggaaggtggagcaggacagcaaggagaccgtgaagctgagccatgaagatgaccacatcctggaggatgctggcagcagtgacatcagcagtgatgctgcctgcaccaaccccaacaagacagagaacagcctggtgggcctgcccagctgtgtggatgaggtgacagagtgcaacctggagctgaaggacaccatgggcattgctgacaagacagagaacaccctggagaggaacaagattgagcccctgggctactgtgaagatgctgagagcaaccggcagctggagagcacagagttcaacaagagcaacctggaggtggtggacaccagcacctttggacctgagagcaacatcctggagaatgccatctgtgatgtgcctgaccagaacagcaagcagctgaatgccatcgagagcaccaagattgagagccatgaaacagccaacctgcaggatgacaggaacagccagagcagctctgtgtcctacctggagagcaagtctgtgaagagcaagcacaccaagcctgtgatccacagcaagcagaacatgaccacagatgcccccaagaagatcgtggccgccaagtatgaggtgatccacagcaagaccaaggtgaatgtgaagtctgtgaagaggaacacagatgtgcctgagagccagcagaacttccacaggcctgtgaaggtgaggaagaagcagattgacaaggagcccaagatccagagctgcaacagcggcgtgaagtctgtgaagaaccaggcccacagcgtgctgaagaagaccctgcaggaccagaccctggtgcagatcttcaagcccctgacccacagcctgagtgacaagagccacgcccaccctggctgcctgaaggagccccaccacccagcccagacaggccacgtgagccacagcagccagaagcagtgccacaagccccagcagcaggccccagccatgaagaccaacagccacgtgaaggaggagctggagcaccctggggtggagcacttcaaggaggaggacaagctgaagctgaagaagccagagaagaacctgcagccccggcagaggaggagcagcaagagcttcagcctggatgagcccccactcttcatcccagacaacatcgccaccatccggcgggagggcagtgaccacagcagcagctttgagagcaagtacatgtggacccccagcaagcagtgtggcttctgcaagaagccccacggcaaccgcttcatggtgggctgcggccgctgtgatgactggttccatggagactgtgtgggcctgagcctgagccaggcccagcagatgggagaggaggacaaggagtatgtgtgtgtgaagtgctgtgccgaggaggacaagaagacagagatcctggaccctgacaccctggagaaccaggccaccgtggagttccacagcggggacaagaccatggagtgtgagaagctgggcctgagcaagcacaccaccaatgacaggaccaagtacattgatgacacagtgaagcacaaggtgaagatcctgaagcgggagagcggggagggcaggaacagcagtgactgccgggacaatgagatcaagaagtggcagctggcccccctgaggaagatgggccagcctgtgctgccccggcgcagcagcgaggagaagtctgagaagatccccaaggagagcaccaccgtgacctgcaccggggagaaggccagcaagccaggcacccatgagaagcaggagatgaagaagaagaaggtggagaagggcgtgctgaatgtgcaccctgctgccagcgccagcaagcccagcgctgaccagatccggcagagcgtgcgccacagcctgaaggacatcctgatgaagaggctgacagacagcaacctgaaggtgcctgaggagaaggccgccaaggtggccaccaagattgagaaggagctgttctccttcttccgggacacagatgccaagtacaagaacaagtaccgcagcctgatgttcaacctgaaggaccccaagaacaacatcctcttcaagaaggtgctgaagggggaggtgaccccagaccacctgatccgcatgagccctgaggagctggccagcaaggagctggccgcctggaggcggcgggagaacagacacaccatcgagatgattgagaaggagcagcgggaggtggagcggcggcccatcaccaagatcacccacaagggggagattgaaattgaaagtgatgcccccatgaaggagcaggaggccgccatggagatccaggagcctgctgccaacaagagcctggagaagccagagggcagcgagaagcagaaggaggaggtggacagcatgagcaaggacaccaccagccagcaccggcagcacctgtttgacctgaactgcaagatctgcatcggccgcatggcccctcctgtggatgacctgagccccaagaaggtgaaggtggtggtgggcgtggccaggaagcacagcgacaatgaggccgagagcattgctgatgccctgagcagcaccagcaacatcctggccagcgagttctttgaggaggagaagcaggagagccccaagagcaccttctccccagcccccaggcctgagatgcctggcaccgtggaggtggagagcaccttcctggcccggctgaacttcatctggaagggcttcatcaacatgcccagcgtggccaagtttgtgaccaaggcctaccctgtgtctggcagccctgagtacctgacagaggacctgcctgacagcatccaggtgggcggccgcatcagcccccagacagtgtgggactatgtggagaagatcaaggccagcggcaccaaggagatctgtgtggtgcgcttcacccctgtgacagaggaggaccagatctcctacaccctgctgtttgcctacttcagcagcaggaagagatatggagtggccgccaacaacatgaagcaggtgaaggacatgtacctgatccccctgggcgccacagacaagatcccccaccccctggtgccctttgatggccctggcctggagctgcaccggcccaacctgctgctgggcctcatcatccggcagaagctgaagaggcagcacagcgcctgtgccagcaccagccacatcgccgagaccccagagagcgccccacccatcgccctgcccccagacaagaagagcaagattgaggtgtccacagaggaggcccctgaggaggagaatgacttcttcaacagcttcaccaccgtgctgcacaagcagaggaacaagccccagcagaacctgcaggaggacctgcccacagctgtggagcccctgatggaggtgaccaagcaggagccccccaagcccctgcgcttcctgcccggggtgctgattggctgggagaaccagcccaccaccctggagctggccaacaagcccctgcctgtggatgacatcctgcagagcctgctgggcaccaccggccaggtgtatgaccaggcccagagcgtgatggagcagaacacagtgaaggagatccccttcctgaatgagcagaccaacagcaagattgagaagacagacaacgtggaggtgacagatggagagaacaaggagatcaaggtgaaggtggacaacatcagcgagagcacagacaagtctgctgagattgagacctctgtggtgggcagcagcagcatctctgctggcagcctgaccagcctgagcctgcggggcaagcccccagatgtgtccacagaggccttcctgaccaacctgagcatccagagcaagcaggaggagaccgtggagagcaaggagaagaccctgaagaggcagctgcaggaggaccaggagaacaacctgcaggacaaccagaccagcaacagcagcccctgccgcagcaatgtgggcaagggcaacattgatggaaatgtgtcctgcagcgagaacctggtggccaacacagcccggagcccccagttcatcaacctgaagagggacccccggcaggccgccggccgcagccagcctgtgaccaccagcgagagcaaggatggagacagctgcagaaatggagagaagcacatgctgcccggcctgagccacaacaaggagcacctgacagagcagatcaacgtggaggagaagctgtgcagcgctgagaagaacagctgtgtgcagcagagcgacaacctgaaggtggcccagaacagccccagcgtggagaacatccagaccagccaggccgagcaggccaagcccctgcaggaggacatcctgatgcagaacatcgagaccgtgcaccccttcagaagaggcagcgctgtggccaccagccactttgaggtgggcaacacctgccccagcgagttccccagcaagagcatcaccttcaccagccgcagcaccagccccaggaccagcaccaacttcagccccatgaggccccagcagcccaacctgcagcacctgaagagcagccccccaggcttccccttccctggcccccccaacttccccccccagagcatgtttggcttccccccccacctgcccccacccctgctgcccccacctggctttggatttgcccagaaccccatggtgccctggccccctgtggtgcacctgcccggccagccccagaggatgatgggccccctgagccaggccagccgctacatcggcccccagaacttctaccaggtgaaggacatcagaagacctgagaggaggcacagcgacccctggggccggcaggaccagcagcagctggaccggcccttcaacagaggaaaaggagaccggcagcgcttctacagcgacagccaccacctgaagcgggagagacatgagaaggagtgggagcaggagagcgagcggcacagaagaagagacaggagccaggacaaggaccgggacaggaagagccgggaggagggccacaaggacaaggagcgggcccggctgagccacggggaccggggcacagatggcaaggccagccgggacagcagaaatgtggacaagaagccagacaagcccaagtctgaggactatgagaaggacaaggagcgggagaagagcaagcaccgggagggggagaaggaccgggaccgctaccacaaggaccgggaccacacagacaggaccaagagcaagaggtag

SEQ ID NO: 184784 - DNA, 6120 bp, Artificial Sequence
  derived and/or modified sequence
atggacatcgtggacaccttcaaccacctgatccccaccgagcacttagacgatgcgcttttcctggggagtaatctggagaatgaggtttgtgaggactttagcgcttcacagaacgtactggaagactctctgaagaacatgctatcagacaaagaccctatgctggggagcgcatctaatcaattctgcttacccgtgttggatagcaatgatcctaatttccagatgccgtgctccaccgttgtgggcttagacgacataatggatgagggagtagttaaagaaagtgggaacgacacgatcgatgaggaagaactcattctccctaaccgcaatctgcgcgataaggtggaagagaacagcgtgcgttcacctcgcaaatcgcctagattgatggcgcaggagcaggtgcgcagtctgcgccagagcacaatcgctaagaggtctaatgccgctccactgtcaaataccaaaaaagcctctggaaagacggtgtctactgcaaaggccggcgtgaagcagccagaacgctcccaggttaaagaagaagtgtgtatgagtctgaagccggagtaccacaaggagaatcgccgatgttctagaaatagtgggcagatcgaggtcgttcctgaagtgtctgtcagctcctctcacagcagcgtgagttcttgcttagagatgaaggacgaggatggcctcgattcaaagcacaagtgtaacaatcccggcgaaatagatgtgcccagtcacgagctgaactgctccctgctgagcgaaacgtgtgtgacgattggcgagaagaaaaacgaggccctgatggaatgcaaagcgaagccagttggatcgccgctgttcaagtttagcgacaaagaggaacacgaacagaacgattcaatctccggcaaaacaggtgagactgtcgtggaggaaatgattgccacgcgaaaagtggagcaggatagcaaggaaacagtgaagctctctcatgaggacgaccacatactggaggatgcagggagctccgacataagctccgacgccgcctgcactaaccccaacaaaactgagaactcacttgttggccttccctcctgcgttgacgaggtgacggagtgcaatctggagctcaaagatacgatgggcattgcagataaaactgaaaatacccttgaaagaaataagatagaacctctcgggtactgtgaggacgccgagtccaatcgtcagttagagagtacggaattcaataaatcaaatctggaggtcgtggatactagcactttcggtcccgaaagcaacatcctggagaatgctatttgcgacgtgcccgatcagaatagtaagcagcttaatgctattgaatcaactaaaatagagagccacgagactgccaacctccaggatgaccggaattcccagtcaagtagcgtttcatacctagagagcaaatctgtcaagtccaaacataccaagcccgtcattcactccaaacaaaacatgacgaccgatgcccctaagaaaattgtggcggcgaagtacgaagttatccactctaaaacaaaggtaaatgtgaagtctgtcaagagaaatacggatgtgcccgaatcacagcagaattttcaccgtcctgtaaaagtccgcaagaaacaaatagacaaagagcctaagatccaatcctgtaattccggggtaaagagcgtgaaaaatcaggcccactccgtactgaagaaaaccctacaggatcaaactttggtacagatcttcaaaccactcacacacagcctgtcagataaatcgcatgcccatccaggttgcctgaaggaacctcatcaccccgctcagacaggacacgtgagccactcatctcagaagcagtgtcacaagccccagcaacaggcacctgccatgaagaccaacagtcatgtgaaggaagaactggaacacccgggagtagaacacttcaaggaggaagataagttgaagctgaaaaagcctgagaagaatcttcagccccggcaaagacgttcctccaagagtttttccctcgacgaacctccattgttcatccccgataatatcgcgacgatccgccgggaggggtctgatcattcgagctcatttgagtctaagtatatgtggacaccttcaaagcagtgcggattctgcaagaaaccacacggcaatagatttatggtggggtgtggcagatgtgacgactggttccacggtgactgtgtaggactgtcactgtctcaggcccagcaaatgggggaggaggacaaggagtatgtgtgcgtgaagtgctgcgccgaagaggacaagaagaccgagatactggatccagacactctggaaaatcaggccaccgttgaattccactccggtgataaaaccatggagtgtgaaaagctcggcttatccaaacatacaaccaacgaccggacaaagtacattgacgataccgtgaagcataaggtgaagattctcaaaagagagtccggcgaggggaggaactcgtccgactgtagagataacgaaattaagaaatggcagctggccccactgagaaagatgggccagccggtgctgccaagacggtccagtgaggaaaagtctgaaaaaattccaaaagagtcgacaaccgtcacctgtaccggtgagaaggcctcgaaacccggtactcatgagaagcaggagatgaaaaaaaaaaaagttgaaaaaggagtcctaaatgtccacccggccgctagcgccagtaaacccagcgctgaccaaatccggcagtctgtcaggcacagcttaaaggacattctgatgaaacggttgaccgactcgaatctaaaagtgccagaggagaaggctgccaaggtcgctaccaaaatagaaaaggagcttttctcttttttcagggatacagatgcaaaatacaaaaacaagtataggagtctcatgtttaacctgaaagatcccaagaataacatcctgtttaagaaggtactgaagggagaggtcactcccgaccaccttattagaatgtcaccggaggaactagcaagtaaggagctggctgcatggagaaggcgcgagaacagacatacaatagaaatgattgagaaggaacagcgcgaggtggaaagaaggcctatcactaagataacccacaagggagaaatcgaaatcgagtctgatgcgccaatgaaagagcaggaagccgctatggaaattcaggagcctgcggccaataaatccctggaaaagcccgaaggatccgagaaacagaaggaggaggtggattcgatgagtaaggacactacttcccaacaccggcagcatctctttgacctgaactgcaaaatttgcattgggcgcatggctcctccagtggacgatctgtcgcccaaaaaggtcaaggttgtggtgggagtcgccagaaaacactccgataacgaggctgaatctattgccgatgccctctccagtacatccaacatattagctagcgaattctttgaggaagaaaaacaagagagccctaagagcacgttctcgcccgctccccggcctgagatgcctggaactgtcgaagtggaaagcacatttctagcgagactgaacttcatctggaaaggtttcataaacatgccttccgtcgccaaatttgtcacaaaagcttacccggtctcaggtagccctgagtacctcacggaagacctccccgacagtatacaagtggggggacgcatctcacctcaaacagtctgggactatgttgaaaagattaaggctagcggcacaaaggaaatctgtgtagtccgattcacccctgtgactgaggaggatcagatcagttacaccctcctctttgcgtacttctctagccggaagcgctacggcgtggcagccaataacatgaagcaggtcaaggatatgtacctcattcctctgggggccacagacaagattccccaccccctagtgccattcgacggtcccggtttagaactgcacaggcccaacctgttgctgggcctgataattcgccagaagctgaagcggcaacatagcgcttgcgcctctacttcccacatcgccgaaacccctgagtccgctcctcccattgcccttccccccgacaagaaatccaagatcgaagttagtactgaagaagcccctgaagaagagaacgactttttcaactcctttacaaccgtgttgcacaagcaacgcaataagcctcaacagaatctgcaggaagatctcccaactgccgttgagcccctgatggaggtcacaaaacaggagccccccaaaccactcaggtttctgcctggagtacttatcgggtgggaaaatcagccaacgaccctcgagctggccaacaagccattgccagtcgacgatatcctacagtcactgctggggaccacagggcaagtgtacgaccaggcccagagcgttatggagcagaataccgttaaggagataccattcctgaacgagcagaccaactctaaaatcgaaaaaactgataatgtcgaagtaactgatggggagaataaagaaataaaagttaaagttgataatattagtgaatcaacagataagagtgctgagattgagacctcagttgtcgggtcgtcttctatttccgcaggctcactgaccagcctatccctgcgtggaaagcctcctgatgtgtcaacagaagcctttttaacgaacctgagcattcaaagtaaacaggaggagaccgtcgagagtaaagaaaagaccctgaagcggcagctgcaggaagatcaggagaacaatttgcaggacaaccaaacatcaaattcatctccatgtagaagcaatgtgggcaaaggcaacatagatggaaacgtgtcctgctccgaaaacttggtggccaacactgctaggtcaccccaatttatcaacctgaagcgtgatcctcggcaggccgctggcagaagtcagccagttactacttcagaatcaaaggacggcgactcctgtcggaatggagaaaaacacatgctgcccggcctcagtcataacaaggagcatctgaccgagcagattaacgtcgaggaaaagctgtgtagtgcggaaaaaaactcctgcgtccagcagtccgacaatctgaaggttgcccaaaacagtccgagcgtcgagaatatccagacctctcaggcggagcaagcaaagcccctgcaagaggacattcttatgcagaatatagagaccgttcatcctttccgcagagggtccgccgtggcaacctcccattttgaagtaggtaatacatgtccgagcgaatttccctctaagtccattacctttactagccgctctacctctcctaggacgtcaactaatttctcacccatgagaccccaacagcccaatctgcagcatcttaaatcctctccgcctggcttcccattccccggtccaccgaacttccctcctcaatcgatgtttgggttccctccacacctgccccccccactgctgcctccaccgggattcggcttcgcacaaaatccaatggtcccctggcctcctgtggtgcaccttccgggtcagccccaacgcatgatgggcccgctcagccaagcctctagatatatcgggccccaaaatttttatcaggttaaggatattcgcaggccagagagacggcattctgacccctggggcagacaggaccagcagcagctggatcgccctttcaacagggggaagggagaccggcagcgtttctattctgacagtcaccacctgaagcgggagagacacgagaaagaatgggagcaggaatccgaacgacacagaagacgcgacaggtcccaggataaagaccgggataggaaaagtagagaggaaggtcataaggataaggagagagctcgcctgtcgcatggcgatcgcggtaccgatgggaaggcttccagggactcacgcaacgttgacaaaaagcctgataagcctaaatccgaagattatgagaaggataaagagagagaaaaaagcaaacacagggagggggagaaagacagggatcgttaccacaaggatagggaccacacggatagaaccaaaagtaaacgatag

SEQ ID NO: 184785 - DNA, 6120 bp, Artificial Sequence
  derived and/or modified sequence
atggacatcgtggacaccttcaaccacctgatccccaccgagcacctcgacgatgcccttttccttggtagtaatctggaaaacgaggtgtgtgaagatttctccgccagccagaacgttctggaggactccctgaaaaacatgctgagtgacaaggacccaatgctgggaagtgcttctaatcagttctgtctgcctgttctcgactccaacgaccctaatttccagatgccgtgcagtaccgtggtaggtctcgatgacatcatggatgaaggagtggtaaaagaatctggcaacgacaccattgatgaggaggaactaatcctgcccaatcgtaatctaagggacaaagtagaggaaaattcagtgcggtcaccgcggaagtccccgcggctgatggcacaagagcaagtgcggtctcttagacagtcaaccattgctaagaggtctaacgccgccccgcttagcaatacaaagaaggccagcggaaagacagtcagcacagctaaggctggggttaaacaaccagaaaggagccaagttaaagaggaggtgtgcatgagccttaagccagagtatcacaaggagaatcgtaggtgctcccgcaactcaggtcaaattgaagtggtccccgaggtttcagtgtcttcatctcacagctccgtgtcgtcatgtctggagatgaaagacgaagacggactagactctaagcacaaatgtaataatccgggtgagatcgacgttcccagtcatgagctgaactgttccttgctctctgagacatgtgtgactataggcgagaagaaaaacgaggctcttatggagtgtaaggcaaagcctgtcggatccccactttttaaattttctgacaaagaggagcatgagcagaacgacagcatttctggcaaaactggggaaaccgtggtggaggaaatgattgcgacaaggaaggtggagcaagattccaaggagacagtaaaacttagccacgaggacgaccacatactggaggacgccggctctagcgatattagttctgacgcagcctgtacaaatcctaataagacggaaaattcgcttgtgggactgccctcttgcgttgacgaggtgaccgaatgcaatttggaactgaaggacacaatgggcatcgcagataagactgagaataccctagaacgcaataagattgaaccactggggtattgtgaggacgctgagtctaatagacaacttgagtcaacggaatttaataagtccaatctggaggtggttgatacgtcgacttttggtccagagagtaatattctggaaaatgccatttgtgatgtccctgatcaaaatagcaaacagctgaacgcgatcgagtctaccaagatagagagccacgagaccgcaaacttacaggatgatcgcaatagccaaagttcaagcgtgtcatacctggaatctaagtccgtgaaatccaagcacacaaaaccagtcatccactccaagcagaacatgacaactgacgcccccaagaaaatcgtcgccgccaagtacgaggtgatacatagcaaaaccaaggttaatgtgaagtcagtcaagcgtaataccgacgtgcccgaatctcagcagaacttccataggccagtcaaagtccgtaagaagcagatagataaggaaccgaagatccaaagttgtaattctggcgttaagagcgttaagaaccaggcacattccgtcctcaagaaaacactgcaggaccagacgctggtgcagatcttcaagccccttacccattccttgtccgacaaaagtcacgctcaccccggatgcctgaaggaacctcatcaccccgcccaaacaggtcatgtgagtcacagcagtcagaaacagtgtcacaagccccagcagcaggcccctgctatgaagaccaatagtcatgtcaaggaggagctcgaacatcccggcgtggagcactttaaggaggaggataagctgaagctgaagaagccagagaaaaacctgcaaccgaggcagagaagatctagtaagagcttcagcctcgacgaaccgcccttgtttatacctgataacattgcaacaatcagaagagagggctctgaccatagctcttcctttgaatctaaatatatgtggacgccctcgaaacagtgcggattttgcaaaaagcctcatggaaacagattcatggtagggtgtgggaggtgtgacgactggtttcatggggattgcgtcggcctctctctgtcccaggcccagcagatgggtgaggaggacaaggagtacgtgtgcgtcaaatgttgtgcagaggaggacaagaagactgagatcctggaccccgatactttagagaaccaggcaaccgtggagttccattccggagataagacgatggagtgcgaaaagttggggttatccaaacacacaacgaacgatagaactaaatacatagacgacacagtgaaacacaaggtgaaaatccttaaacgagagtcgggggaggggcgtaactcaagcgattgtcgggacaacgagattaagaagtggcaactggcccccctccgaaagatgggtcagcctgtgctgcctaggaggagctccgaggagaagagcgaaaagatccccaaagagagcaccacagtcacttgcacaggcgagaaagcctcaaaaccaggaacccatgagaaacaggagatgaagaaaaagaaggtcgaaaagggtgttctgaacgttcacccagcggcctccgcctccaagccatcagccgatcagatacggcaaagcgtcaggcattccttaaaggatattctcatgaaaaggctcacggacagtaaccttaaagtacctgaggaaaaagcggccaaagtggcaactaagattgagaaggagctattttctttttttagagacaccgacgctaagtacaaaaacaaataccggtcgcttatgttcaatctgaaggaccctaagaataatattctgtttaagaaggttctgaaaggggaggtcacccccgaccacttgattcgaatgtcgccagaagagcttgccagcaaggagctcgcggcgtggaggaggagggaaaacagacacacaattgagatgatcgagaaggagcagcgggaggtcgagaggcgccccatcactaagatcacccacaagggcgaaatagagatcgagagcgatgccccaatgaaagagcaggaagcagccatggagattcaggaacctgcagcaaacaagtcactggaaaaacctgagggctccgaaaagcagaaggaagaagtggacagtatgagcaaggatacaactagccagcacaggcagcacttatttgacctgaactgtaaaatctgcatcggtagaatggcgcctccagtggacgacctctcacctaagaaagtcaaagtggttgtgggggtcgcgaggaagcatagcgacaacgaagccgaaagcattgctgatgctctgagttctacctccaacatacttgcctccgagttttttgaggaggaaaagcaggaatcacctaagtctaccttttctcctgctccccgacccgagatgcccgggacagtcgaagttgaatcaactttcctcgctaggctcaatttcatatggaagggctttattaacatgccctctgttgccaagtttgtcacaaaagcatatccagtgagcggaagccctgagtaccttactgaggacctacccgatagtatccaggtcggaggaaggatctcgcctcagaccgtttgggattatgttgagaaaatcaaagcctccggtacaaaggaaatttgcgtggtacgcttcactccagtcacagaagaagaccaaatctcatacacattgctgttcgcttacttttcgtctcggaaacgctacggagttgccgcaaacaacatgaaacaggtgaaagacatgtatttgatacctctgggcgccacagacaagatcccacatccactggtgccatttgacggtccaggactggagcttcaccgccctaatctgctcctcggattgatcatcagacagaagttgaagaggcagcacagcgcctgcgccagtacctctcacatcgcagaaacccctgagtccgccccacccatcgctctgccccctgataaaaagtctaagatagaagtgtcaacagaggaagcccccgaggaagagaacgatttctttaactccttcaccacggtgctgcataaacagcgcaacaaaccccagcagaacctacaggaagacctgcctacggcagtggaacccttgatggaggttacaaaacaggaacctccgaagcctcttagatttctgcccggggtgcttatcgggtgggaaaatcagccaacaacgctggagctcgccaacaagcctctgcctgtggatgatatcttgcagagcctgcttggcacaacgggccaggtgtacgatcaagctcaatccgttatggagcaaaacacagtaaaagagataccattccttaatgagcagaccaacagcaaaatcgaaaaaacggataacgtggaggtcactgacggtgaaaataaggaaatcaaagtaaaagtcgacaatattagtgagtccactgataagtcagccgagatagagacctccgtcgtcggatcttcttccatcagcgccgggagtctgacgtctctgtctctccgcggcaaacctcctgacgtgagcacggaagcattccttactaacctctctatccagtcaaagcaagaagaaaccgtcgagagcaaagaaaagacattaaagaggcagctccaagaggatcaagagaacaatctccaggataatcagacctccaattcttctccatgcaggtccaatgtgggcaagggcaacatcgatgggaacgtctcctgttcagaaaatctggtggccaacactgcccgctcccctcagtttattaaccttaagcgtgacccacggcaggcggcaggaagaagtcagcctgttaccacgagcgagagcaaagacggcgacagctgtcgcaatggagaaaagcacatgctgcccgggctgagccataataaggagcacttgacagagcagatcaacgtggaagagaagctgtgcagtgccgagaaaaatagctgcgtgcagcagtccgataatctgaaggtagcacaaaattcacctagcgtcgaaaatattcaaacctctcaggctgaacaagctaagccactgcaggaggatattcttatgcagaatattgagaccgttcacccctttaggcggggcagtgcggtggcgacaagccattttgaagtgggaaatacctgcccatccgaattccctagcaagtccatcacttttacgtcaagaagtacatccccccggaccagcacaaacttttcccctatgcggccccaacagccgaacctccaacatctcaaaagctctcctcccggttttccctttccgggtcccccaaacttcccaccgcagagcatgttcggtttcccaccccacctaccgccgcccttactgcccccccccggattcggtttcgcccaaaatcccatggtcccgtggccacccgtggtccacctgccaggccagccacagcgcatgatggggcctctatctcaagcctcacgttacatcggtccgcagaacttttatcaggtgaaagacatccggcgccctgaaagaagacatagcgacccttggggccggcaggatcagcagcaactcgacagaccttttaataggggcaaaggagaccggcagaggttctattccgactctcaccacctgaaacgtgagcgtcacgaaaaagagtgggagcaggagtccgagcggcacaggcggcgggataggtcacaggataaggatcgggaccgtaagagtcgggaagagggccacaaggacaaagaacgagccagactgtctcacggggaccggggcactgacgggaaagcatctcgcgacagccggaatgtcgacaaaaagcccgataaacctaaatcggaagattatgagaaagacaaggaacgagagaagagcaaacatcgagagggcgagaaggatagagatcggtatcacaaggacagggatcacacggatcgaaccaagagtaagaggtag

SEQ ID NO: 184786 - DNA, 6120 bp, Artificial Sequence
  derived and/or modified sequence
atggatatcgtcgacaccttcaaccacttgattcctacggaacacctcgatgacgccctgtttctgggttcaaacctagaaaatgaagtctgtgaggatttctcagcatctcagaatgtgctagaggacagcttgaagaatatgctctccgataaggatcctatgctgggatccgcttctaatcagttctgtctacccgtcctcgatagcaacgatcccaactttcagatgccatgctctacagtggtgggattggatgatattatggatgagggagtcgtaaaagagagtggtaacgacacgatcgacgaagaagagttgatcctccctaatcgcaacctgcgagacaaggtcgaagaaaattccgtcaggagcccgcgtaagtccccaaggctgatggctcaagaacaggtgcgatccttgaggcagagtaccatcgctaaacgttccaacgccgctccgctgtccaatactaagaaagcctccggaaagaccgtatctaccgccaaggctggggtgaagcagccagaacgttcacaggttaaggaggaggtgtgtatgtccctgaagccagagtaccacaaggaaaaccggaggtgcagtagaaatagtggacagattgaggtggttcccgaagtgagcgtgtcatccagccactcttctgtgagctcctgtcttgagatgaaagacgaggatggactcgattcaaagcacaagtgcaacaatccgggagaaatcgatgtaccgtcacacgagctgaactgctctctcctgtccgagacgtgtgtgactattggtgagaagaagaatgaggcgctgatggagtgcaaggccaagcccgtgggctcccctttgttcaagttctcggacaaagaggagcacgaacagaatgatagtatctcgggaaaaaccggggaaacagtggtggaagaaatgatcgctacacgcaaggtggaacaggatagcaaggagacagtgaagctgagccacgaggacgaccatatcttagaggatgccggaagttccgacattagcagtgacgccgcttgtacaaaccctaataaaactgagaattccctggtggggctgccctcctgcgtggacgaggtgaccgagtgtaacctggagctgaaggatacgatgggtatagccgacaagaccgaaaacacgctggaacggaacaagatcgaaccgttgggttattgcgaggatgctgaatctaaccgtcagctggaaagtactgagttcaacaagagcaatctggaggtggtggacaccagcacttttgggccagaatctaacatactggaaaacgccatatgtgacgttccggatcagaactcaaagcagcttaatgctatcgaatccaccaagatcgaatctcatgaaaccgccaatctgcaggatgacaggaactctcagagcagcagtgtgagctatctggaatctaaaagcgtcaagtccaagcatacaaagcctgtaatccatagcaaacagaacatgaccactgacgctcctaagaagatcgtcgccgcaaagtacgaggtcattcattccaaaacgaaggttaatgtaaaatctgttaagcggaatacagacgtgccggaatcgcagcagaactttcacaggcctgtaaaggtacgaaagaaacaaatagataaagagcccaaaatccagtcctgtaatagtggggtgaagtccgtcaaaaaccaggcccacagcgtcttaaagaagaccctgcaggaccaaaccctggtacagattttcaaaccactcacacacagcttgagcgacaagagccacgcacatcccggatgtcttaaagaaccccaccatcccgctcaaacgggccatgtttcccacagtagccaaaagcagtgtcataagccccagcagcaggctcccgctatgaagaccaattctcacgtgaaagaggaactggaacatccaggcgtagaacactttaaagaggaggataaacttaagctgaagaagcccgaaaaaaatcttcagcccagacagaggcggtcttccaagtccttcagcctagacgagccaccactcttcatccctgacaacattgccactatacggagagagggttccgaccactcttcttcttttgagtccaagtatatgtggactccttccaaacagtgcggtttctgcaaaaagccccacggcaaccgtttcatggtcggatgtggtcggtgcgatgactggtttcatggcgactgtgttggactcagcctttctcaggcacagcagatgggtgaagaggacaaggagtatgtgtgtgtgaagtgttgcgcggaagaggacaaaaagacagaaatcctcgaccctgacaccctggaaaaccaggctacagtggaatttcacagcggggacaaaacaatggaatgtgaaaaacttggtttgagcaagcatactacaaacgataggaccaagtatatcgacgatacggtgaagcataaggtaaagatcctgaagcgcgaaagcggcgagggacgcaacagttctgattgtcgggataacgagataaaaaagtggcagctcgcccctctgaggaagatggggcaacccgtcctgccacggcgtagctccgaggagaagagtgagaaaattccaaaggaaagcaccacagtgacatgcacgggagaaaaggcgagtaagccgggaacccacgaaaagcaggagatgaagaaaaagaaggtcgagaagggagtgcttaacgtgcacccggcagcctctgcaagtaagcccagcgcggatcagatacgtcagtccgttcgccactccctgaaggatattctgatgaagcgtcttactgactcaaatttgaaggtgcccgaggaaaaggctgccaaggttgccacaaagatcgagaaggagctgttttcattcttccgggacacagacgcgaagtacaagaacaagtaccgctccctgatgtttaaccttaaggaccctaaaaacaacatactattcaaaaaggttctcaagggcgaggtgacaccagaccatttaatcagaatgtctccagaagaactagctagcaaggagctcgctgcgtggcgtagacgggaaaaccgccatacgatcgaaatgattgagaaggagcagagagaagtagaacggagacccataacaaagatcacacacaagggcgagattgaaatagagtccgatgcaccgatgaaggagcaggaggcggcaatggagattcaggagccggctgctaataagagtctggagaaacctgagggatcagaaaaacagaaggaagaagtagactctatgagtaaggatacgacatcccagcataggcagcacctgttcgatttgaactgcaaaatctgcattgggagaatggccccacccgtggacgatctcagccccaaaaaagtgaaagtagtggttggggtggcgcgtaagcatagtgataatgaggccgagtcaatcgcagacgccttgtcttctacctcaaatatcctggccagtgagttcttcgaagaggagaagcaagaatcaccaaaatccacattctcacccgcacctagaccagaaatgccaggcactgtcgaagtcgagtcaacttttctcgcacgcctaaacttcatttggaagggttttattaacatgccatccgttgccaagtttgtgactaaggcctatcctgtttccgggagtccagaatatttgaccgaggacttgcctgactctatccaagtcgggggtcggatcagcccacagaccgtatgggactatgtagagaagatcaaggcctccgggacaaaggagatctgtgtcgtgagattcacgccagtcacggaggaggaccagatctcctacaccctgctcttcgcatactttagctctcggaaacgttacggcgtggctgccaataacatgaaacaagtgaaggacatgtacctgataccactgggagccaccgacaaaatccctcatcctctcgtgccttttgacggacccggtctcgagttacatcgccctaacttgctactagggcttataattagacagaagctgaaacgccaacacagtgcctgcgcatcaacctcacacatagcggagacccccgaaagcgcaccgcctatcgcgctgcctccggacaaaaaatctaagatcgaagtgtctaccgaagaagccccagaagaggagaacgattttttcaatagttttaccaccgtgctgcataaacaaaggaataaaccgcagcagaacctgcaagaagatttaccaacagccgttgagccattaatggaagtcactaaacaagagccaccgaaacccctgaggtttcttccaggtgtcttaataggatgggagaatcagcccacaacactggaattagcaaacaagccccttcctgtggacgacatcctccaatctctgctgggcactacgggacaggtctatgaccaggctcagtcagtgatggaacaaaataccgtcaaggagatacccttcctcaatgaacagaccaattctaaaatcgagaagacagataatgtcgaagtcactgatggtgagaacaaggaaatcaaggtcaaggttgacaacataagcgaaagcacagataaaagtgcggagatcgagacttctgtagtgggctcctcctctatttctgctggatccttgacttctttgagtctccggggaaaacctccagacgtctcaaccgaggcctttttaacaaacctgagcattcagtccaagcaagaagaaaccgtggagtctaaggagaagaccttaaagcgacagttacaggaggatcaggagaacaatctgcaggacaatcagaccagtaattctagcccgtgcagatcaaatgtgggaaaggggaatatagacggtaacgtgagctgctctgagaatctggtcgccaacacagctcgctcgccacagtttatcaatctgaagcgagacccccgacaggccgcaggcaggtcgcagcccgttacaacgagtgaaagtaaggacggagactcctgccgaaacggggagaaacacatgctgcccggactgtcacataacaaggaacatctgacagaacagatcaatgtggaggaaaaactgtgtagcgccgagaagaactcgtgtgtacagcagtctgacaatcttaaggttgcgcaaaatagcccgagcgtggaaaatatccagacatcgcaggcggagcaggcaaagcctctgcaagaggacatacttatgcagaatatcgaaacagtgcacccatttcgtagaggtagcgctgtggccactagccattttgaggtcggcaatacttgtccctctgagtttccaagcaaaagtataacctttacaagccgcagcacttcaccaaggacatcaaccaatttctcccccatgcgaccacagcagccaaacctacagcatctgaagtcttctcctcccggtttcccctttcctggaccccctaactttcctccgcagagtatgtttggtttcccccctcatctcccccctcccctgctgcctccccctggcttcggctttgctcagaaccccatggtgccgtggccacccgtggtccacctgccaggccagccacagcggatgatgggtcccctctcccaagcttctcggtatatcgggcctcagaatttctatcaggttaaagacatccggaggcctgagaggcggcactcagatccttgggggagacaagaccagcaacagctggaccgcccttttaaccgcggaaagggggatcgtcagcgcttttacagtgactcacatcacctcaaacgtgaacgccacgagaaggaatgggagcaggaatcagagagacacaggaggcgcgatcggagccaagataaggaccgggatcggaagtcacgcgaagaaggccataaggataaagaacgtgccagactctctcatggggacagggggacggacggcaaggccagtagggactctagaaacgtggacaagaagcccgacaaacccaaaagcgaagattatgagaaggacaaggaacgggagaagtctaaacatagagagggcgaaaaggatcgagatcggtatcacaaagatagggatcatacagacagaaccaaatctaaacgttaa

SEQ ID NO: 184787 - DNA, 6119 bp, Artificial Sequence
  derived and/or modified sequence
atggacatcgtggacaccttcaatcatctcattcccactgagcatctcgatgacgctctgtttctcggatccaacctagagaacgaagtctgcgaggatttctctgctagccagaacgtgctggaagactcccttaaaaatatgctctccgataaagaccccatgctcgggtctgcaagtaatcagttttgcctacccgtgctggacagcaatgaccctaatttccaaatgccctgttctaccgtcgtcggactggacgatatcatggacgaaggcgtcgtcaaggaatctggaaacgacacgatcgatgaagaggagctcatcttacccaaccgcaacctccgcgataaagtcgaagagaatagcgtccggtcccccagaaagtctcccaggcttatggcccaggaacaagtgaggtcgctgcggcagtccactatcgccaaacgctcgaacgcggctccattgtccaatacaaagaaagcatcgggaaagactgtcagtactgctaaagcgggagtgaagcagcccgagcgcagtcaggtcaaagaagaagtttgtatgagcctcaaaccagaataccacaaagagaatcggaggtgctctagaaattctggacagatcgaggttgtccccgaagtctctgttagtagctcacattcgagcgtgagttcttgcctggaaatgaaagacgaagatggcctggattcaaagcacaaatgcaataaccccggagagatcgatgtgcccagccacgaacttaactgtagtctgttgagcgaaacttgtgtcacgatcggtgagaaaaagaacgaagcgctaatggaatgcaaggcgaagcctgtgggaagccctctattcaaattttctgacaaagaggagcacgaacagaacgatagcattagcgggaagaccggcgaaaccgtcgtggaggagatgatcgccacccgaaaagttgaacaggatagcaaggaaaccgtgaaattgagccacgaggacgatcatatcctggaagacgccggatcctctgatatcagctctgacgcagcctgtacgaacccaaataaaactgagaactccctggtaggattgccatcgtgcgtggatgaggtcacggaatgcaatctcgaactgaaggacaccatgggcatcgctgataagacggagaatactctcgagcggaacaaaatcgagcccctgggttactgtgaagacgccgagtcaaacaggcagctcgaaagcacagagttcaacaaatccaatctggaggtagtggacaccagcacttttgggcctgagtcgaatattctggagaacgctatttgtgatgtccccgaccagaatagtaagcagttgaatgctatcgaatcaactaagattgaaagtcacgaaactgcaaacctgcaggatgacaggaattcgcagtcttcaagcgtctcctacttggaatccaagtctgtgaaatccaaacacaccaagcctgtcatccacagcaaacagaatatgacgacagacgcccctaaaaaaatcgtggccgcaaagtacgaggtcatccattctaagacaaaagtgaacgtgaaatctgtcaagagaaacaccgatgttcctgaaagccagcagaatttccatcgcccagtcaaagtgcgcaaaaaacagattgataaagagccgaagattcaatcttgtaatagtggcgtcaaatccgtaaaaaatcaggcccactctgtgttgaaaaagaccctgcaggatcagacgttggttcagattttcaaaccactgacccacagcctcagcgacaaaagtcatgcacatcctggctgcctgaaagaacctcatcaccctgcccagaccgggcacgtctcacactcctcacagaagcaatgccacaaacctcaacagcaggcccctgccatgaaaaccaattcacatgtaaaggaggagctcgaacaccccggtgtcgagcacttcaaagaagaagacaaactaaaactcaagaagcccgagaaaaacctccagcccagacagagaagatcttccaagagcttctcccttgatgaaccccctctcttcatccccgacaatattgccaccatccgcagagagggttccgaccatagtagttcctttgagtcaaagtatatgtggacaccctctaaacagtgtggtttttgcaaaaaaccgcatggcaaccgctttatggtggggtgtggacggtgtgacgactggtttcacggagattgcgttggcctctccctgtcccaggcgcaacagatgggtgaggaggacaaggagtacgtgtgcgtgaagtgctgtgctgaggaggacaagaagactgaaattctggacccggataccctggagaatcaggcgactgtcgagttccacagcggagataagacaatggaatgcgagaagctcggattgagcaaacacactaccaatgatagaaccaagtatattgacgacactgtgaaacataaggtgaagatcctgaaaagggaatccggcgaaggtaggaactctagcgattgcagggacaacgagattaagaaatggcagctggccccactccgcaagatgggccaaccggtgcttcctcggagaagctccgaggagaagagcgagaaaatcccaaaggaaagcacgactgtcacctgtaccggtgaaaaggctagtaagcctggtactcacgaaaagcaagagatgaagaaaaagaaagttgaaaagggcgtgcttaacgttcatccagctgcttccgcctccaaacccagtgcagaccagattcgccagtccgttcgccacagcctgaaggacatccttatgaagcgacttactgacagtaatctgaaggttccagaggagaaggcggctaaggtagccaccaaaattgagaaggagctgtttagttttttccgcgacacagatgctaagtataagaataaataccgatctctcatgtttaacctgaaagaccctaagaataacatcttgttcaaaaaggtgctgaaaggtgaggtaaccccggaccatcttataaggatgtcaccagaggagttggcatctaaggagctggcagcatggcgccgaagggaaaaccggcataccatagaaatgatagagaaagaacaacgagaggtggagaggaggcccattacaaaaatcacccataaaggtgaaatcgagattgaatccgatgcaccaatgaaagagcaagaagctgctatggagatccaggaacccgcagcaaacaagagtttggaaaaaccagagggcagtgaaaagcagaaagaagaagtggattctatgtcaaaagataccacaagccagcatcggcagcatctatttgatctgaactgcaagatttgcatcgggagaatggcccctcccgtcgacgatctgtcgccgaaaaaggtgaaggtggtagtgggagtggcacgtaagcattccgacaatgaagcggaatccatagctgatgccctgagcagtaccagcaacattcttgcatccgagttttttgaagaggagaaacaggagtccccgaaaagcacctttagtcctgcacctcggccagaaatgcccggaactgtggaagttgagagcacctttcttgcacgcctgaattttatatggaaaggcttcataaatatgccctctgtcgcaaagttcgtgacgaaagcatacccggtgtctggttcccctgagtatctgacagaagatttgcctgatagtatacaggtggggggtagaataagtccacagaccgtttgggattacgttgaaaagatcaaggcaagcggtactaaagaaatatgcgtggtgaggtttacccccgtcacggaggaggaccagatttcctacacgcttttgttcgcttacttttcttcccgaaagagatatggtgtcgcagccaacaacatgaaacaggttaaagacatgtatctgataccattgggtgccaccgacaagatcccacacccactcgtgccattcgacggcccaggtctggaactgcatcggcctaacctactgctagggcttatcattaggcagaagctgaagcggcagcacagtgcttgtgcctcaacctcccatattgctgaaacccccgaatcggcccctccaatcgccctgcccccagacaaaaaaagcaaaattgaggtttcaacagaagaagccccagaagaggagaatgactttttcaacagtttcaccacggttttgcacaagcaacggaataaaccccaacagaacctccaagaagacttacctaccgcagtggagcccctcatggaagtgaccaagcaggagccacctaaacccctgcgcttcctgcccggagttttgatcggatgggagaaccagccaacaacattagagttggcaaataaaccactccctgtcgatgacatcctccagtccctactcggaaccactggccaagtgtacgaccaagctcagtcggtgatggaacaaaataccgtcaaggagatcccctttcttaacgaacagacaaactctaagatcgagaagaccgataacgtggaggtgacagacggtgagaacaaggagattaaggtgaaggtggataacatcagtgagagcacagataagtcagcggagatcgaaactagcgtcgtagggagcagtagcatttcagcaggatcactcactagtctctccctgcgcggtaagccgcctgatgttagcacagaggccttcctcaccaatttgagtatacagagtaaacaggaggaaacagtagagtccaaggagaaaaccctcaaaagacagctccaggaagatcaagagaataaccttcaggacaaccaaacctctaacagcagcccgtgtcgaagtaacgtgggcaaaggtaacatcgatggtaacgtgagctgcagcgagaatcttgtggctaacacagcccgaagccctcaatttatcaacctcaaacgggaccctaggcaggctgctggcagatcgcaacctgttacaacttccgagtccaaggatggcgatagctgcaggaatggagaaaaacacatgctgcccggtctgagccataataaagagcacctaaccgagcagattaatgttgaggagaaattatgttccgctgagaagaatagttgtgtgcagcagtccgataacttgaaagttgcacagaatagcccgagtgtcgaaaatatccaaacctcacaggctgagcaggcgaagcctctgcaagaggacattctgatgcagaatatcgaaactgtgcacccgttcagacggggatctgcagtggctacctcgcactttgaagtcggtaacacctgccctagcgaattcccaagcaagtccatcaccttcacctctcggagcacttctccaaggacatctaccaatttcagtccgatgagaccccagcaaccgaacctacagcacctgaaaagcagcccgccaggtttccctttccccggtcccccaaatttcccaccacagagtatgttcggtttcccacctcacctacctccgccactgctccctcccccaggcttcggcttcgcccaaaaccccatggtgccctggcctccagtggtccacttacccggtcagccacagagaatgatgggacccctctcacaggcttcccggtacatcggtcctcaaaatttttatcaggtgaaagatatacgacggccagagagacgccacagcgacccatggggccgtcaggaccagcagcaactggacaggccctttaatcgcggtaaaggagacaggcaaaggttttattctgatagtcatcacctgaaacgtgaacgccacgagaaggaatgggaacaggagagtgagcgacataggcgccgagatagatcccaggacaaggatagagatcggaagtctagggaagaaggccataaggataaggagcgagctcggctgagccatggcgaccgtggcacagatgggaaggcttcgagagacagtagaaacgtggacaagaagcctgataagcccaagtctgaagattatgagaaagataaagaacgagaaaaaagcaagcaccgagagggcgagaaagatcgtgataggtatcacaaagatcgagaccataccgatcgcactaagtctaagcgata

SEQ ID NO: 184788 - DNA, 6120 bp, Artificial Sequence
  derived and/or modified sequence
atggacatcgtggacaccttcaaccacctgatccccaccgagcacctggacgacgccctgttcctgggcagcaacctggagaacgaggtgtgcgaggacttcagcgccagccagaacgtgctggaggacagcctgaagaacatgctgagcgacaaggaccccatgctgggcagcgccagcaaccagttctgcctgcccgtgctggacagcaacgaccccaacttccagatgccctgcagcaccgtggtgggcctggacgacatcatggacgagggcgtggtgaaggagagcggcaacgacaccatcgacgaggaggagctgatcctgcccaacagaaacctgagagacaaggtggaggagaacagcgtgagaagccccagaaagagccccagactgatggcccaggagcaggtgagaagcctgagacagagcaccatcgccaagagaagcaacgccgcccccctgagcaacaccaagaaggccagcggcaagaccgtgagcaccgccaaggccggcgtgaagcagcccgagagaagccaggtgaaggaggaggtgtgcatgagcctgaagcccgagtaccacaaggagaacagaagatgcagcagaaacagcggccagatcgaggtggtgcccgaggtgagcgtgagcagcagccacagcagcgtgagcagctgcctggagatgaaggacgaggacggcctggacagcaagcacaagtgcaacaaccccggcgagatcgacgtgcccagccacgagctgaactgcagcctgctgagcgagacctgcgtgaccatcggcgagaagaagaacgaggccctgatggagtgcaaggccaagcccgtgggcagccccctgttcaagttcagcgacaaggaggagcacgagcagaacgacagcatcagcggcaagaccggcgagaccgtggtggaggagatgatcgccaccagaaaggtggagcaggacagcaaggagaccgtgaagctgagccacgaggacgaccacatcctggaggacgccggcagcagcgacatcagcagcgacgccgcctgcaccaaccccaacaagaccgagaacagcctggtgggcctgcccagctgcgtggacgaggtgaccgagtgcaacctggagctgaaggacaccatgggcatcgccgacaagaccgagaacaccctggagagaaacaagatcgagcccctgggctactgcgaggacgccgagagcaacagacagctggagagcaccgagttcaacaagagcaacctggaggtggtggacaccagcaccttcggccccgagagcaacatcctggagaacgccatctgcgacgtgcccgaccagaacagcaagcagctgaacgccatcgagagcaccaagatcgagagccacgagaccgccaacctgcaggacgacagaaacagccagagcagcagcgtgagctacctggagagcaagagcgtgaagagcaagcacaccaagcccgtgatccacagcaagcagaacatgaccaccgacgcccccaagaagatcgtggccgccaagtacgaggtgatccacagcaagaccaaggtgaacgtgaagagcgtgaagagaaacaccgacgtgcccgagagccagcagaacttccacagacccgtgaaggtgagaaagaagcagatcgacaaggagcccaagatccagagctgcaacagcggcgtgaagagcgtgaagaaccaggcccacagcgtgctgaagaagaccctgcaggaccagaccctggtgcagatcttcaagcccctgacccacagcctgagcgacaagagccacgcccaccccggctgcctgaaggagccccaccaccccgcccagaccggccacgtgagccacagcagccagaagcagtgccacaagccccagcagcaggcccccgccatgaagaccaacagccacgtgaaggaggagctggagcaccccggcgtggagcacttcaaggaggaggacaagctgaagctgaagaagcccgagaagaacctgcagcccagacagagaagaagcagcaagagcttcagcctggacgagccccccctgttcatccccgacaacatcgccaccatcagaagagagggcagcgaccacagcagcagcttcgagagcaagtacatgtggacccccagcaagcagtgcggcttctgcaagaagccccacggcaacagattcatggtgggctgcggcagatgcgacgactggttccacggcgactgcgtgggcctgagcctgagccaggcccagcagatgggcgaggaggacaaggagtacgtgtgcgtgaagtgctgcgccgaggaggacaagaagaccgagatcctggaccccgacaccctggagaaccaggccaccgtggagttccacagcggcgacaagaccatggagtgcgagaagctgggcctgagcaagcacaccaccaacgacagaaccaagtacatcgacgacaccgtgaagcacaaggtgaagatcctgaagagagagagcggcgagggcagaaacagcagcgactgcagagacaacgagatcaagaagtggcagctggcccccctgagaaagatgggccagcccgtgctgcccagaagaagcagcgaggagaagagcgagaagatccccaaggagagcaccaccgtgacctgcaccggcgagaaggccagcaagcccggcacccacgagaagcaggagatgaagaagaagaaggtggagaagggcgtgctgaacgtgcaccccgccgccagcgccagcaagcccagcgccgaccagatcagacagagcgtgagacacagcctgaaggacatcctgatgaagagactgaccgacagcaacctgaaggtgcccgaggagaaggccgccaaggtggccaccaagatcgagaaggagctgttcagcttcttcagagacaccgacgccaagtacaagaacaagtacagaagcctgatgttcaacctgaaggaccccaagaacaacatcctgttcaagaaggtgctgaagggcgaggtgacccccgaccacctgatcagaatgagccccgaggagctggccagcaaggagctggccgcctggagaagaagagagaacagacacaccatcgagatgatcgagaaggagcagagagaggtggagagaagacccatcaccaagatcacccacaagggcgagatcgagatcgagagcgacgcccccatgaaggagcaggaggccgccatggagatccaggagcccgccgccaacaagagcctggagaagcccgagggcagcgagaagcagaaggaggaggtggacagcatgagcaaggacaccaccagccagcacagacagcacctgttcgacctgaactgcaagatctgcatcggcagaatggccccccccgtggacgacctgagccccaagaaggtgaaggtggtggtgggcgtggccagaaagcacagcgacaacgaggccgagagcatcgccgacgccctgagcagcaccagcaacatcctggccagcgagttcttcgaggaggagaagcaggagagccccaagagcaccttcagccccgcccccagacccgagatgcccggcaccgtggaggtggagagcaccttcctggccagactgaacttcatctggaagggcttcatcaacatgcccagcgtggccaagttcgtgaccaaggcctaccccgtgagcggcagccccgagtacctgaccgaggacctgcccgacagcatccaggtgggcggcagaatcagcccccagaccgtgtgggactacgtggagaagatcaaggccagcggcaccaaggagatctgcgtggtgagattcacccccgtgaccgaggaggaccagatcagctacaccctgctgttcgcctacttcagcagcagaaagagatacggcgtggccgccaacaacatgaagcaggtgaaggacatgtacctgatccccctgggcgccaccgacaagatcccccaccccctggtgcccttcgacggccccggcctggagctgcacagacccaacctgctgctgggcctgatcatcagacagaagctgaagagacagcacagcgcctgcgccagcaccagccacatcgccgagacccccgagagcgccccccccatcgccctgccccccgacaagaagagcaagatcgaggtgagcaccgaggaggcccccgaggaggagaacgacttcttcaacagcttcaccaccgtgctgcacaagcagagaaacaagccccagcagaacctgcaggaggacctgcccaccgccgtggagcccctgatggaggtgaccaagcaggagccccccaagcccctgagattcctgcccggcgtgctgatcggctgggagaaccagcccaccaccctggagctggccaacaagcccctgcccgtggacgacatcctgcagagcctgctgggcaccaccggccaggtgtacgaccaggcccagagcgtgatggagcagaacaccgtgaaggagatccccttcctgaacgagcagaccaacagcaagatcgagaagaccgacaacgtggaggtgaccgacggcgagaacaaggagatcaaggtgaaggtggacaacatcagcgagagcaccgacaagagcgccgagatcgagaccagcgtggtgggcagcagcagcatcagcgccggcagcctgaccagcctgagcctgagaggcaagccccccgacgtgagcaccgaggccttcctgaccaacctgagcatccagagcaagcaggaggagaccgtggagagcaaggagaagaccctgaagagacagctgcaggaggaccaggagaacaacctgcaggacaaccagaccagcaacagcagcccctgcagaagcaacgtgggcaagggcaacatcgacggcaacgtgagctgcagcgagaacctggtggccaacaccgccagaagcccccagttcatcaacctgaagagagaccccagacaggccgccggcagaagccagcccgtgaccaccagcgagagcaaggacggcgacagctgcagaaacggcgagaagcacatgctgcccggcctgagccacaacaaggagcacctgaccgagcagatcaacgtggaggagaagctgtgcagcgccgagaagaacagctgcgtgcagcagagcgacaacctgaaggtggcccagaacagccccagcgtggagaacatccagaccagccaggccgagcaggccaagcccctgcaggaggacatcctgatgcagaacatcgagaccgtgcaccccttcagaagaggcagcgccgtggccaccagccacttcgaggtgggcaacacctgccccagcgagttccccagcaagagcatcaccttcaccagcagaagcaccagccccagaaccagcaccaacttcagccccatgagaccccagcagcccaacctgcagcacctgaagagcagcccccccggcttccccttccccggcccccccaacttccccccccagagcatgttcggcttccccccccacctgcccccccccctgctgcccccccccggcttcggcttcgcccagaaccccatggtgccctggccccccgtggtgcacctgcccggccagccccagagaatgatgggccccctgagccaggccagcagatacatcggcccccagaacttctaccaggtgaaggacatcagaagacccgagagaagacacagcgacccctggggcagacaggaccagcagcagctggacagacccttcaacagaggcaagggcgacagacagagattctacagcgacagccaccacctgaagagagagagacacgagaaggagtgggagcaggagagcgagagacacagaagaagagacagaagccaggacaaggacagagacagaaagagcagagaggagggccacaaggacaaggagagagccagactgagccacggcgacagaggcaccgacggcaaggccagcagagacagcagaaacgtggacaagaagcccgacaagcccaagagcgaggactacgagaaggacaaggagagagagaagagcaagcacagagagggcgagaaggacagagacagataccacaaggacagagaccacaccgacagaaccaagagcaagagatag

SEQ ID NO: 184789 - protein, 234 aa, Artificial Sequence
  derived and/or modified sequence
MAASRWARKAVVLLCASDLLLLLLLLPPPGSCAAEGSPGTPDESTPPPRKKKKDIRDYNDADMARLLEQWEKDDDIEEGDLPEHKRPSAPVDFSKIDPSKPESILKMTKKGKTLMMFVTVSGSPTEKETEEITSLWQGSLFNANYDVQRFIVGSDRAIFMLRDGSYAWEIKDFLVGQDRCADVTLEGQVYPGKGGGSKEKNKTKQDKGKKKKEGDLKSRSSKEENRAGNKREDL

SEQ ID NO: 184790 - DNA, 705 bp, Artificial Sequence
  derived and/or modified sequence
atggccgcatccagatgggccagaaaagccgtggtcctgctgtgcgcgtcggatctacttctgcttctcttactcctccccccacccggcagttgcgctgccgaaggttcacccgggacacctgatgagtccacaccccccccgcggaagaagaagaaagatatcagggattacaacgacgccgatatggctagactcctggagcaatgggagaaggacgatgacatagaagagggcgatctgcccgagcacaagcgaccatccgctccagttgacttttcaaaaattgatccgagcaagccagagtctattctcaagatgacaaaaaagggtaagacactgatgatgttcgttactgtgagtgggtctccaaccgagaaagaaactgaagagatcacctctctgtggcaggggtctctgttcaatgctaactatgacgtccagagattcatagtcggctccgacagagccatatttatgctcagggacggatcctacgcttgggagattaaagacttcctagtgggacaggaccggtgcgctgatgttacactggaggggcaggtatacccaggtaaaggcggaggttcaaaggagaaaaacaagacaaaacaggacaaaggtaaaaaaaaaaaggagggagaccttaaaagtcggagctctaaggaggaaaatagagctggaaataaaagagaggatctatag

SEQ ID NO: 184791 - DNA, 705 bp, Artificial Sequence
  derived and/or modified sequence
atggccgcaagccgatgggcacggaaggctgtggtcctgctgtgcgctagtgaccttctgctactcctgctgctgctgcctccgcccggaagttgtgccgctgagggaagccccggcaccccagatgaatccactccaccaccgaggaaaaaaaagaaagacattagagactacaacgacgccgatatggctcgactattggaacagtgggagaaggatgatgacatagaggaaggtgacctgccagagcacaaaagaccctctgcaccagtagatttttcgaagatcgacccgagtaaacccgagtctattcttaaaatgaccaagaagggaaagactctgatgatgttcgtgactgtgtcaggctcaccgaccgagaaagagacagaggagatcacaagcctgtggcagggctccctgttcaacgccaactacgatgtgcagaggttcatagtcggctcagatcgagctattttcatgctgcgggatgggtcgtatgcttgggagatcaaggacttcctggtgggacaggatcgttgcgcagatgtcactctcgaagggcaggtgtaccctgggaaaggcggcggctccaaagagaagaacaaaacgaaacaggacaaaggaaagaagaaaaaagaaggcgatctgaaaagcagatcatccaaagaagagaaccgggccggaaacaagcgcgaagacctatag

SEQ ID NO: 184792 - DNA, 705 bp, Artificial Sequence
  derived and/or modified sequence
atggccgccagccgctgggccaggaaggctgtggtgctgctgtgtgccagtgacctgctgctgctgctgctgctgctgcccccacctggcagctgtgccgctgagggcagccctggcaccccagatgagagcaccccaccacccaggaagaagaagaaggacatccgggactacaatgatgctgacatggcccggctgctggagcagtgggagaaggatgatgacatcgaggagggggacctgcctgagcacaagaggcccagcgcccctgtggacttcagcaagattgaccccagcaagccagagagcatcctgaagatgaccaagaagggcaagaccctgatgatgtttgtgacagtgtctggcagccccacagagaaggagacagaggagatcaccagcctgtggcagggcagcctcttcaatgccaactatgatgtgcagcgcttcatcgtgggcagtgaccgggccatcttcatgctgagagatggcagctatgcctgggagatcaaggacttcctggtgggccaggacagatgtgctgatgtgaccctggagggccaggtgtacccaggaaaaggaggcggcagcaaggagaagaacaagaccaagcaggacaagggcaagaagaagaaggagggggacctgaagagccgcagcagcaaggaggagaacagagctggcaacaagcgggaggacctgtag

SEQ ID NO: 184793 - DNA, 4257 bp, Artificial Sequence
  derived and/or modified sequence
aaggcggacaggaaggcgtgtgcaaggcggggtccggcccgcgcaggtcgggtaagcgcgtctagggcgctgcgcggcgcagcgaaaatggcggcttccaggtgggcgcgcaaggccgtggtcctgctttgtgcctctgacctgctgctgctgctgctactgctaccaccgcctgggtcctgcgcggccgaaggctcgcccgggacgcccgacgagtctaccccacctccccggaagaagaagaaggatattcgcgattacaatgatgcagacatggcgcgtcttctggagcaatgggagaaagatgatgacattgaagaaggagatcttccagagcacaagagaccttcagcacctgtcgacttctcaaagatagacccaagcaagcctgaaagcatattgaaaatgacgaaaaaagggaagactctcatgatgtttgtcactgtatcaggaagccctactgagaaggagacagaggaaattacgagcctctggcagggcagccttttcaatgccaactatgacgtccagaggttcattgtgggatcagaccgtgctatcttcatgcttcgcgatgggagctacgcctgggagatcaaggactttttggtcggtcaagacaggtgtgctgatgtaactctggagggccaggtgtaccccggcaaaggaggaggaagcaaagagaaaaataaaacaaagcaagacaagggcaaaaaaaagaaggaaggagatctgaaatctcggtcttccaaggaagaaaatcgagctgggaataaaagagaagacctgtgatggggcagcagtgacgcgctgtggggggacaggtggacgtggagagctctttgcccagctcctggggtgggagtggtctcaggcaactgcacaccggatgacattctagtgtcttctagaaagggtctgccacatgaccagtttgtggtcaaagaattactgcttaataggcttcaagtaagaagacagatgttttctaattaatactggacactgacaaattcatgtttactataaaatctccttacatggaaatgtgactgtgttgctttttcccatttacacttggtgagtcatcaactctactgagattccactcccctccaagcacctgctgtgattgggtggcctgctctgatcagatagcaaattctgatcagagaagactttaaaactcttgacttaattgagtaaactcttcatgccatatacatcattttcattatgttaaaggtaaaatatgctttgtgaactcagatgtctgtagccaggaagccagggtgtgtaaatccaaaatctatgcaggaaatgcggagaatagaaaatatgtcacttgaaatcctaagtagttttgaatttctttgacttgaatcttactcatcagtaagagaactcttggtgtctgtcaggttttatgtggtctgtaaagttaggggttctgttttgtttccttatttaggaaagagtactgctggtgtcgaggggttatatgttccatttaatgtgacagttttaaaggatttaagtagggaatcagagtcctttgcagagtgtgacagacgactcaataacctcatttgtttctaaacatttttctttgataaagtgcctaaatctgtgctttcgtatagagtaacatgatgtgctactgttgatgtctgattttgccgttcatgttagagcctactgtgaataagagttagaacatttatatacagatgtcatttctaagaactaaaattctttgggaaaaaccctcaattgtgattttaataaattaaaagtagcacattacatggttagaaaatgtcagtgttaaagaatggtacaaagtgaaaagtgtatccctctcttgccgccggtggtagcttgtcccagtggaagctgctgttaacaatttgtgcccccacatccccctccctgcccatccaccaaaaaaaagtacatttacttatgtaaatgtacttatggtgatgtatgtttgttttggcctcacagcatctgtttccccttaatttggtagctgctcacatttccctcgaaagaaccacaccctctgcattctcagttctctgctttggatgggacatttgccctgcagtccccccaccctccaggccatgccctctccagggtgaggcctgtgtgatctaccgtactagggtactaggccctgaaagaggcttttcttgttcctcctgcatcttgaacctggagcgggagctgttgtaggccccgcccttggagaagagaactgtctgacagtggggagagagcgccacaccctggtggcataaacgagtccctgaatcatgccgtggctgaaccaagccctgtctgtgggctttttctgttgtactcagggcagtttgatggggttactgtcctgcatagccataatggcccagtataaagcagctgttttgatgagataattgctttaattaagcaaaaggtagcaaagctttcactccgccctgtaccttctgtttccacttaggagccttcccatgtcagaatgtgcagatctgtctcattgtttcctgtgcagtgtgcccccacttcacccagtagtttctgtgtgtctgttatgtactaggtactacaaggtgccaggacggtgtagatacagcctctgctatcgtaaaactcaatgattcggtgggggaagacaaatgtcagtaatgtacaaagtaaaatggcagctgttagaagtatgaaaggggcagggtagggggaggtagaatcttccctgaccaggttaagaaaaccagaggccttctctgagggcaagaggaggagaggagaaatagagtaaggcaggcagaggaaacagtctgagctaagaccctgtggctagaagtggcagagggagaggcagcaggaaggccagcggggaggctggggcccagtgcaggcccaggttggaggagcgtagcacatggagtttggtaggagtttgggacgccctggtggatcttaattgtgatggggtgggtgtgaaaggcagtccaggttgcactggttgcacaggagaagtgatcagaagaggaccccagcaggtgtgagccgtgagctgggaggtgcttcagtagtgcaggccatagctgaaggtgtcctacatcagcagggtgatggtgaggtttgaaccactgtttcactgcatagtccctgctgatggacacttgagtgttcagattttttgctggtatattcagtgctgcagtggacattttcatacaaaatatttcggtacacttttgtttatatctgaaaggtaaattcctagcagtagaattattagagcaaacggaatttaacattttggtgtgtattgccaaattgccctcccaagtggtttagtcagcttacccttgccaacaatagatctatccttgccagccttgggcatcacatttaccagtttaatagattgtaaaaccatatcttaattggctaccctgaagccaccatactggagaggctgcgtacagtgtttcacgtagagagagggatacccaggaggcccacctgctccaaccccagctgcatgagtcttcccagcccaggcacagacatgtggataagatttaaacatttccagccccagccttcaagcaatcctagttgacactgaggggagccaacataagctgagctgagaaacagtctgcccagtctgcagattcatgagcaaaagaaatgttgggctgggtacagtggctcacgcctgtaatcccagtactttgggaggccgaggtgggtggatcagttgaggtcaggagtttgagaccagcctggccaacatggtgaagccctgtctctactaaaaattagccgagtgtggtggtgcgggcctgtaatcccagctactcaggtggctgaggcaggagaatggcttgaacccgggaggcggaggttgcagtgagccaagatcaggccactgcactccagcctggatgacgggatgagactctgtctcaaaaaaacgaaacaaaaattttttaagagaaatgtcatttgtttttgtttttgagacagggtctcactctgttgccctcactagagtgcagtaggatcacggctcactgaagtctctacctaccggctcaattgatcttcccaccacagcctcccaaatagctgggagaaatgtcctgtttttaatgaatttgtcttcctttttgtcttgtttgttttaatatctagtgatctaataaatttggatgatatcttttgactatc

SEQ ID NO: 184794 - DNA, 2941 bp, Artificial Sequence
  derived and/or modified sequence
ggtaagcgcgtctagggcgctgcgcggcgcagcgaaaatggcggcttccaggtgggcgcgcaaggccgtggtcctgctttgtgcctctgacctgctgctgctgctgctactgctaccaccgcctgggtcctgcgcggccgaaggctcgcccgggacgcccgacgagtctaccccacctccccggaagaagaagaaggatattcgcgattacaatgatgcagacatggcgcgtcttctggagcaatgggagaaagatgatgacattgaagaaggagatcttccagagcacaagagaccttcagcacctgtcgacttctcaaagatagacccaagcaagcctgaaagcatattgaaaatgacgaaaaaagggaagactctcatgatgtttgtcactgtatcaggaagccctactgagaaggagacagaggaaattacgagcctctggcagggcagccttttcaatgccaactatgacgtccagaggttcattgtgggatcagaccgtgctatcttcatgcttcgcgatgggagctacgcctgggagatcaaggactttttggtcggtcaagacaggtgtgctgatgtaactctggagggccaggtgtaccccggcaaaggaggaggaagcaaagagaaaaataaaacaaagcaagacaagggcaaaaaaaagaaggaaggagatctgaaatctcggtcttccaaggaagaaaatcgagctgggaataaaagagaagacctgtgatggggcagcagtgacgcgctgtggggggacaggtggacgtggagagctctttgcccagctcctggggtgggagtggtctcaggcaactgcacaccggatgacattctagtgtcttctagaaagggtctgccacatgaccagtttgtggtcaaagaattactgcttaataggcttcaagtaagaagacagatgttttctaattaatactggacactgacaaattcatgtttactataaaatctccttacatggaaatgtgactgtgttgctttttcccatttacacttgacccctgagccccttccagtgctgcctgaggtgccctctacctgtgcctgcctctcgtctgccagtttgatttggacctgtttttcccacctcagcccccatgctcttgtcaaacgtgtttggcctccagccaaacagggcctgggaggaaaagagagtcctgcttctgcctggcttccccatcggggaggggagttgaagtgacagcctcctgacagcttagaaatgtggaggacgcagcaagttctggacatggccagccatatgaatgatatcttctctttctttgaaccatctccacctgctcttatggacaccccgccttggggcaaggcaagggatgggcacaacttggaagattttggctttgtgatcctcagtgtccagtgtcacccagatgggccggaagctgcctttgaagccaacgaatgccatttgctctgaaaagcaatgatgagtctcctgagcaaaagccctatgagaggacggctgccccaccccgttccatggctccccatcgccagccccccacgcccaccaggtaccgcctagccacactgcactgtggccccttgggaagagctctgtgctcagctactgatggtgcctgacatgtgtttgtatggggcaggcagggtctcacctgagcctcactgccacctaggcagggtgatggctttgttgtagacaggggagccatgcacagcaggaaatggggcaaactgtaagggaggagacctcctaggaacctgcctacctttgagctgcccctaggacaaccagcaagtccctgcccctctctgaagcccagtgttcccatccatcaaatgatggcattgatctacaagatctccttccccactctatcactctgtggctctagaaagagttctgagaggtgaagaaatttgaccaagagtgtggagtaaatggtgcaccccagattagaactctaaacccctgaaacccacacagcactctccatcttgcagttcacagcttgagcatccgaggggcatgggaatccacgtctatactcagcccatcttggcaggcaacatgcatttatcaccaccgggaaagtgccattcaacttaggtcaccttacatacatcagcttttggcaaccgggatcttaatttaaaagacagaggctccaaaatgatttcaggactgggctggaaaggatacttctcttttccttatgtcctcctttggctggtttgaagggtttgcattgcttctgatttttctcattgccccatatgatgggtttctgattttgatgttttccatagtgaggatggtgtataactaagaagcccagctttgagttaggaagattaggatccaagtcctaaccttaagcaagtggcttggctgttaaattcttggtgtcctcatcttaaatggaaataatagtacctgctgcacaggttattaatgagtaagtgagataattataacatgttgtgcaaagtgcaaggctgaacattgaatagcaaccacaatgatcattatcattattgcccgtggagcttctctgccgcccatacagcctctctgaggactctccctgcacctagtttttgtgatgataatgggtgtcatgctgacatgtccctcctggatggcttcttccagcacagccagcaagcctgtgctaggcttcaccaccgaagctgcctggccttggacaagccatgtaggttctctgggctttagttttctggaacaaataagagttttgcaagctgcaaaggactgtacaaacgctaggcatcagctagaatgttgaagaagatgcaggacccctggccagtctgaatagcaggaattgggtaggagggtgagactaagccacttttcttatgatacttttgttgaataaagggccactttccaagcaaa

SEQ ID NO: 184795 - DNA, 705 bp, Artificial Sequence
  derived and/or modified sequence
atggccgccagccggtgggcccggaaggccgtggtgctgctgtgcgcctcggacctcctcctactgttactgttgctccctcctcccggatcttgcgccgccgaaggatctcctggtactcctgacgagagtacaccccccccaaggaagaaaaagaaagatatccgcgactataatgacgccgacatggcgaggctcctggaacagtgggagaaggatgatgatatcgaagagggagacttaccagagcataagaggccctctgctccggtggatttttcaaaaatcgatcccagtaagcccgaatccattcttaaaatgactaagaagggcaaaactctgatgatgttcgtaacagtgagcggctcccccacagagaaggagacagaggagatcaccagtctctggcagggttcattgtttaatgccaattacgatgtgcagagatttatagtgggatcagatagagctattttcatgctacgagacggcagctacgcctgggagattaaggatttcctggtaggccaggataggtgtgcggacgtcaccctggagggccaggtttaccccgggaaggggggtggcagtaaggagaaaaataagaccaaacaggataaagggaagaaaaagaaggagggagacctgaagtccaggagctctaaggaagagaatagagctgggaataagcgcgaagatctgtag

SEQ ID NO: 184796 - DNA, 705 bp, Artificial Sequence
  derived and/or modified sequence
atggccgccagccggtgggcccggaaggccgtggtgctgctgtgcgcttccgacctgctgctgctcctgctgctgcttcccccacccggtagctgtgcagcagagggatcaccaggaactccggacgaaagcaccccgcctccccgtaaaaagaaaaaagacatccgcgattataacgatgccgacatggccagactgctagaacagtgggagaaagacgacgatatcgaagagggagacctgcccgagcacaagagacctagcgcacccgtggatttcagcaaaattgatccctccaaaccagaaagcatcctgaaaatgactaagaaggggaagactctcatgatgttcgtgactgtttcaggctcccctacggaaaaagagaccgaggaaataacgtctctgtggcaggggagcctattcaatgcgaattatgacgtccaacggttcatcgtgggcagcgaccgggccatcttcatgctccgggacgggtcctacgcctgggagataaaagattttctagtggggcaggatagatgtgcagacgtaacgctggaggggcaggtgtatccgggcaagggcggcggcagcaaagaaaaaaataaaacaaagcaggacaagggcaaaaagaaaaaggaaggcgaccttaagagtcggtcctccaaagaggagaaccgagctgggaataagagggaggacctctag

SEQ ID NO: 184797 - DNA, 705 bp, Artificial Sequence
  derived and/or modified sequence
atggccgcatcaagatgggccaggaaagcggttgtcctgctatgtgcatccgacctactgctgctgttactgttactccctccacccggttcatgtgctgcagaagggtcacccggaacaccagatgaaagcacacctccacccagaaagaagaagaaagatataagggattacaatgacgccgacatggctcgtctcttagagcagtgggagaaagacgacgacatcgaggagggtgacctgccagagcacaagcgtccatctgccccagtcgatttctcaaagatcgacccaagcaaacccgaaagcatacttaagatgaccaagaagggcaagaccctcatgatgttcgttaccgtgagcggcagcccaaccgagaaagagacggaggaaatcacctccctctggcaaggcagcttattcaatgctaattatgacgtacagcgtttcatcgtgggctcggatagggccatcttcatgctgcgggatggaagctacgcatgggaaattaaggacttcctggttggccaagataggtgtgcagatgtgacactcgagggacaggtgtatccaggaaagggaggtggttctaaggagaaaaacaagaccaaacaggacaagggcaagaagaaaaaggagggagacctgaagagtagaagctctaaggaggagaacagagctggaaataagcgggaggacctgtag

SEQ ID NO: 184798 - DNA, 705 bp, Artificial Sequence
  derived and/or modified sequence
atggcggcttctaggtgggcgaggaaggccgtggttttgctgtgtgccagtgacctgcttctccttctgctcttgctgcccccacccggaagctgcgccgctgagggttccccgggaactcccgacgagagtacacctcccccacggaaaaagaagaaggacattagggactacaacgacgctgatatggccagactgctggaacagtgggagaaggacgacgatattgaagagggagatctcccagaacataagcgcccatccgcccctgtggacttcagcaagatcgacccctctaagcctgagtcaatactcaagatgacaaagaaagggaaaaccctgatgatgttcgtgaccgtgtctggaagcccgacagagaaggagaccgaggagataacatctctgtggcagggttccttattcaacgcaaactatgatgtccaacgttttatagtagggagtgaccgggctatatttatgctccgggacggctcttacgcatgggagataaaggattttctcgtagggcaggacagatgcgccgatgtgaccctggaagggcaggtgtatcctgggaaagggggaggttctaaggagaaaaacaaaaccaagcaggataaagggaagaagaagaaggagggagatctgaagtcccggagcagtaaagaggagaaccgtgctggcaataagcgagaggatctctag

SEQ ID NO: 184799 - DNA, 705 bp, Artificial Sequence
  derived and/or modified sequence
atggccgccagcagatgggccagaaaggccgtggtgctgctgtgcgccagcgacctgctgctgctgctgctgctgctgcccccccccggcagctgcgccgccgagggcagccccggcacccccgacgagagcacccccccccccagaaagaagaagaaggacatcagagactacaacgacgccgacatggccagactgctggagcagtgggagaaggacgacgacatcgaggagggcgacctgcccgagcacaagagacccagcgcccccgtggacttcagcaagatcgaccccagcaagcccgagagcatcctgaagatgaccaagaagggcaagaccctgatgatgttcgtgaccgtgagcggcagccccaccgagaaggagaccgaggagatcaccagcctgtggcagggcagcctgttcaacgccaactacgacgtgcagagattcatcgtgggcagcgacagagccatcttcatgctgagagacggcagctacgcctgggagatcaaggacttcctggtgggccaggacagatgcgccgacgtgaccctggagggccaggtgtaccccggcaagggcggcggcagcaaggagaagaacaagaccaagcaggacaagggcaagaagaagaaggagggcgacctgaagagcagaagcagcaaggaggagaacagagccggcaacaagagagaggacctgtag

SEQ ID NO: 184800 - protein, 482 aa, Artificial Sequence
  derived and/or modified sequence
MVEKGPEVSGKRRGRNNAAASASAAAASAAASAACASPAATAASGAAASSASAAAASAAAAPNNGQNKSLAAAAPNGNSSSNSWEEGSSGSSSDEEHGGGGMRVGPQYQAVVPDFDPAKLARRSQERDNLGMLVWSPNQNLSEAKLDEYIAIAKEKHGYNMEQALGMLFWHKHNIEKSLADLPNFTPFPDEWTVEDKVLFEQAFSFHGKTFHRIQQMLPDKSIASLVKFYYSWKKTRTKTSVMDRHARKQKREREESEDELEEANGNNPIDIEVDQNKESKKEVPPTETVPQVKKEKHSTQAKNRAKRKPPKGMFLSQEDVEAVSANATAATTVLRQLDMELVSVKRQIQNIKQTNSALKEKLDGGIEPYRLPEVIQKCNARWTTEEQLLAVQAIRKYGRDFQAISDVIGNKSVVQVKNFFVNYRRRFNIDEVLQEWEAEHGKEETNGPSNQKPVKSPDNSIKMPEEEDEAPVLDVRYASAS

SEQ ID NO: 184801 - DNA, 5537 bp, Artificial Sequence
  derived and/or modified sequence
atggtggagaagggccccgaggtctcagggaagcggagagggaggaacaacgcggccgcctccgcctccgccgccgccgcctccgccgccgcctcggccgcctgcgcctcgccagccgccactgccgcctcgggcgccgccgcctcctcagcctcggccgccgccgcctcagccgccgccgcccccaataatggccagaataaaagtttggcggcggcggcgcccaatggcaacagcagcagcaactcctgggaggaaggcagctcgggctcgtccagcgacgaggagcacggtggcggtggcatgagggtcggaccccagtaccaggcggtggtgcccgacttcgaccccgccaaactggcaagacgcagtcaagaacgggacaatcttggcatgttggtctggtcacccaatcaaaatctgtcagaagcaaagttggatgaatacattgccattgccaaagaaaagcatgggtacaacatggaacaggctcttgggatgctcttctggcataaacataatatcgaaaagtcattggctgatttgcccaactttacccctttcccagatgagtggactgtggaagataaagtcttatttgagcaagcctttagttttcatgggaaaacttttcatagaatccaacaaatgcttccagataaatctatagcaagtctggtgaaattttactattcttggaagaagacgaggactaaaactagtgtgatggatcgccatgcccggaaacaaaaacgggagcgggaggagagcgaggatgaactggaagaggcaaatggaaacaatcccattgacattgaggttgatcaaaacaaggaaagcaaaaaggaggttccccctactgagacagttcctcaggtcaaaaaagaaaaacatagcacacaagctaaaaatagagcaaaaaggaaacctccaaaaggaatgtttctttctcaagaagatgtggaggctgtttctgccaatgccactgctgctaccacggtgctgagacaactagacatggaattggtttcagtcaaacgacagatccagaatattaaacagacaaacagtgctctcaaagaaaaacttgatggtggaatagaaccatatcgacttccagaggtcattcagaaatgtaatgcacgttggactacagaagagcagcttctcgccgtacaagccatcaggaaatatggccgagattttcaggcaatctcagacgtgattgggaacaaatcagtggtacaagtgaaaaacttttttgtaaattatcgacgccgcttcaacatagatgaagttttacaagaatgggaggcagaacatggtaaagaagagaccaatgggcccagtaaccagaagcctgtgaagtccccagataattccattaagatgcccgaagaggaagacgaggctcctgttctggatgtcagatatgcatctgcctcctgagaaactggtggctttgaacacttggtgtggactactgtgttatccgggatatcaggtattatgagacatcacctagccatctgcatcacatctctctggacaagcagctattaccaaaaaaggcatatacttccagtcctgtgctccatctgccttaattctttgctcgttcctccatgttggcgccacttcccagagagctccactgcatctcacactctgcccacgtgctggggaagtctcacggcctgcacatctcttgtgactctgggaaccgcctctcccgccggagcccccgagccccaccaatggcagctcttcccagtcagcagcttcagagcaggcagtctccttggaaggcccgactctgttcctgcatggcctgcagtttctactttgtgcatagagtcattttcagagtcaccgcgaccctgttggccttctagaaagtttcttttgttcttttctgagacaaccacctaagtgataatacgcttttttggaaactaatatatattgccagactgcatcataacctttatcatgccaagcatcctgatgcaactcacatttccctaaacatggggtacagttatgatttataaattgagttggcttaaatctccctcttctcccttcccaagtgttacaaagatcatttactgcaactgtcgttggacactgtagcttaaagggaacgtggacctcaatgctttctgccttcaacttttcagcattgtgaccccagggtggttgccaccccatcttttcctgaccccccccacccccccacctccaagaggttcggcccacatcactgtacctggtgcttgtaaatttggaattggtgccttctccttttggcaaccatggttatcaatcctttttctgttttagtgtcttatttcttctttcaagttatttgctagccaaagatgacatcactgagattaggagacaggggagagcttgctgcagattctgacagtgcagattttaaatgtcaggatattagaatagctggcgctggtttatgaaagctgcgcgttgttccgcgttctctcggtgtgcctggccttttatgtggcactctgtatgtcagtttgtgtccttcatgtgctgatgtgattacacaaacaccatgcactctcttttcatatcagagtacaggacagagaagtgatcaatgtattggtctagtgagactgagatgaaaagaaataacctacagagtggtctgtaatgccttttggttggactgggaacaagtaaaaatttctaataaacattttgagacttccagaatcacttttgttatcttatcagaccatgggcctgctgagggttgagcagacagcctgcattctaacataccctgttcccaccccacggccattcagactgcactcaatacgctgaagtcgcttttgttgttgttgttgttgtttgcatcatttggatttttttcctgctttcaataccaaaaaaatgcagatgctttaaggcctaaacagaattctgaagaatttaaaatatgcaattaaagtttgatatgttttgtctcccaagcaccttgttttttgttgttgttgttgttgttgaagtcagctgattttctctttagaaagagggtcagctagaaacctaggttttttggaattgtaaatttttttttagtatagtctggagagaaaggtcattcaaaaggaaagtacaatgggacttgctgcccttcatcatctcgttcccgtgccaggtgtgtgttggtcacgtaaaagcctgggaagcatcagaggagtcccggattgctgctgctacctggagacagggttagcaaaataacactagtgatgagggagaggcttcttttcaccataagcctgctgtgtacaccgagggcggcaggagaagcatgggaaggagtcagcctaagtttgcacattgcataaagggtacactaaggtatgagctgaagctttaggttctccgtgcttccctcaagacctccttcttgctaacagaagcagtaggcaattgctgcagtgcgtttctcaccctgccaataggtctgtctgtatctctgttaaggaaaatagcctggtccctcctggcagtgcttggaagcttgatgctaatttttatatagcgtggcaaactgaccagcagtgccaggccttgatctgtattctgcactatccctttacttggttcctggcactgaatggtctccagccctgaagaatcacgtgtgatcacagcagctgacctgggctttctccccgagaggaaggggcatgtcatttttatttgacagagggaaaatgggagctgtccttgactgcctttgttgtgctttcccgcgtaagatagcactgtgttttaaactgttgcattacactgtctttgcaatgatgtaaatgtaagaaatcacttagctttaaaagcgcagtggtttgatcttatttatatgaagactttttaacatatcaagaattaggtgcattggcaggtagggtttggggtgtgataactgcttcagatggaatgttcacttaagctttgtcttcttaaaaattatcaatgtgaatgtcataattatatatatttttgtggaaaattttctcctaagtataagttattgtgcaaaatatagtgtcattgatgcaaataatagtttaacttttagtttagaactcctaaaagatataaattgtattgcatatgcattaaaagtttgttttatttaattttatgtagatgtgtgaagtgttaggtaaaatttttttcacttatccatttaaacaccttgttacttgaatattgtgttgactggtctgcaacagtgatccattctgtaatatagctcttttaactgggaaggaaccacaccccagttgtgccgattacattagtgttggcacacagtcgggtgctagtgtaacacaaatgccgcgttgtctgggtgtacagtgtttgtggagacgccacttcctcaaaatggtttttgattgtttttaacctataagacgttctgatgctcacaaacctctattcaacacacaaaacaaacatgaaaaggtagttagttgggttgtaacagcttactggggtggactcataaaacagtggctttctgttcatctaaagtttcctcagataccacagaccactgttaagtgtgctcattgtcactttaaatttcaacgataccctatttttgtcattctaaatatcagatgtactattggtataattgcacaccaaaaataagccaaacagtgcattacgctaactggatccctgcttttatgtgagctaaggaaagatggagccaactccaacgagggcctctttttctctcttgtctagcctgtttctaaaccgaatgatccaggattcaagcttctattgtcaagtgaaactttcctcagatggactccaggtagccaggtcacctaaacctagtggtcctgtgcgatgctctttctgccagtccctgaatctctgcagcttctcttacctgtcttacctgtagtaaagcacaattgcagtggcgtcgcattcagaagaagggaaggtcagcagaggctatgcatgttgtgtgatgatgagtgtttacagccaccttctcctaaaacgaaatttataccggggtggatagtattccattaggtagacttatcgactttgctaagtgctttttagacagcttaaaaaattttcaagattttaaaagatgtataaggttaagtttgcaaatataatggaaatgctgtatatcttttgaagtgatgaaatccacgttggaattttaaagaaaatatgttgtaataatgctgttgtaagtaatattttaatgtctctttgcctgttttctatttcagcacattcattgtggtgaatgttcatagcattataactgcttagccattgaatgataacatttgttagtggaaattggaaaatttatttgtgaaattctgcagaattcatttttctatttccaatatttgctgaggttaaataaaaattttcaagccattgatgtaataaaatatgaaatgaaagcaaaaaaaaaaaaaaaaaaa

SEQ ID NO: 184802 - DNA, 1449 bp, Artificial Sequence
  derived and/or modified sequence
atggtggagaagggacctgaggtgtcagggaagaggcgcgggagaaacaacgctgcagctagcgcctccgccgcagcagcatccgccgccgcatccgcagcctgtgcttctcccgccgccaccgccgcaagtggtgccgctgcgtcgtctgcctctgcagccgcggcgtccgcggcggccgcacccaataatggccagaataaatccctggcggccgcagctcctaatggcaacagtagttctaacagttgggaggagggatctagcgggtccagcagtgacgaggagcacggcggaggtggcatgcgggtcggcccccaataccaggccgtggtgcccgactttgaccccgccaaactcgctcgccgttcgcaggagcgcgacaatctcggtatgttggtctggagcccaaaccaaaacctgagcgaagctaagctggacgagtatatcgctatcgccaaagaaaagcatgggtacaatatggagcaggctctgggtatgctgttttggcataaacataacattgagaagagcctggccgatttgcccaattttacccccttccccgacgaatggaccgtggaggacaaagtcttattcgagcaggcgttttccttccacggcaaaaccttccatagaatacagcagatgctgcctgataagagcattgcgtcactggttaagttttattactcctggaagaaaacaagaactaagaccagcgtgatggacagacatgcaaggaagcagaaaagagaaagggaggaaagtgaggacgaactggaagaagccaacggaaacaatcctattgatattgaagtcgatcaaaataaggagtcgaaaaaggaggtcccacctaccgagactgttccccaagtgaaaaaggagaaacactccacgcaagcaaagaaccgggcaaaaagaaaacctcctaagggcatgtttctgtctcaggaagatgtggaagcggttagcgccaacgcaacggcagcgacaactgttctgaggcaactggacatggagctggtcagcgtgaagcgccagattcagaacattaagcagacgaatagtgccttaaaggagaaactcgatgggggtatcgaaccttataggctcccggaagtcattcagaagtgcaatgctcggtggacaacggaggagcagctgttggctgtgcaggcaattcgaaagtacggaagggacttccaggccataagcgatgttatcgggaacaagtcggtggtgcaggtgaagaactttttcgtgaattaccggcggagatttaacatagatgaagttctccaagagtgggaggcggagcacggcaaggaagaaacaaatgggccaagcaaccagaaacccgtcaagtcgcctgataattcgataaagatgccagaggaagaggatgaggcaccagtcctcgacgtccgatacgcaagcgcgtcgtag

SEQ ID NO: 184803 - DNA, 1449 bp, Artificial Sequence
  derived and/or modified sequence
atggtggagaaaggccccgaggtcagcgggaagcgacgcggccggaataatgccgcggcatcagccagcgcagcagcagcctcagcagccgcatcggcggcctgtgccagcccagcagctactgcagcatccggggcagccgcctcctcagcttcagctgcggcagcttccgccgccgccgcaccaaataacggccagaacaagagtctagccgcagccgcaccaaatggtaatagctcgtcaaacagttgggaagaaggaagctcaggtagctcctcggatgaggagcatggcggcggcggcatgagagttgggccccagtaccaggcagtagttcctgacttcgacccagcgaaactggccaggagatcccaagaacgtgataatctagggatgctcgtgtggtccccaaatcagaatttatccgaagccaaactcgatgaatatattgccatagcaaaggaaaagcacggatataatatggaacaggcccttggaatgctgttctggcacaagcacaacattgagaaaagtctggccgacctccctaacttcaccccatttcctgacgagtggacggtagaggacaaagtgttgtttgaacaggccttcagcttccatgggaaaacattccacagaatccagcagatgctcccggataaatcgatcgcctccctggtgaagttctattattcatggaagaaaacacgtacaaagacctcagtgatggacaggcacgcccgaaaacaaaagcgcgaacgggaggaaagtgaggacgagttggaggaagcaaatggcaacaaccccatcgacatagaggtggaccagaacaaagagtcaaagaaggaagttcctcctaccgaaacagttcctcaagttaaaaaagagaaacattccacccaggccaaaaatagagctaagagaaaaccaccaaaaggaatgtttctctcgcaggaggatgtggaggccgtgagcgcaaatgctaccgccgccaccacggtactgcggcagctggacatggagcttgtctcagtcaaaagacagatccaaaatattaagcaaaccaatagtgcccttaaggagaagctggatggcggaatcgaaccctatcgcctccctgaggtcatccaaaaatgtaacgcgcggtggacaaccgaggagcagctcctagcagtgcaggctatacgcaagtacgggcgggacttccaggccatcagcgacgtcatcggaaataaatccgttgtacaggttaagaacttctttgtcaactacagacggagattcaatattgatgaggtcttacaggaatgggaggcagaacacggcaaggaagaaaccaacggtccatccaatcagaaacccgtcaagtcccctgacaactctattaagatgcctgaggaagaggatgaggctcctgtcctggatgtgcgttacgcttctgctagttag

SEQ ID NO: 184804 - DNA, 1449 bp, Artificial Sequence
  derived and/or modified sequence
atggtggagaagggccctgaggtgtctgggaagaggcggggcagaaataatgctgctgccagcgccagcgctgctgctgccagcgctgctgccagcgctgcctgtgccagccctgctgccacagctgccagcggggctgctgccagcagcgccagcgctgctgctgccagcgctgctgctgcccccaacaacggccagaacaagagcctggccgctgctgcccccaacggcaacagcagcagcaacagctgggaggagggcagcagcggcagcagcagtgatgaggagcacggcggcggcggcatgagggtgggcccccagtaccaggccgtggtgcctgactttgatcctgccaagctggcccggcgcagccaggagcgggacaacctgggcatgctggtgtggagccccaaccagaacctgtctgaggccaagctggatgagtacatcgccatcgccaaggagaagcacggctacaacatggagcaggccctgggcatgctgttctggcacaagcacaacatcgagaagagcctggccgacctgcccaacttcacccccttcccagatgagtggacagtggaggacaaggtgctgtttgagcaggccttctccttccacggcaagaccttccaccgcatccagcagatgctgcctgacaagagcatcgccagcctggtgaagttctactacagctggaagaagaccaggaccaagacctctgtgatggacagacatgccaggaagcagaagcgggagcgggaggagagtgaagatgagctggaggaggccaatggaaacaaccccatcgacatcgaggtggaccagaacaaggagagcaagaaggaggtgcccccaacagaaacagtgccccaggtgaagaaggagaagcacagcacccaggccaagaacagagccaagaggaagccacccaagggcatgttcctgagccaggaggatgtggaggccgtgtctgccaatgccacagctgccaccaccgtgctgcggcagctggacatggagctggtgtctgtgaagaggcagatccagaacatcaagcagaccaacagcgccctgaaggagaagctggatggcggcatcgagccctaccgcctgcctgaggtgatccagaagtgcaatgcccgctggaccacagaggagcagctgctggccgtgcaggccatcagaaaatatggccgggacttccaggccatcagtgatgtgattggcaacaagtctgtggtgcaggtgaagaacttctttgtgaactacagaagacgcttcaacattgatgaggtgctgcaggagtgggaggccgagcacggcaaggaggagaccaacggccccagcaaccagaagcctgtgaagagcccagacaacagcatcaagatgcctgaggaggaggatgaggcccctgtgctggatgtgcgctatgccagcgccagctag

SEQ ID NO: 184805 - DNA, 5732 bp, Artificial Sequence
  derived and/or modified sequence
gtgagggcggcgatgagagcgaaagttgcgctcggctcgtcgctgggggcttgaagcggctccgcgctctgcccgtttgggcctcccccgactcggactcgcgcccgtgggctcccgccgcgcccgcccggccccgcgccggccccgcgccccctcccccgtctcggcgccccctcctcaggagccgcgggtccccgccactttcgcacggccccggcccccgccgatgccggccatggtggagaagggccccgaggtctcagggaagcggagagggaggaacaacgcggccgcctccgcctccgccgccgccgcctccgccgccgcctcggccgcctgcgcctcgccagccgccactgccgcctcgggcgccgccgcctcctcagcctcggccgccgccgcctcagccgccgccgcccccaataatggccagaataaaagtttggcggcggcggcgcccaatggcaacagcagcagcaactcctgggaggaaggcagctcgggctcgtccagcgacgaggagcacggtggcggtggcatgagggtcggaccccagtaccaggcggtggtgcccgacttcgaccccgccaaactggcaagacgcagtcaagaacgggacaatcttggcatgttggtctggtcacccaatcaaaatctgtcagaagcaaagttggatgaatacattgccattgccaaagaaaagcatgggtacaacatggaacaggctcttgggatgctcttctggcataaacataatatcgaaaagtcattggctgatttgcccaactttacccctttcccagatgagtggactgtggaagataaagtcttatttgagcaagcctttagttttcatgggaaaacttttcatagaatccaacaaatgcttccagataaatctatagcaagtctggtgaaattttactattcttggaagaagacgaggactaaaactagtgtgatggatcgccatgcccggaaacaaaaacgggagcgggaggagagcgaggatgaactggaagaggcaaatggaaacaatcccattgacattgaggttgatcaaaacaaggaaagcaaaaaggaggttccccctactgagacagttcctcaggtcaaaaaagaaaaacatagcacacaagctaaaaatagagcaaaaaggaaacctccaaaaggaatgtttctttctcaagaagatgtggaggctgtttctgccaatgccactgctgctaccacggtgctgagacaactagacatggaattggtttcagtcaaacgacagatccagaatattaaacagacaaacagtgctctcaaagaaaaacttgatggtggaatagaaccatatcgacttccagaggtcattcagaaatgtaatgcacgttggactacagaagagcagcttctcgccgtacaagccatcaggaaatatggccgagattttcaggcaatctcagacgtgattgggaacaaatcagtggtacaagtgaaaaacttttttgtaaattatcgacgccgcttcaacatagatgaagttttacaagaatgggaggcagaacatggtaaagaagagaccaatgggcccagtaaccagaagcctgtgaagtccccagataattccattaagatgcccgaagaggaagacgaggctcctgttctggatgtcagatatgcatctgcctcctgagaaactggtggctttgaacacttggtgtggactactgtgttatccgggatatcaggtattatgagacatcacctagccatctgcatcacatctctctggacaagcagctattaccaaaaaaggcatatacttccagtcctgtgctccatctgccttaattctttgctcgttcctccatgttggcgccacttcccagagagctccactgcatctcacactctgcccacgtgctggggaagtctcacggcctgcacatctcttgtgactctgggaaccgcctctcccgccggagcccccgagccccaccaatggcagctcttcccagtcagcagcttcagagcaggcagtctccttggaaggcccgactctgttcctgcatggcctgcagtttctactttgtgcatagagtcattttcagagtcaccgcgaccctgttggccttctagaaagtttcttttgttcttttctgagacaaccacctaagtgataatacgcttttttggaaactaatatatattgccagactgcatcataacctttatcatgccaagcatcctgatgcaactcacatttccctaaacatggggtacagttatgatttataaattgagttggcttaaatctccctcttctcccttcccaagtgttacaaagatcatttactgcaactgtcgttggacactgtagcttaaagggaacgtggacctcaatgctttctgccttcaacttttcagcattgtgaccccagggtggttgccaccccatcttttcctgaccccccccacccccccacctccaagaggttcggcccacatcactgtacctggtgcttgtaaatttggaattggtgccttctccttttggcaaccatggttatcaatcctttttctgttttagtgtcttatttcttctttcaagttatttgctagccaaagatgacatcactgagattaggagacaggggagagcttgctgcagattctgacagtgcagattttaaatgtcaggatattagaatagctggcgctggtttatgaaagctgcgcgttgttccgcgttctctcggtgtgcctggccttttatgtggcactctgtatgtcagtttgtgtccttcatgtgctgatgtgattacacaaacaccatgcactctcttttcatatcagagtacaggacagagaagtgatcaatgtattggtctagtgagactgagatgaaaagaaataacctacagagtggtctgtaatgccttttggttggactgggaacaagtaaaaatttctaataaacattttgagacttccagaatcacttttgttatcttatcagaccatgggcctgctgagggttgagcagacagcctgcattctaacataccctgttcccaccccacggccattcagactgcactcaatacgctgaagtcgcttttgttgttgttgttgttgtttgcatcatttggatttttttcctgctttcaataccaaaaaaatgcagatgctttaaggcctaaacagaattctgaagaatttaaaatatgcaattaaagtttgatatgttttgtctcccaagcaccttgttttttgttgttgttgttgttgttgaagtcagctgattttctctttagaaagagggtcagctagaaacctaggttttttggaattgtaaatttttttttagtatagtctggagagaaaggtcattcaaaaggaaagtacaatgggacttgctgcccttcatcatctcgttcccgtgccaggtgtgtgttggtcacgtaaaagcctgggaagcatcagaggagtcccggattgctgctgctacctggagacagggttagcaaaataacactagtgatgagggagaggcttcttttcaccataagcctgctgtgtacaccgagggcggcaggagaagcatgggaaggagtcagcctaagtttgcacattgcataaagggtacactaaggtatgagctgaagctttaggttctccgtgcttccctcaagacctccttcttgctaacagaagcagtaggcaattgctgcagtgcgtttctcaccctgccaataggtctgtctgtatctctgttaaggaaaatagcctggtccctcctggcagtgcttggaagcttgatgctaatttttatatagcgtggcaaactgaccagcagtgccaggccttgatctgtattctgcactatccctttacttggttcctggcactgaatggtctccagccctgaagaatcacgtgtgatcacagcagctgacctgggctttctccccgagaggaaggggcatgtcatttttatttgacagagggaaaatgggagctgtccttgactgcctttgttgtgctttcccgcgtaagatagcactgtgttttaaactgttgcattacactgtctttgcaatgatgtaaatgtaagaaatcacttagctttaaaagcgcagtggtttgatcttatttatatgaagactttttaacatatcaagaattaggtgcattggcaggtagggtttggggtgtgataactgcttcagatggaatgttcacttaagctttgtcttcttaaaaattatcaatgtgaatgtcataattatatatatttttgtggaaaattttctcctaagtataagttattgtgcaaaatatagtgtcattgatgcaaataatagtttaacttttagtttagaactcctaaaagatataaattgtattgcatatgcattaaaagtttgttttatttaattttatgtagatgtgtgaagtgttaggtaaaatttttttcacttatccatttaaacaccttgttacttgaatattgtgttgactggtctgcaacagtgatccattctgtaatatagctcttttaactgggaaggaaccacaccccagttgtgccgattacattagtgttggcacacagtcgggtgctagtgtaacacaaatgccgcgttgtctgggtgtacagtgtttgtggagacgccacttcctcaaaatggtttttgattgtttttaacctataagacgttctgatgctcacaaacctctattcaacacacaaaacaaacatgaaaaggtagttagttgggttgtaacagcttactggggtggactcataaaacagtggctttctgttcatctaaagtttcctcagataccacagaccactgttaagtgtgctcattgtcactttaaatttcaacgataccctatttttgtcattctaaatatcagatgtactattggtataattgcacaccaaaaataagccaaacagtgcattacgctaactggatccctgcttttatgtgagctaaggaaagatggagccaactccaacgagggcctctttttctctcttgtctagcctgtttctaaaccgaatgatccaggattcaagcttctattgtcaagtgaaactttcctcagatggactccaggtagccaggtcacctaaacctagtggtcctgtgcgatgctctttctgccagtccctgaatctctgcagcttctcttacctgtcttacctgtagtaaagcacaattgcagtggcgtcgcattcagaagaagggaaggtcagcagaggctatgcatgttgtgtgatgatgagtgtttacagccaccttctcctaaaacgaaatttataccggggtggatagtattccattaggtagacttatcgactttgctaagtgctttttagacagcttaaaaaattttcaagattttaaaagatgtataaggttaagtttgcaaatataatggaaatgctgtatatcttttgaagtgatgaaatccacgttggaattttaaagaaaatatgttgtaataatgctgttgtaagtaatattttaatgtctctttgcctgttttctatttcagcacattcattgtggtgaatgttcatagcattataactgcttagccattgaatgataacatttgttagtggaaattggaaaatttatttgtgaaattctgcagaattcatttttctatttccaatatttgctgaggttaaataaaaattttcaagccattgatgt

SEQ ID NO: 184806 - DNA, 5518 bp, Artificial Sequence
  derived and/or modified sequence
atggtggagaagggccccgaggtctcagggaagcggagagggaggaacaacgcggccgcctccgcctccgccgccgccgcctccgccgccgcctcggccgcctgcgcctcgccagccgccactgccgcctcgggcgccgccgcctcctcagcctcggccgccgccgcctcagccgccgccgcccccaataatggccagaataaaagtttggcggcggcggcgcccaatggcaacagcagcagcaactcctgggaggaaggcagctcgggctcgtccagcgacgaggagcacggtggcggtggcatgagggtcggaccccagtaccaggcggtggtgcccgacttcgaccccgccaaactggcaagacgcagtcaagaacgggacaatcttggcatgttggtctggtcacccaatcaaaatctgtcagaagcaaagttggatgaatacattgccattgccaaagaaaagcatgggtacaacatggaacaggctcttgggatgctcttctggcataaacataatatcgaaaagtcattggctgatttgcccaactttacccctttcccagatgagtggactgtggaagataaagtcttatttgagcaagcctttagttttcatgggaaaacttttcatagaatccaacaaatgcttccagataaatctatagcaagtctggtgaaattttactattcttggaagaagacgaggactaaaactagtgtgatggatcgccatgcccggaaacaaaaacgggagcgggaggagagcgaggatgaactggaagaggcaaatggaaacaatcccattgacattgaggttgatcaaaacaaggaaagcaaaaaggaggttccccctactgagacagttcctcaggtcaaaaaagaaaaacatagcacacaagctaaaaatagagcaaaaaggaaacctccaaaaggaatgtttctttctcaagaagatgtggaggctgtttctgccaatgccactgctgctaccacggtgctgagacaactagacatggaattggtttcagtcaaacgacagatccagaatattaaacagacaaacagtgctctcaaagaaaaacttgatggtggaatagaaccatatcgacttccagaggtcattcagaaatgtaatgcacgttggactacagaagagcagcttctcgccgtacaagccatcaggaaatatggccgagattttcaggcaatctcagacgtgattgggaacaaatcagtggtacaagtgaaaaacttttttgtaaattatcgacgccgcttcaacatagatgaagttttacaagaatgggaggcagaacatggtaaagaagagaccaatgggcccagtaaccagaagcctgtgaagtccccagataattccattaagatgcccgaagaggaagacgaggctcctgttctggatgtcagatatgcatctgcctcctgagaaactggtggctttgaacacttggtgtggactactgtgttatccgggatatcaggtattatgagacatcacctagccatctgcatcacatctctctggacaagcagctattaccaaaaaaggcatatacttccagtcctgtgctccatctgccttaattctttgctcgttcctccatgttggcgccacttcccagagagctccactgcatctcacactctgcccacgtgctggggaagtctcacggcctgcacatctcttgtgactctgggaaccgcctctcccgccggagcccccgagccccaccaatggcagctcttcccagtcagcagcttcagagcaggcagtctccttggaaggcccgactctgttcctgcatggcctgcagtttctactttgtgcatagagtcattttcagagtcaccgcgaccctgttggccttctagaaagtttcttttgttcttttctgagacaaccacctaagtgataatacgcttttttggaaactaatatatattgccagactgcatcataacctttatcatgccaagcatcctgatgcaactcacatttccctaaacatggggtacagttatgatttataaattgagttggcttaaatctccctcttctcccttcccaagtgttacaaagatcatttactgcaactgtcgttggacactgtagcttaaagggaacgtggacctcaatgctttctgccttcaacttttcagcattgtgaccccagggtggttgccaccccatcttttcctgaccccccccacccccccacctccaagaggttcggcccacatcactgtacctggtgcttgtaaatttggaattggtgccttctccttttggcaaccatggttatcaatcctttttctgttttagtgtcttatttcttctttcaagttatttgctagccaaagatgacatcactgagattaggagacaggggagagcttgctgcagattctgacagtgcagattttaaatgtcaggatattagaatagctggcgctggtttatgaaagctgcgcgttgttccgcgttctctcggtgtgcctggccttttatgtggcactctgtatgtcagtttgtgtccttcatgtgctgatgtgattacacaaacaccatgcactctcttttcatatcagagtacaggacagagaagtgatcaatgtattggtctagtgagactgagatgaaaagaaataacctacagagtggtctgtaatgccttttggttggactgggaacaagtaaaaatttctaataaacattttgagacttccagaatcacttttgttatcttatcagaccatgggcctgctgagggttgagcagacagcctgcattctaacataccctgttcccaccccacggccattcagactgcactcaatacgctgaagtcgcttttgttgttgttgttgttgtttgcatcatttggatttttttcctgctttcaataccaaaaaaatgcagatgctttaaggcctaaacagaattctgaagaatttaaaatatgcaattaaagtttgatatgttttgtctcccaagcaccttgttttttgttgttgttgttgttgttgaagtcagctgattttctctttagaaagagggtcagctagaaacctaggttttttggaattgtaaatttttttttagtatagtctggagagaaaggtcattcaaaaggaaagtacaatgggacttgctgcccttcatcatctcgttcccgtgccaggtgtgtgttggtcacgtaaaagcctgggaagcatcagaggagtcccggattgctgctgctacctggagacagggttagcaaaataacactagtgatgagggagaggcttcttttcaccataagcctgctgtgtacaccgagggcggcaggagaagcatgggaaggagtcagcctaagtttgcacattgcataaagggtacactaaggtatgagctgaagctttaggttctccgtgcttccctcaagacctccttcttgctaacagaagcagtaggcaattgctgcagtgcgtttctcaccctgccaataggtctgtctgtatctctgttaaggaaaatagcctggtccctcctggcagtgcttggaagcttgatgctaatttttatatagcgtggcaaactgaccagcagtgccaggccttgatctgtattctgcactatccctttacttggttcctggcactgaatggtctccagccctgaagaatcacgtgtgatcacagcagctgacctgggctttctccccgagaggaaggggcatgtcatttttatttgacagagggaaaatgggagctgtccttgactgcctttgttgtgctttcccgcgtaagatagcactgtgttttaaactgttgcattacactgtctttgcaatgatgtaaatgtaagaaatcacttagctttaaaagcgcagtggtttgatcttatttatatgaagactttttaacatatcaagaattaggtgcattggcaggtagggtttggggtgtgataactgcttcagatggaatgttcacttaagctttgtcttcttaaaaattatcaatgtgaatgtcataattatatatatttttgtggaaaattttctcctaagtataagttattgtgcaaaatatagtgtcattgatgcaaataatagtttaacttttagtttagaactcctaaaagatataaattgtattgcatatgcattaaaagtttgttttatttaattttatgtagatgtgtgaagtgttaggtaaaatttttttcacttatccatttaaacaccttgttacttgaatattgtgttgactggtctgcaacagtgatccattctgtaatatagctcttttaactgggaaggaaccacaccccagttgtgccgattacattagtgttggcacacagtcgggtgctagtgtaacacaaatgccgcgttgtctgggtgtacagtgtttgtggagacgccacttcctcaaaatggtttttgattgtttttaacctataagacgttctgatgctcacaaacctctattcaacacacaaaacaaacatgaaaaggtagttagttgggttgtaacagcttactggggtggactcataaaacagtggctttctgttcatctaaagtttcctcagataccacagaccactgttaagtgtgctcattgtcactttaaatttcaacgataccctatttttgtcattctaaatatcagatgtactattggtataattgcacaccaaaaataagccaaacagtgcattacgctaactggatccctgcttttatgtgagctaaggaaagatggagccaactccaacgagggcctctttttctctcttgtctagcctgtttctaaaccgaatgatccaggattcaagcttctattgtcaagtgaaactttcctcagatggactccaggtagccaggtcacctaaacctagtggtcctgtgcgatgctctttctgccagtccctgaatctctgcagcttctcttacctgtcttacctgtagtaaagcacaattgcagtggcgtcgcattcagaagaagggaaggtcagcagaggctatgcatgttgtgtgatgatgagtgtttacagccaccttctcctaaaacgaaatttataccggggtggatagtattccattaggtagacttatcgactttgctaagtgctttttagacagcttaaaaaattttcaagattttaaaagatgtataaggttaagtttgcaaatataatggaaatgctgtatatcttttgaagtgatgaaatccacgttggaattttaaagaaaatatgttgtaataatgctgttgtaagtaatattttaatgtctctttgcctgttttctatttcagcacattcattgtggtgaatgttcatagcattataactgcttagccattgaatgataacatttgttagtggaaattggaaaatttatttgtgaaattctgcagaattcatttttctatttccaatatttgctgaggttaaataaaaattttcaagccattgatgtaataaaatatgaaatgaaagc

SEQ ID NO: 184807 - DNA, 1449 bp, Artificial Sequence
  derived and/or modified sequence
atggtggagaagggccccgaggtgagcggcaagcggcggggccggaacaatgcggccgcctcagctagcgccgccgccgcttccgccgcggcgtctgcagcctgtgccagccctgctgctacagcagctagcggcgccgccgcctcaagtgcgtccgccgccgctgcttccgccgccgccgcaccaaacaatggccagaataagagtctagcggccgcggcaccgaacggcaattctagttccaattcctgggaagagggcagttccggatccagttctgatgaagagcacggcggaggcggtatgagagtgggtccccagtaccaggctgttgttccagactttgatccagccaagctagcacggaggtcacaagaacgagataatctggggatgttagtctggagccccaaccaaaatctgtcggaagccaaacttgacgaatatatcgctatcgccaaggagaagcacgggtataacatggagcaggccttgggcatgctgttttggcacaaacataacatagaaaaaagtctggccgacctgccgaattttacccccttccccgatgaatggaccgtggaggacaaagtcctgttcgagcaagcattcagcttccacggaaaaacttttcaccggatccagcagatgttgcccgacaagagtatagcttccctggtgaagttttactattcttggaaaaagacacggaccaagacaagcgtcatggaccggcatgcaaggaagcagaagcgagaacgagaggaatcagaggacgaattggaggaggccaatggtaataaccccatagacattgaagtcgatcagaacaaggaatcgaagaaggaggtcccccctacagaaaccgtgccccaagtgaagaaagagaagcacagcacacaggcaaagaacagggccaagagaaaaccccccaaggggatgtttctatcccaggaggacgttgaggcagtgtctgccaacgccactgccgccactactgtgcttcgccagctggacatggagcttgtcagtgtgaagagacagatacaaaatataaaacaaacaaactccgcgttgaaggagaaactggacggtgggatagaaccctaccggctacctgaagtgatccaaaaatgtaacgcaagatggaccaccgaggaacagctgctggcagtgcaggcgattcgaaaatacggccgcgactttcaggcaattagtgacgtgattggaaacaagtcagtggtgcaggtcaagaacttttttgtgaattataggcgccgcttcaatatcgacgaagttttacaggagtgggaggcagagcacggtaaggaggagaccaatggacctagtaatcaaaaacctgttaagtcacccgataattcaataaagatgccggaggaagaggatgaggccccagtcttggatgtgaggtacgcatcagcgagctag

SEQ ID NO: 184808 - DNA, 1449 bp, Artificial Sequence
  derived and/or modified sequence
atggtggagaagggccccgaggtgagcggcaagcggcggggccggaacaatgccgccgcgagcgcctctgctgccgcagcctctgcagcagccagtgcagcttgtgcgtcaccggcagccacagccgcgtccggggccgccgcatcctcagcctctgccgccgccgcatccgcagcggccgcacctaacaacggtcagaataaaagtctggcagctgcagccccaaatggaaactcatcgtctaactcatgggaggagggctcctctggcagctcatccgatgaggagcacgggggaggcggcatgcgagtgggtcctcagtaccaggccgtggttcctgacttcgatccagcaaaactggcgcgcagatcccaggagcgtgataacctgggaatgctggtgtggagccccaatcagaatctgtctgaggccaagttggatgaatatatcgccattgcaaaggaaaagcacggctacaatatggagcaggctctggggatgctgttctggcacaaacacaacatcgagaagtccctggccgatttaccgaatttcaccccatttccagacgaatggacagttgaggacaaggtactcttcgagcaggctttctcattccacggaaaaacattccacagaatccagcaaatgctgccagacaaatctatcgctagcctggtcaaattttactattcctggaagaagacacgtacaaagactagcgtgatggaccggcacgcccggaaacagaagagggagagggaagaaagcgaagacgagttagaagaagccaatggaaacaatcccatagacatagaagtggaccaaaataaggagtcaaaaaaggaagtccctccaacagagactgtgcctcaggttaagaaggaaaaacacagtacccaggcaaagaatcgggcaaagcggaagccccctaaaggcatgttcctgtcgcaggaggacgtcgaagccgtctctgcaaatgctacagctgctacaaccgtcttacggcagctggatatggaacttgtgagtgtaaagcgccagattcaaaatatcaagcaaaccaatagcgcactgaaagagaaattggatggagggattgagccgtacaggctgcccgaggttatccagaagtgtaatgctcggtggacaacagaggaacagttgttagccgttcaggcaatccggaagtacggaagagacttccaggccatctcagacgtgattgggaacaagagcgtggtccaggtgaagaacttttttgtaaactaccgccgacgatttaacatcgacgaggttctccaggagtgggaagctgaacacgggaaggaagaaacaaacggaccgtccaatcagaagccggtgaagagccccgacaatagtatcaaaatgccggaagaggaggacgaggcacctgtgctagatgttcgctacgcgtcggcttcgtag

SEQ ID NO: 184809 - DNA, 1449 bp, Artificial Sequence
  derived and/or modified sequence
atggtggagaagggacccgaggtgagcggcaaacgtcggggacggaacaatgctgccgctagtgcctctgccgcagccgctagtgctgcagcgtccgccgcttgtgcgagtccagccgcaacagcggcaagtggtgccgctgcctcaagcgcctctgctgcagctgcaagcgcagccgcagcaccgaacaatggtcagaacaagagcctagcagctgccgcaccaaacggcaactccagttctaacagctgggaggagggatcatccggaagctcgagcgatgaagagcacggcggaggcggtatgcgcgtcgggcctcaataccaggccgtcgttcctgattttgaccctgccaagctcgccaggaggtcacaagaaagggacaacctgggcatgctggtgtggagcccaaatcagaatttgagcgaagctaagttggacgagtacattgctattgccaaggaaaagcacggctacaacatggagcaggcgttgggaatgctgttctggcacaaacacaatattgagaagagcctggccgatctgccaaattttactccctttcctgatgaatggacggttgaggacaaagtgttatttgaacaagctttctcctttcacggcaagacatttcaccgtattcagcaaatgctgccagacaaatccattgcctccctcgttaagttttattactcatggaagaagactcggaccaaaactagtgtcatggacagacatgcacgaaagcaaaagcgtgagagagaagaaagcgaggatgagctggaggaagctaatgggaataatccaattgacatcgaagttgaccagaacaaggaatctaagaaggaggtaccccctacggagacggtgcctcaggtcaagaaggagaagcatagcactcaggcgaagaatagggcgaaacgaaagccgcctaaaggcatgtttctgtcacaggaggacgtagaggccgtgagcgcgaatgcgaccgcggctacaactgtcctgagacaacttgatatggagttggtatccgtgaagcggcagatccagaatattaagcagaccaattccgcactcaaagagaagctggacgggggaattgagccctatagactgcccgaggtgatccagaaatgcaacgctagatggaccactgaagagcaactcttggctgtgcaagccatccggaaatatgggcgagactttcaggccatctccgacgttatagggaataaatccgttgtgcaggtaaagaatttttttgtgaattacaggaggcggtttaacatcgatgaggtgctgcaggaatgggaggccgaacatggcaaagaggaaaccaatggcccaagtaatcagaagcctgtgaagagtcccgataattctattaagatgcctgaggaggaagatgaggccccagtgctggatgttcgatatgcaagtgcctcctag

SEQ ID NO: 184810 - DNA, 1449 bp, Artificial Sequence
  derived and/or modified sequence
atggtggaaaaaggtccagaggtttctggcaagcggagaggtcgcaataatgctgccgcttccgcgtctgctgccgctgcgtccgcggcagcctcagcagcctgcgccagtcccgcagccaccgctgcctccggagccgcagcctcttctgcatccgccgcagccgcatctgcagcggctgcaccaaacaacggacaaaataagtctttagctgccgcagcgccaaacggaaacagcagctcaaactcgtgggaggaaggcagtagtggcagttcgtcagacgaggagcatggtggaggtggaatgcgagtgggcccacagtaccaggctgtggtgccagatttcgacccggctaaactggctaggcgaagccaagagagggataacctaggcatgctggtgtggagccccaaccaaaatctgagcgaggcgaagttggatgaatacatagcaattgcaaaggagaagcatggttacaacatggagcaggcgctcgggatgctgttctggcacaagcacaatattgagaagagtctggctgacttgcctaatttcacaccattccccgatgaatggaccgtagaggacaaggttctgtttgagcaggcgttctctttccacggcaaaacatttcacagaattcaacagatgctccccgataaaagcattgcgagtctggtcaagttctactactcttggaagaagaccaggacaaagaccagtgtgatggatagacatgcccgtaaacagaaaagagagcgcgaagagagcgaagacgagctggaggaggcaaatggcaacaaccctattgatatcgaggtggaccaaaataaagagtccaagaaagaagtgccacctacggagacagttccccaagtgaaaaaagaaaaacactctacccaagcaaaaaacagggctaaacgaaagcccccaaaggggatgttcttgtctcaggaagacgtggaagcagtgtcagcaaacgctaccgctgccaccaccgtgctgcgacaacttgacatggaactggttagtgtgaagcggcagatacagaacattaagcagactaattccgccctgaaagagaagctcgatgggggtattgaaccttacagactgcctgaggtgatccagaaatgtaacgcgagatggaccacagaagagcaattgctcgcggtgcaggctatcagaaaatacggcagagactttcaggcaatcagcgacgtaatcggaaataaaagcgtggtacaggtcaagaatttcttcgtaaattacaggagaagattcaacatcgatgaagtgcttcaggaatgggaggccgagcacgggaaggaggaaaccaacgggccttctaatcagaagccggtcaaatctccagacaacagcattaaaatgcccgaagaggaggacgaggccccagtgctggacgtgaggtatgctagtgcttcttag

SEQ ID NO: 184811 - DNA, 1449 bp, Artificial Sequence
  derived and/or modified sequence
atggtggagaagggccccgaggtgagcggcaagagaagaggcagaaacaacgccgccgccagcgccagcgccgccgccgccagcgccgccgccagcgccgcctgcgccagccccgccgccaccgccgccagcggcgccgccgccagcagcgccagcgccgccgccgccagcgccgccgccgcccccaacaacggccagaacaagagcctggccgccgccgcccccaacggcaacagcagcagcaacagctgggaggagggcagcagcggcagcagcagcgacgaggagcacggcggcggcggcatgagagtgggcccccagtaccaggccgtggtgcccgacttcgaccccgccaagctggccagaagaagccaggagagagacaacctgggcatgctggtgtggagccccaaccagaacctgagcgaggccaagctggacgagtacatcgccatcgccaaggagaagcacggctacaacatggagcaggccctgggcatgctgttctggcacaagcacaacatcgagaagagcctggccgacctgcccaacttcacccccttccccgacgagtggaccgtggaggacaaggtgctgttcgagcaggccttcagcttccacggcaagaccttccacagaatccagcagatgctgcccgacaagagcatcgccagcctggtgaagttctactacagctggaagaagaccagaaccaagaccagcgtgatggacagacacgccagaaagcagaagagagagagagaggagagcgaggacgagctggaggaggccaacggcaacaaccccatcgacatcgaggtggaccagaacaaggagagcaagaaggaggtgccccccaccgagaccgtgccccaggtgaagaaggagaagcacagcacccaggccaagaacagagccaagagaaagccccccaagggcatgttcctgagccaggaggacgtggaggccgtgagcgccaacgccaccgccgccaccaccgtgctgagacagctggacatggagctggtgagcgtgaagagacagatccagaacatcaagcagaccaacagcgccctgaaggagaagctggacggcggcatcgagccctacagactgcccgaggtgatccagaagtgcaacgccagatggaccaccgaggagcagctgctggccgtgcaggccatcagaaagtacggcagagacttccaggccatcagcgacgtgatcggcaacaagagcgtggtgcaggtgaagaacttcttcgtgaactacagaagaagattcaacatcgacgaggtgctgcaggagtgggaggccgagcacggcaaggaggagaccaacggccccagcaaccagaagcccgtgaagagccccgacaacagcatcaagatgcccgaggaggaggacgaggcccccgtgctggacgtgagatacgccagcgccagctag

SEQ ID NO: 184812 - DNA, 528 bp, Artificial Sequence
  derived and/or modified sequence
atgcatggtgagaagtcccacggaaggggacaggccgggcgtcaggtgcccttaaaacagcagtcagtgagtggagaaagccagcagggtgcccggcagggcgcaggccagtccacttgctatctgtcctcagcctttctctgcaacgggagtttccccgctgggtccatgtctctttgggacccacagcccaagcaggcatttcccagcgtactctggtgctcgtgggcaggggtccccggccgcaggaccgggcagagggatcctcgcgttcaggaaaggaggggggatttcgtctcaaaactgggagctgcagtcggaggagagccccttgccttgttcgggcctcactcttggcccgggatgggccaccgggtacccggactgggagccggctttttactcttcgcaggcttcgcgcttgagccttgggatagttaccatgtcgtgtttgagggctggaccattgatatgaggcggaacgaacctgagcggacaaggagcctgagtgcccctggacctctgtag

SEQ ID NO: 184813 - protein, 1377 aa, Artificial Sequence
  derived and/or modified sequence
MDALNRNQIGPGCQTQTMVQKGPLDLIETGKGLKVQTDKPHLVSLGSGRLSTAITLLPLEEGRTVIGSAARDISLQGPGLAPEHCYIENLRGTLTLYPCGNACTIDGLPVRQPTRLTQGCMLCLGQSTFLRFNHPAEAKWMKSMIPAGGRAPGPPYSPVPAESESLVNGNHTPQTATRGPSACASHSSLVSSIEKDLQEIMDSLVLEEPGAAGKKPAATSPLSPMANGGRYLLSPPTSPGAMSVGSSYENTSPAFSPLSSPASSGSCASHSPSGQEPGPSVPPLVPARSSSYHLALQPPQSRPSGARSESPRLSRKGGHERPPSPGLRGLLTDSPAATVLAEARRATESPRLGGQLPVVAISLSEYPASGALSQPTSIPGSPKFQPPVPAPRNKIGTLQDRPPSPFREPPGSERVLTTSPSRQLVGRTFSDGLATRTLQPPESPRLGRRGLDSMRELPPLSPSLSRRALSPLPTRTTPDPKLNREVAESPRPRRWAAHGASPEDFSLTLGARGRRTRSPSPTLGESLAPHKGSFSGRLSPAYSLGSLTGASPCQSPCVQRKLSSGDLRVPVTRERKNSITEISDNEDDLLEYHRRQRQERLREQEMERLERQRLETILNLCAEYSRADGGPEAGELPSIGEATAALALAGRRPSRGLAGASGRSSEEPGVATQRLWESMERSDEENLKEECSSTESTQQEHEDAPSTKLQGEVLALEEERAQVLGHVEQLKVRVKELEQQLQESAREAEMERALLQGEREAERALLQKEQKAVDQLQEKLVALETGIQKERDKEAEALETETKLFEDLEFQQLERESRVEEERELAGQGLLRSKAELLRSIAKRKERLAILDSQAGQIRAQAVQESERLARDKNASLQLLQKEKEKLTVLERRYHSLTGGRPFPKTTSTLKEMEKLLLPAVDLEQWYQELMAGLGTGPAAASPHSSPPPLPAKASRQLQVYRSKMDGEATSPLPRTRSGPLPSSSGSSSSSSQLSVATLGRSPSPKSALLTQNGTGSLPRNLAATLQDIETKRQLALQQKGQQVIEEQRRRLAELKQKAAAEAQCQWDALHGAAPFPAGPSGFPPLMHHSILHHLPAGRERGEEGEHAYDTLSLESSDSMETSISTGGNSACSPDNMSSASGLDMGKIEEMEKMLKEAHAEKNRLMESREREMELRRQALEEERRRREQVERRLQSESARRQQLVEKEVKMREKQFSQARPLTRYLPIRKEDFDLKTHIESSGHGVDTCLHVVLSSKVCRGYLVKMGGKIKSWKKRWFVFDRLKRTLSYYVDKHETKLKGVIYFQAIEEVYYDHLRSAAKKRFFRFTMVTESPNPALTFCVKTHDRLYYMVAPSAEAMRIWMDVIVTGAEGYTQFMN

SEQ ID NO: 184814 - DNA, 4134 bp, Artificial Sequence
  derived and/or modified sequence
atggatgcccttaatcggaaccagatcggaccagggtgtcagacgcagaccatggtccagaaaggaccattagaccttatcgagaccggcaaaggccttaaagtgcaaaccgataaaccccacctcgtctcactcggcagtggtagacttagcaccgcaataacattactcccattggaggagggcaggacagtgatcgggagcgccgctcgcgacatcagcttgcagggtcccggcctagctcctgagcattgttatattgagaacttgcggggtacactgactctgtacccatgcggtaacgcctgcaccattgacggcctgcctgtacgtcagcccacccggctcacacagggttgtatgctgtgtctggggcagagtacctttctgcggtttaaccaccctgcagaggcaaagtggatgaagtcaatgatccccgccggagggcgggccccggggcccccgtattctcctgtgccagctgagtccgagtctctggtgaacggaaatcacacaccgcagacagctactagagggccctcagcctgtgcctcccatagctccttagtcagtagtattgagaaggatctgcaggaaatcatggatagtctggttcttgaggaacctggtgctgcaggcaaaaagccagctgctacatcccctctgagcccaatggctaatggtggtcgttacttgcttagtccgccaacatctcccggtgctatgtctgtgggttcctcttatgagaatacttctccggctttcagccccctgtcctcccctgcctcctccggctcatgcgcatctcactccccgagcggtcaggagcctggtcccagtgtgccaccccttgtcccagctaggtcctccagttatcacctggcacttcagccgccgcagtcccgtcctagcggcgccaggagcgagtcaccaaggttgtctagaaagggggggcacgagcggcctccaagtcctggcttacgaggtctgttgaccgactcaccagctgcaactgtgttagctgaggctcgtagagccaccgagtctccaaggctggggggccagctcccagtggtggccataagcctcagtgagtaccctgctagtggggccctgtctcaacccacatcgatcccaggctcacctaaattccagccccccgtgcccgcccctcggaacaagatcgggacactgcaggatcggccaccaagcccatttagagagccccccgggagcgagcgcgtccttaccacgtcaccatcacgccagttggtagggcgaacattttccgatgggcttgctacgcgcaccttgcagcctccagaatccccacgccttggcaggagggggctggatagtatgcgggagctcccaccactttccccttctctgagccggagagccctctcacctctgcctacgcgtacaactccagatccaaagttaaaccgagaagtggcagaatcaccccgacctagacgatgggctgctcacggcgcttcgcccgaagacttcagcctgaccctgggagcacgcggccggaggacacggagtccatcacccaccctgggggagtctctcgcgccccacaaaggtagtttctctggacgtctctcccctgcgtatagcctcggatcgctgaccggtgcctctccttgccagtcaccctgcgttcagaggaagctgagctctggagatctgagggtcccagtgacccgcgaacggaagaactcaataactgaaatttccgataatgaggatgaccttctcgagtatcacaggcggcagaggcaggagaggttaagggaacaggaaatggagaggcttgaaaggcagagactcgagacaattctgaacctgtgcgcagaatactcacgagcggatggggggcccgaagccggcgagctgccttctataggcgaggctacagctgcattggctttggctgggaggcggccttcacgagggctggccggcgcatctggcaggagctcagaagagccgggtgttgcaacacagagactatgggaatcaatggaaaggagcgacgaagaaaatctgaaggaggaatgttcgtccaccgaatccacacagcaggagcacgaggatgctcccagcaccaaactgcagggggaagttctcgcattggaggaggaaagggctcaggtgcttggccatgtggaacagctgaaagtacgtgttaaggagctggagcaacagctgcaggagagcgcccgtgaagctgagatggagagggccctgctgcaaggggaacgcgaagctgagagggccttactacaaaaagaacaaaaagcagtggatcagctccaggagaagctggttgccctggagacaggaatccagaaagaacgggataaggaagcggaagccctcgaaactgagacaaagctgttcgaagacttagagttccagcagttagagagagagtctagggttgaggaggagagagagctcgcagggcaaggtctgcttcgcagcaaggccgagcttctccgttccatagcgaagcggaaagagcggctggctattctggactctcaagctggacaaattagggcccaggcggtccaggaatctgagaggctagcgcgagataagaatgccagcttacagctgctccagaaagaaaaagaaaagctgacggttcttgaaagaagataccactctctcacaggcgggcgcccattcccgaaaaccacctccactttgaaggagatggaaaagctcttgctgcccgccgtggatctggaacagtggtaccaggagttaatggctgggctgggtaccgggccagcagccgcctcgccacacagcagtccaccgcctttgcccgcaaaagcctccaggcagctccaggtctacaggtcaaaaatggacggggaggccacttctcctctgcccagaactagatctgggccactaccttcatcgagcggctcttcgtcttcgagctctcagctaagcgtcgccacgttggggagatcaccctccccaaagtccgctctgctgactcagaatggcactggatcgctccccagaaatctcgccgccacactccaggatatagaaacaaagaggcaattagctctgcagcagaaaggccagcaggtcattgaagaacaacggagacgtctagcagaactgaaacagaaagccgctgcggaagctcagtgtcagtgggatgccttacatggcgcagcaccgtttcctgcaggaccaagtggttttccgccattgatgcatcactcaattcttcatcacttgcccgccggtcgggaaagaggcgaggagggtgagcacgcatacgacacattgtccctggagagtagcgactctatggagacgagcatcagtactggaggcaatagcgcttgttcacccgataatatgagcagcgcctctgggctggacatgggaaagatcgaggagatggagaaaatgctgaaagaggcccatgcagagaaaaatagacttatggaatcaagggagcgggaaatggagcttcggcgacaggcacttgaagaagaacggaggcggagggaacaggtggagaggcggctccagtctgaaagtgcgcgtcggcaacaactggtagagaaggaggtcaaaatgcgggaaaagcagttctcccaggctcgccccctaacgcgatatttgcctattagaaaggaagacttcgacttgaaaacacatattgaaagctctggacacggagtggatacttgtttgcatgtggttctaagttccaaagtgtgtagaggctatctggtgaaaatgggtggaaagatcaaaagctggaaaaagcgctggttcgtgttcgatcgcctcaagaggaccctgagttactatgttgataagcacgagaccaagctgaaaggagtcatttacttccaagctattgaggaggtgtattatgaccatctgagaagtgcagcaaagaagaggtttttcagatttaccatggttacagagtccccaaaccccgcgttaaccttctgcgtcaagacccacgaccggttgtactatatggtggccccatctgctgaggctatgcgtatctggatggacgttatcgtgaccggcgcggagggttatacacagtttatgaattag

SEQ ID NO: 184815 - DNA, 4134 bp, Artificial Sequence
  derived and/or modified sequence
atggatgccctgaacagaaaccagatcggccctggctgccagacccagaccatggtgcagaagggccccctggacctgattgaaacaggcaagggcctgaaggtgcagacagacaagccccacctggtgtccctgggcagcggccgcctgagcacagccatcaccctgctgcccctggaggagggccgcaccgtcatcggcagcgctgcccgggacatcagcctgcagggccctggcctggcccctgagcactgctacatcgagaacctgcggggcaccctgaccctgtacccctgtggaaatgcctgcaccattgatggcctgcctgtgcggcagcccacccggctgacccagggctgcatgctgtgcctgggccagagcaccttcctgcgcttcaaccaccctgctgaggccaagtggatgaagtccatgatcccagctgggggccgggcccctggccccccctacagccctgtgcctgctgagagcgagagcctggtgaatggaaaccacaccccccagacagccacccggggccccagcgcctgtgccagccacagcagcctggtgagcagcattgagaaggacctgcaggagatcatggacagcctggtgctggaggagcctggagctgctgggaagaagccagctgccaccagccccctgagccccatggccaatggaggccgctacctgctgagcccccccaccagccctggggccatgtctgtgggcagcagctatgagaacaccagccctgccttcagccccctgagcagccctgccagcagcggcagctgtgccagccacagccccagcggccaggagcccggccccagcgtgccccccctggtgcctgcccggagcagcagctaccacctggccctgcagcccccccagagccggcccagcggggcccggtctgagagcccccggctgagcaggaagggcggccacgagcggccccccagccctggcctgcggggcctgctgacagacagccctgctgccaccgtgctggccgaggcccggcgggccacagagagcccccggctgggcggccagctgcctgtggtggccatcagcctgtctgagtacccagccagcggggccctgagccagcccaccagcatccctggcagccccaagttccagccccctgtgcctgcccccaggaacaagattggcaccctgcaggaccggccccccagccccttccgggagcccccaggcagcgagcgggtgctgaccaccagccccagccggcagctggtgggccgcaccttcagtgatggcctggccaccaggaccctgcagcccccagagagcccccggctgggccggcggggcctggacagcatgagggagctgccccccctgagccccagcctgagccggcgggccctgagccccctgcccaccaggaccaccccagaccccaagctgaaccgggaggtggccgagagcccccggccccggcgctgggccgcccacggggccagccctgaggacttcagcctgaccctgggcgcccggggccgccgcaccaggagccccagccccaccctgggggagagcctggccccccacaagggcagcttcagcggccgcctgagccctgcctacagcctgggcagcctgaccggggccagcccctgccagagcccctgtgtgcagaggaagctgagcagcggggacctgcgggtgcctgtgacccgggagaggaagaacagcatcacagagatcagtgacaatgaagatgacctgctggagtaccaccggcggcagaggcaggagcggctgcgggagcaggagatggagcggctggagcggcagaggctggagaccatcctgaacctgtgtgccgagtacagcagagcagatggcggccctgaggccggggagctgcccagcattggagaggccacagctgccctggccctggccggcagaagacccagccggggcctggccggggccagcggccgcagcagcgaggagcccggggtggccacccagaggctgtgggagagcatggagaggagtgatgaggagaacctgaaggaggagtgcagcagcacagagagcacccagcaggagcatgaagatgcccccagcaccaagctgcagggcgaggtgctggccctggaggaggagcgggcccaggtgctgggccacgtggagcagctgaaggtgcgggtgaaggagctggagcagcagctgcaggagagcgcccgggaggccgagatggagcgggccctgctgcagggcgagcgggaggccgagcgggccctgctgcagaaggagcagaaggctgtggaccagctgcaggagaagctggtggccctggagaccggcatccagaaggagcgggacaaggaggccgaggccctggagacagagaccaagctgtttgaggacctggagttccagcagctggagcgggagagccgggtggaggaggagcgggagctggccggccagggcctgctgcggagcaaggccgagctgctgcggagcatcgccaagaggaaggagcggctggccatcctggacagccaggccggccagatccgggcccaggccgtgcaggagagcgagcggctggcccgggacaagaatgccagcctgcagctgctgcagaaggagaaggagaagctgactgtgctggagcggcgctaccacagcctgaccggcggccggcccttccccaagaccaccagcaccctgaaggagatggagaagctgctgctgcctgctgtggacctggagcagtggtaccaggagctgatggccggcctgggcaccggccctgctgctgccagcccccacagcagccccccacccctgcctgccaaggccagccggcagctgcaggtgtaccgcagcaagatggatggagaggccaccagccccctgcccaggaccaggagcggccccctgcccagcagcagcggcagcagcagcagcagcagccagctgtctgtggccaccctgggccgcagccccagccccaagagcgccctgctgacccagaatggaacaggcagcctgcccaggaacctggccgccaccctgcaggacatcgagaccaagaggcagctggccctgcagcagaagggccagcaggtgattgaggagcagaggcggcggctggccgagctgaagcagaaggctgctgctgaggcccagtgccagtgggatgccctgcatggagctgcccccttccctgctggccccagcggcttcccccccctgatgcaccacagcatcctgcaccacctgcctgctggccgggagcggggggaggagggggagcacgcctatgacaccctgagcctggagagcagtgacagcatggagaccagcatcagcactggaggcaacagcgcctgcagcccagacaacatgagcagcgccagcggcctggacatgggcaagattgaggagatggagaagatgctgaaggaggcccacgccgagaagaaccggctgatggagagccgggagcgggagatggagctgcggcggcaggccctggaggaggagaggagaagaagagagcaggtggagcggcggctgcagagcgagagcgcccggcggcagcagctggtggagaaggaggtgaagatgagggagaagcagttcagccaggcccggcccctgacccgctacctgcccatcagaaaagaagattttgacctgaagacccacatcgagagcagcggccacggcgtggacacctgcctgcacgtggtgctgagcagcaaggtgtgccggggctacctggtgaagatgggcggcaagatcaagtcctggaagaagcgctggtttgtgtttgaccggctgaagaggaccctgagctactacgtggacaagcatgagaccaagctgaagggcgtcatctacttccaggccatcgaggaggtgtactatgaccacctgcggtctgctgccaagaagcgcttcttccgcttcaccatggtgacagagagccccaacccagccctgaccttctgtgtgaagacccatgaccggctgtactacatggtggcccccagcgctgaggccatgaggatctggatggatgtgattgtgactggagctgagggctacacccagttcatgaactag

SEQ ID NO: 184816 - DNA, 4134 bp, Artificial Sequence
  derived and/or modified sequence
atggacgccctgaaccggaaccagatcggccccggctgccagacccagacaatggtgcagaagggcccactcgatctgatcgagacagggaagggtctgaaagtccagacagataaaccacacctcgtctccctaggttcgggccggctctcgactgccatcactctgctgcccttggaggaaggccgcaccgttatcgggtccgccgcccgcgatatctccctccaaggccctggactggccccagagcattgctatattgaaaatctccgcggaacactgactctgtacccatgtggcaatgcctgcacaatcgacggcttgcccgtacgccaaccaactcggcttacccaggggtgtatgttgtgtctcggtcagtcaacctttctgcggttcaaccatcctgccgaagcgaaatggatgaaatctatgattcccgcaggaggacgcgcgcccgggcccccatactcccctgtacccgctgagagtgagagcctcgtgaacggcaaccacactccacagaccgccactaggggcccatcggcgtgtgcttcccactcatctctcgtcagttcaatcgaaaaggacctgcaggaaatcatggacagcctggtgttggaagagcctggtgctgctgggaaaaagccagctgccacctctccattatccccgatggccaatggaggacggtacctgctgagccccccgacctcccccggcgccatgtcggtgggtagcagttacgaaaatacatcgccagccttttcacccctcagcagtcccgctagcagtggcagttgtgccagtcactccccctccggtcaggagcctggtccatctgtgccaccgctagtccctgccaggtcgagttcctatcacttggccctacagcctcctcagagccgaccttccggcgcccggtccgagtcacctagactgagcaggaagggggggcatgagaggccaccctctcctggactccgcggcctcctaaccgacagccctgcagcaacggtcctagcggaagccagacgtgctaccgaatcgccgcgccttgggggacagctgcccgtcgtcgccatttctctatccgagtatccagcttcgggcgccttgtcccagccgacatcaatccccgggtcccctaagtttcagccacctgtccctgccccccgcaacaagataggtactctgcaagaccgcccaccttccccttttagggaacctccagggagcgagagggtgctgactacgtccccgtctcgccagttggtaggcaggacattttcagacggactcgccactcgcacacttcagccccccgaatcgcctcggctgggacggcgcgggctcgatagtatgagggagctgcctcccctttctccgtccctttctaggagagctttatcaccactgccaacacggacaacccccgatcccaagctcaaccgcgaggtcgcagaatccccccggccacggcggtgggccgcccatggtgcatcaccagaggacttctctctgacgctgggagcccgcggaagacgcacacgatctccgtctcccaccctgggcgaatcccttgctccccataagggctcattttccgggaggctgtcccccgcttatagcctggggtcattgaccggagcgtcgccctgtcaatcaccatgcgtccagcgtaagctttctagcggtgacttgcgtgtgcccgtgacaagagaaaggaagaactcaattacagagatatcagataacgaggatgacctgctagagtaccacaggaggcagcgtcaggagcgactgcgtgagcaggagatggagaggctggaaaggcagcgtcttgagacaatcctcaacctctgtgccgaatactcacgcgcagatggcggcccagaggccggcgaattgcctagcattggcgaggccacggccgcactcgcactggccggtcgccgcccaagccgaggcctggccggggcttctgggcgctcttcagaggagcccggcgtggccacccagcggttatgggagtctatggagcgatcagacgaggagaatctgaaagaagagtgcagttcgactgagagtactcagcaagagcatgaggatgccccatctaccaaactgcagggtgaagtactagcattggaagaggagcgcgctcaggtgctgggccacgtcgagcagctcaaagtgcgcgtgaaggaactggagcagcagttacaggagtccgctcgggaggcagagatggagcgggctttacttcaaggtgagcgcgaagcagagcgtgccttgttacagaaggagcagaaggcggtggaccagcttcaggaaaagctggttgcactggaaactggtatccagaaggaaagggacaaggaggcagaggcactggaaacagaaaccaagctctttgaagacctggaatttcagcagctcgagcgggagtcaagagtcgaggaagaacgggaattggctggccagggtctcctccgcagcaaggctgagctgctgagaagtatcgccaaaagaaaagagcgcctcgctattctcgattctcaagcaggacagattagggctcaagccgtccaggaaagcgaacgccttgctagagacaaaaatgctagtctgcagcttctccagaaggaaaaggaaaaactaacagtactggaaagacgctaccactcacttacaggagggcgccctttcccaaagacaacatctactttgaaggaaatggaaaagttgttactccctgctgtcgatctagaacagtggtatcaagagctgatggctggactgggtactgggccagccgccgcttcgccgcattctagtccccctccacttcctgcgaaagcaagcaggcagcttcaggtgtacaggagcaagatggatggcgaggctacttcacccctgcccaggactagaagcggtccacttcctagctctagcgggagcagctcatcctcctcccagctatcagtagctaccctcggaaggtcaccctcaccaaaatcagccctgctgacccagaacggaacaggtagtctgccaagaaacctggccgcaacccttcaggacatcgagactaagcgacaattggctctccaacagaaaggtcagcaggttattgaagaacagaggcgccgtctcgcagaattgaagcagaaagcagcggctgaggcacaatgtcagtgggacgcgttacacggcgcggcccccttccccgctggaccatctgggtttccacctttgatgcaccattccattctgcaccacctgccggcagggcgcgagcggggagaggagggcgagcatgcctatgatacactttctctggaaagtagtgattctatggagacctcaatttccaccggggggaactctgcatgcagccccgataacatgtccagcgcctccggcctggatatgggcaaaatcgaggagatggagaagatgcttaaagaggctcatgctgagaaaaatcgcctaatggagtcaagagaaagggaaatggaacttcggagacaggccctcgaggaggagaggaggaggcgtgaacaagtggagcgaaggctccagagtgagtcggcacggcgtcagcagctggtggaaaaagaagtgaagatgcgagaaaaacagttttcccaggcacgccccctaacccggtacctgcctattagaaaagaggatttcgatttaaaaacacacatcgagagtagcggccacggagtcgatacatgtctgcacgtggtactttcctctaaggtgtgtcgtggataccttgttaaaatgggaggcaaaatcaaaagctggaagaagcggtggttcgtcttcgataggctgaaacggaccctcagctattacgtggataagcacgagaccaagttaaaaggggtgatctactttcaggccatcgaagaggtatactacgatcatctcaggtctgcggccaagaaacggtttttccgctttacaatggtgaccgagtcacccaatccagccctaacgttctgcgtgaaaacccacgacaggctttactacatggtcgctcccagcgcagaagctatgcgaatttggatggacgttatcgtgactggagcggaaggctacacccagttcatgaattag

SEQ ID NO: 184817 - DNA, 4134 bp, Artificial Sequence
  derived and/or modified sequence
atggacgctctgaacagaaatcaaatcgggccagggtgtcagacacagaccatggtgcagaaagggcctctcgacttaatagagacgggcaaggggttaaaggtgcagaccgacaaaccccaccttgtgagcctcgggagcggcagattatccacggcaataactcttctgccgttggaggagggtaggaccgttattggttccgctgcccgtgatatctccctgcagggacctggactggcgccagagcactgctatatcgaaaacttaagaggaacactgacgctctacccctgtggcaatgcatgcacaatagatggcttgcctgtgcggcagcccacgagattgactcaggggtgtatgttgtgtctcggccaatcaaccttcctgcgatttaaccaccctgccgaggcaaagtggatgaaaagtatgattcccgcaggaggtagggctcccggtcccccttatagccctgttcccgctgaaagtgaatcccttgttaacggtaaccatacaccgcagacagctacccgtgggccatctgcctgtgcaagccacagctctcttgttagttctatagaaaaagacctccaggagatcatggactctcttgtgctcgaggagcctggtgccgcagggaagaagcccgctgccacaagtcccctatccccaatggccaatgggggacgttacctgctgtcacctcctacgtccccgggagccatgagtgttgggtccagttatgagaacacaagtcctgccttttctccgctctccagccccgcttcttccgggagctgtgcgtctcatagcccttcagggcaggagcctggtccatctgtgcctcccctcgtcccagctcggtcatctagctatcacttggcgctgcagccccctcaaagccgcccatcaggcgcaaggagcgagagtcccagactgtccaggaaaggaggacatgaacgaccaccatcgccgggtctgcgcggtctgctgactgacagcccagcagctaccgttctggccgaagctcgacgagccactgaatcacccaggctggggggtcaactcccagtcgtcgccatctcccttagcgagtatcctgcatcaggagcactgtcacagcctacttccatcccagggtcccctaaattccagccaccggtgcctgcccctcgaaacaagatcgggacccttcaggacaggcctccttcaccttttagggagccgccaggctctgagcgggtccttacaaccagtccctctcgacaattggtaggcaggacattctcagatggacttgctactcgtactctgcaacctcccgagtctcccaggttgggaaggcgtgggctggactctatgcgcgagctgcctccactgtctccatccttatctcgccgagcactgagtcccctgcctactaggaccacccctgacccaaagctcaatcgggaagtagccgaatcacctagaccacgcaggtgggccgctcatggggcttcccccgaggattttagtttgacattaggcgcaagagggcgaaggacccgttccccatcccctaccctgggtgaatccctagcacctcacaaaggcagtttctctggccgactctcgcccgcatatagcctgggatccttgaccggagcttcaccttgccagtcaccgtgcgtgcagagaaaattgtccagcggggacctgcgagttcctgtcacacgcgagagaaagaacagtatcactgagatttccgataacgaagacgatctgctggagtatcacagaagacaaaggcaggaacgattacgcgaacaggagatggagaggcttgaacggcagagattagagaccatactcaacctctgtgcagaatactctcgggcagacggaggacctgaagctggcgaactaccaagtattggagaagctaccgctgccttagctctggccggacgcagaccaagcagaggactcgccggagcctcaggacgcagctccgaggaaccaggcgtagccacacaaaggctgtgggaaagtatggagaggagcgatgaggaaaatctcaaagaggagtgcagctcaaccgagtccacccagcaggagcatgaagatgccccaagcacgaagttgcaaggggaagtcctggctcttgaggaggagagagctcaggttttgggacatgtggagcagttaaaagttagagtaaaggaactggagcagcagcttcaggagagcgcccgagaggccgaaatggagcgcgcactattgcagggggagcgcgaagcagaaagagccctcctgcaaaaagagcagaaggctgttgatcaactgcaggagaagcttgtggccttagagaccggaatccagaaagagagagacaaggaagctgaggccctcgagaccgaaactaaactctttgaggatctggaattccagcagttagagcgtgaaagtcgggtggaggaggaaagagagctggccggacaggggctgctccggtctaaagccgagctgctgcgcagtatcgcaaagcgcaaggagagactggcgattctggattcccaggccggacagatccgcgcacaagctgtccaggaatccgagagactggctcgtgataagaatgcttctcttcagttgctacagaaggagaaagaaaagctgaccgtgctcgagcggagataccactcactgactgggggacgtccttttcccaagacaacgtctaccctaaaggagatggagaagttattgttgcccgctgtggatctggagcagtggtatcaagagttgatggcagggctcggcaccggacctgccgcagcatcaccccactcctctccccctcccctgcccgctaaggcatctcgccagctccaagtgtaccgctcaaagatggatggcgaagccacctctcccctgcccaggaccagatccggcccactcccctcaagcagtggtagttcttccagtagctctcagctatcagtggctacgcttggacgatccccctccccaaaatctgcgctgctgactcagaatggcactgggagtctgcctcgtaacctcgctgcaactctgcaggacatcgagacaaagcgccagttagcccttcagcaaaagggccagcaggtcattgaggaacagaggcgccgtcttgctgaacttaaacagaaggccgcagcagaggcccagtgccaatgggatgccctacacggtgccgctccatttccggcagggcctagtggcttcccacccttaatgcaccattccatactgcatcatttgcccgctggaagagagcgcggtgaggagggagaacacgcctatgacaccctgagtctcgaaagcagcgactcaatggagactagtatcagtaccgggggaaatagtgcgtgctcgcccgataacatgagtagcgcgagcggtctggacatgggcaaaatagaggagatggaaaagatgctcaaagaggctcacgccgagaagaatcgattaatggaatctcgcgaaagagagatggagttgagaaggcaggccttggaggaggaacggagacggcgagagcaggtggaacggcgactccagtccgaatctgcacggaggcaacaactggtcgagaaagaagtcaagatgagggagaagcagttctcacaagccagaccgctgacccgatatctgcccattaggaaggaagattttgacctcaagacccacatcgaatcaagcggacacggagtcgatacctgtttgcacgtggtactgagcagcaaggtgtgcagggggtatttggttaagatgggtggcaagatcaaatcatggaagaaacgttggtttgtgttcgatcggttgaagcgcacgctgtcctactacgtggacaaacatgagacgaaacttaagggagtcatttacttccaggcaatcgaggaagtgtactacgatcatcttcgaagcgcggcaaagaagcggtttttccggttcacaatggttaccgagtctcccaatcccgcactgacgttttgcgtgaaaacgcatgaccggctgtactacatggttgctccaagcgccgaagccatgcgtatctggatggacgtaatagttactggagccgagggctacactcaattcatgaactag

SEQ ID NO: 184818 - DNA, 4134 bp, Artificial Sequence
  derived and/or modified sequence
atggacgccctgaacagaaaccagatcggccccggctgccagacccagaccatggtgcagaagggccccctggacctgatcgagaccggcaagggcctgaaggtgcagaccgacaagccccacctggtgagcctgggcagcggcagactgagcaccgccatcaccctgctgcccctggaggagggcagaaccgtgatcggcagcgccgccagagacatcagcctgcagggccccggcctggcccccgagcactgctacatcgagaacctgagaggcaccctgaccctgtacccctgcggcaacgcctgcaccatcgacggcctgcccgtgagacagcccaccagactgacccagggctgcatgctgtgcctgggccagagcaccttcctgagattcaaccaccccgccgaggccaagtggatgaagagcatgatccccgccggcggcagagcccccggccccccctacagccccgtgcccgccgagagcgagagcctggtgaacggcaaccacaccccccagaccgccaccagaggccccagcgcctgcgccagccacagcagcctggtgagcagcatcgagaaggacctgcaggagatcatggacagcctggtgctggaggagcccggcgccgccggcaagaagcccgccgccaccagccccctgagccccatggccaacggcggcagatacctgctgagcccccccaccagccccggcgccatgagcgtgggcagcagctacgagaacaccagccccgccttcagccccctgagcagccccgccagcagcggcagctgcgccagccacagccccagcggccaggagcccggccccagcgtgccccccctggtgcccgccagaagcagcagctaccacctggccctgcagcccccccagagcagacccagcggcgccagaagcgagagccccagactgagcagaaagggcggccacgagagaccccccagccccggcctgagaggcctgctgaccgacagccccgccgccaccgtgctggccgaggccagaagagccaccgagagccccagactgggcggccagctgcccgtggtggccatcagcctgagcgagtaccccgccagcggcgccctgagccagcccaccagcatccccggcagccccaagttccagccccccgtgcccgcccccagaaacaagatcggcaccctgcaggacagaccccccagccccttcagagagccccccggcagcgagagagtgctgaccaccagccccagcagacagctggtgggcagaaccttcagcgacggcctggccaccagaaccctgcagccccccgagagccccagactgggcagaagaggcctggacagcatgagagagctgccccccctgagccccagcctgagcagaagagccctgagccccctgcccaccagaaccacccccgaccccaagctgaacagagaggtggccgagagccccagacccagaagatgggccgcccacggcgccagccccgaggacttcagcctgaccctgggcgccagaggcagaagaaccagaagccccagccccaccctgggcgagagcctggccccccacaagggcagcttcagcggcagactgagccccgcctacagcctgggcagcctgaccggcgccagcccctgccagagcccctgcgtgcagagaaagctgagcagcggcgacctgagagtgcccgtgaccagagagagaaagaacagcatcaccgagatcagcgacaacgaggacgacctgctggagtaccacagaagacagagacaggagagactgagagagcaggagatggagagactggagagacagagactggagaccatcctgaacctgtgcgccgagtacagcagagccgacggcggccccgaggccggcgagctgcccagcatcggcgaggccaccgccgccctggccctggccggcagaagacccagcagaggcctggccggcgccagcggcagaagcagcgaggagcccggcgtggccacccagagactgtgggagagcatggagagaagcgacgaggagaacctgaaggaggagtgcagcagcaccgagagcacccagcaggagcacgaggacgcccccagcaccaagctgcagggcgaggtgctggccctggaggaggagagagcccaggtgctgggccacgtggagcagctgaaggtgagagtgaaggagctggagcagcagctgcaggagagcgccagagaggccgagatggagagagccctgctgcagggcgagagagaggccgagagagccctgctgcagaaggagcagaaggccgtggaccagctgcaggagaagctggtggccctggagaccggcatccagaaggagagagacaaggaggccgaggccctggagaccgagaccaagctgttcgaggacctggagttccagcagctggagagagagagcagagtggaggaggagagagagctggccggccagggcctgctgagaagcaaggccgagctgctgagaagcatcgccaagagaaaggagagactggccatcctggacagccaggccggccagatcagagcccaggccgtgcaggagagcgagagactggccagagacaagaacgccagcctgcagctgctgcagaaggagaaggagaagctgaccgtgctggagagaagataccacagcctgaccggcggcagacccttccccaagaccaccagcaccctgaaggagatggagaagctgctgctgcccgccgtggacctggagcagtggtaccaggagctgatggccggcctgggcaccggccccgccgccgccagcccccacagcagccccccccccctgcccgccaaggccagcagacagctgcaggtgtacagaagcaagatggacggcgaggccaccagccccctgcccagaaccagaagcggccccctgcccagcagcagcggcagcagcagcagcagcagccagctgagcgtggccaccctgggcagaagccccagccccaagagcgccctgctgacccagaacggcaccggcagcctgcccagaaacctggccgccaccctgcaggacatcgagaccaagagacagctggccctgcagcagaagggccagcaggtgatcgaggagcagagaagaagactggccgagctgaagcagaaggccgccgccgaggcccagtgccagtgggacgccctgcacggcgccgcccccttccccgccggccccagcggcttcccccccctgatgcaccacagcatcctgcaccacctgcccgccggcagagagagaggcgaggagggcgagcacgcctacgacaccctgagcctggagagcagcgacagcatggagaccagcatcagcaccggcggcaacagcgcctgcagccccgacaacatgagcagcgccagcggcctggacatgggcaagatcgaggagatggagaagatgctgaaggaggcccacgccgagaagaacagactgatggagagcagagagagagagatggagctgagaagacaggccctggaggaggagagaagaagaagagagcaggtggagagaagactgcagagcgagagcgccagaagacagcagctggtggagaaggaggtgaagatgagagagaagcagttcagccaggccagacccctgaccagatacctgcccatcagaaaggaggacttcgacctgaagacccacatcgagagcagcggccacggcgtggacacctgcctgcacgtggtgctgagcagcaaggtgtgcagaggctacctggtgaagatgggcggcaagatcaagagctggaagaagagatggttcgtgttcgacagactgaagagaaccctgagctactacgtggacaagcacgagaccaagctgaagggcgtgatctacttccaggccatcgaggaggtgtactacgaccacctgagaagcgccgccaagaagagattcttcagattcaccatggtgaccgagagccccaaccccgccctgaccttctgcgtgaagacccacgacagactgtactacatggtggcccccagcgccgaggccatgagaatctggatggacgtgatcgtgaccggcgccgagggctacacccagttcatgaactag

SEQ ID NO: 184819 - protein, 235 aa, Artificial Sequence
  derived and/or modified sequence
MNPVYSPVQPGAPYGNPKNMAYTGYPTAYPAAAPAYNPSLYPTNSPSYAPATLLMKQAWPQNSSSCGTEGTFHLPVDTGTENRTYQASSAAFRYTAGTPYKVPPTQSNTAPPPYSPSPNPYQTAMYPIRSAYPQQNLYAQGAYYTQPVYAAQPHVIHHTTVVQPNSIPSAIYPAPVAAPRTNGVAMGMVAGTTMAMSAGTLLTTPQHTAIGAHPVSMPTYRAQGTPAYSYVPPHW

SEQ ID NO: 184820 - DNA, 708 bp, Artificial Sequence
  derived and/or modified sequence
atgaaccccgtgtacagccccgtgcagcccggcgccccctacggcaaccccaagaacatggcctacaccggctaccccaccgcctaccccgccgccgcccccgcctacaaccccagcctgtaccccaccaacagccccagctacgcccccgccaccctgctgatgaagcaggcctggccccagaacagcagcagctgcggcaccgagggcaccttccacctgcccgtggacaccggcaccgagaacagaacctaccaggccagcagcgccgccttcagatacaccgccggcaccccctacaaggtgccccccacccagagcaacaccgccccccccccctacagccccagccccaacccctaccagaccgccatgtaccccatcagaagcgcctacccccagcagaacctgtacgcccagggcgcctactacacccagcccgtgtacgccgcccagccccacgtgatccaccacaccaccgtggtgcagcccaacagcatccccagcgccatctaccccgcccccgtggccgcccccagaaccaacggcgtggccatgggcatggtggccggcaccaccatggccatgagcgccggcaccctgctgaccaccccccagcacaccgccatcggcgcccaccccgtgagcatgcccacctacagagcccagggcacccccgcctacagctacgtgcccccccactggtag

SEQ ID NO: 184821 - DNA, 708 bp, Artificial Sequence
  derived and/or modified sequence
atgaatcccgtctatagtcctgttcagcccggggccccgtatggcaatccaaagaatatggcatataccggttatcccactgcctatccggcggccgcccctgcatacaacccgtccctgtacccaacaaacagcccctcttacgcccccgcgaccctgctgatgaagcaggcatggccacagaacagcagcagttgtggtacagaagggacctttcacctcccggtggatactgggaccgaaaaccgcacataccaggcctcaagcgcagctttccgctacacagctggtacaccatataaagtacctcccacgcagtccaacaccgcacctcccccatattctccgtctcccaatccctatcagacggccatgtaccccattcgctccgcgtatccccaacagaacctgtacgcccagggagcctattatacccaacctgtgtatgctgctcagccccatgtgattcatcacactacagtggtgcagccaaacagcattcccagcgctatttatccggccccggttgccgcgccccggaccaatggcgtcgcgatggggatggtcgcaggaactaccatggccatgtccgcaggcacgctacttactaccccccagcacacggcaatcggagctcatccggtgagcatgcctacttatagagctcaaggcaccccagcctatagttacgtgcctccgcattggtag

SEQ ID NO: 184822 - DNA, 1767 bp, Artificial Sequence
  derived and/or modified sequence
gagcggtcccccgcctcctccctccgcctcctcctccctcgcccgcagccgagcgtcccctccccccacccgtcgggctcctcggcggctactgcagaggattcagagccgagtcgctgaggaggaggctccggtccccgcgcgccatccgccaccctactggacacgggcgagagcgtcgccgccgtagcctccggagaagacaagggcatcgccgcctcagccgccgccgccgccgttttcgcctgcagctgctcaccggatcctcagtcttccacaatgaaccctgtttacagccccgtgcagcctggggctccttatggcaaccctaagaacatggcctacacgggttaccccacagcctatccagcagctgcccctgcctacaatcccagcctgtaccccaccaatagtcccagttatgctccagcaactctgctgatgaaacaggcctggccacagaactcgtcttcctgtggcactgaaggcaccttccacctcccagtggacaccgggaccgagaaccgaacttaccaagcatcctctgcggctttcagatatactgcggggacaccatacaaggtcccaccgacccagagtaacactgctccacccccctactccccatcacccaacccctatcagacggccatgtatccaatcagaagtgcctacccccagcagaatctgtatgcccagggagcctactacacacagccggtgtatgctgcccagcctcatgtcatccaccataccacggtcgtccagcccaacagcattccctctgctatctacccagcacctgttgccgccccgaggaccaacggtgtggccatgggcatggtggcaggcaccaccatggcaatgtcagcaggtaccctgctgactacaccccagcacacggcgattggggcacaccctgtctccatgccaacatatagggcccaaggaacccctgcgtacagctacgtgcccccacactggtaaagcctgcagcccatccaaatctggagtcacacattgtatgcaactactcaagtcttacaccggtgctggagcagttccctagcagcaccacctctatttgcaagaagagacaacggaagtgcaagggtcactttatgcatctttaatggttttgatttttatttttggtttttgtaaaagctgctttttctaatctcctgcctctccccaactgtccccctcttagcccctgcccttccagctctatccccttcctcctacctgaccaggccatgtcctctctgctcttccctaagtgtcctgtccctggggatcccagtctagaggcaagcagagagtagggtttattgcagtggttcatctgaaggctggattccatttgaagagcataaacagatgtggtccagggtaggaactcagagctgttgagcaggctacatctctaggggagtgttctggttgttttttcttaagcaagattagttcaggacattcccatgtcccagacacaaatgaaatgtctcctgagaaccattgcaacagaccaagaacaaaaccacctgagtatgtaggcgtgttattagcagcttaataccccaggctgagaacctggggaaaaaagtctttagaatttgggggagggtggggggagggagggcattgtggggaaggagagggaagaagggaggagcggtgcttgcctcatggctttggtttgaaaggtctctggccaaagcatctggccctggaccttctgatttgcacagtgatgttaactga

SEQ ID NO: 184823 - DNA, 708 bp, Artificial Sequence
  derived and/or modified sequence
atgaaccctgtgtacagccctgtgcagcccggggccccctacggcaaccccaagaacatggcctacacaggctaccccacagcctacccagctgctgccccagcctacaaccccagcctgtaccccaccaacagccccagctatgccccagccaccctgctgatgaagcaggcctggccccagaacagcagcagctgtggcacagagggcaccttccacctgcctgtggacaccggcacagaaaatagaacctaccaggccagcagcgctgccttccgctacacagctggcaccccctacaaggtgccccccacccagagcaacacagcccccccaccctacagccccagccccaacccctaccagacagccatgtaccccatccgcagcgcctacccccagcagaacctgtatgcccagggcgcctactacacccagcctgtgtatgctgcccagccccacgtgatccaccacaccaccgtggtgcagcccaacagcatccccagcgccatctacccagcccctgtggccgcccccaggaccaacggggtggccatgggcatggtggccggcaccaccatggccatgtctgctggcaccctgctgaccaccccccagcacacagccatcggggcccaccctgtgtccatgcccacctaccgggcccagggcaccccagcctacagctatgtgcccccccactggtag

SEQ ID NO: 184824 - DNA, 708 bp, Artificial Sequence
  derived and/or modified sequence
atgaaccccgtgtacagccccgtgcagcccggcgccccctacggcaatcccaagaatatggcttatactggataccctacagcatacccggcagccgcacctgcctataacccttccctttaccccaccaactcaccgagctatgcccccgcgaccctcctgatgaagcaagcctggccacagaactcatcttcatgcgggactgaggggacctttcatttgccagtcgacaccggcacggagaacaggacatatcaagctagctccgcggcctttagatatactgccggaacaccgtataaggtcccccccactcagagcaataccgccccaccaccctatagcccgtcacctaatccataccagacggccatgtatccaatccggagtgcctatccccagcagaatctttatgcccagggggcttattatactcagcctgtgtacgcagcccagccccatgtgattcaccataccaccgtggtgcagccgaacagtattcctagcgccatctaccctgcacctgtggccgcaccgcggacaaacggtgttgctatgggcatggtcgcggggaccacaatggccatgtccgcggggacactcctgacgaccccccagcacacggcgataggcgcacacccagtcagcatgccgacctatagggctcagggtacccccgcgtattcctacgtgcctccccattggtag

SEQ ID NO: 184825 - DNA, 708 bp, Artificial Sequence
  derived and/or modified sequence
atgaaccccgtgtatagtcctgtccagccaggtgcaccttatggcaatccaaaaaatatggcttatacaggctatccaacagcctacccagcagcagctccagcctacaacccatcattgtaccctacaaattcaccatcttatgcacccgctactctattgatgaagcaagcatggccccaaaattccagctcttgcggaacggagggtactttccatttaccagttgataccgggaccgagaatcgcacgtaccaagcctcatccgctgcctttcggtatacagccggaactccatacaaggttcctccgactcagtccaataccgctccgccaccctattctccctcacccaacccttaccagaccgcaatgtaccccattaggtcggcttatcctcagcagaacctctatgcgcagggcgcttattatacccaacccgtatatgctgcgcagccccatgtgattcatcacactacagtagtgcaaccaaattcaatccctagtgccatttatccagctcctgtagctgcaccgcgaaccaatggggttgcaatgggaatggtagctggcactacgatggcaatgtcagccggaactctgctcacaactccacaacacaccgccattggggctcaccctgtgtcgatgccgacttaccgagcacagggaacaccagcatactcatacgtacctccccactggtag

SEQ ID NO: 184826 - protein, 525 aa, Artificial Sequence
  derived and/or modified sequence
MAAVVLAATRLLRGSGSWGCSRLRFGPPAYRRFSSGGAYPNIPLSSPLPGVPKPVFATVDGQEKFETKVTTLDNGLRVASQNKFGQFCTVGILINSGSRYEAKYLSGIAHFLEKLAFSSTARFDSKDEILLTLEKHGGICDCQTSRDTTMYAVSADSKGLDTVVALLADVVLQPRLTDEEVEMTRMAVQFELEDLNLRPDPEPLLTEMIHEAAYRENTVGLHRFCPTENVAKINREVLHSYLRNYYTPDRMVLAGVGVEHEHLVDCARKYLLGVQPAWGSAEAVDIDRSVAQYTGGIAKLERDMSNVSLGPTPIPELTHIMVGLESCSFLEEDFIPFAVLNMMMGGGGSFSAGGPGKGMFSRLYLNVLNRHHWMYNATSYHHSYEDTGLLCIHASADPRQVREMVEIITKEFILMGGTVDTVELERAKTQLTSMLMMNLESRPVIFEDVGRQVLATRSRKLPHELCTLIRNVKPEDVKRVASKMLRGKPAVAALGDLTDLPTYEHIQTALSSKDGRLPRTYRLFR

SEQ ID NO: 184827 - protein, 146 aa, Artificial Sequence
  derived and/or modified sequence
MAAVVLAATRLLRGSGSWGCSRLRFGPPAYRRFSSGGAYPNIPLSSPLPGVPKPVFATVDGQEKFETKVTTLDNGLRVASQNKFGQFCTVGILINSGSRYEAKYLSGIAHFLEKLAFSSTARFDSKDEILLTLEKHGGICDCQTSR

SEQ ID NO: 184828 - DNA, 1578 bp, Artificial Sequence
  derived and/or modified sequence
atggccgcagtcgtgttggccgccactagattactgcgaggcagtgggtcctggggttgttcgcgcctaagattcgggccacctgcctatcgcagatttagcagcggcggagcctacccaaacataccactcagctcccctctcccaggggttccaaaacccgtgtttgccaccgtagatggacaggagaagttcgaaacaaaggtcacaactcttgataacggtctgagggtggcatcacagaataagttcggtcagttttgtaccgtggggatcctgatcaacagtggctctagatacgaagccaagtacctatccggaattgcacactttcttgaaaagttggccttcagttctactgcaaggttcgactcaaaagacgaaatcttgttgaccctcgagaaacatgggggcatctgcgattgccagacctcccgtgataccactatgtacgcggtttctgcagactcaaaagggttagacaccgtcgtagctttgctcgccgacgtagtccttcaaccccgcctgaccgacgaggaggtggagatgacgcgcatggcagtccagttcgaactcgaggatctaaatttacggccagatcctgaaccgctgcttaccgagatgatccatgaggccgcatacagggaaaataccgtcggcctgcacagattttgccctaccgagaatgtagccaaaatcaatagagaggtgctccactcttatctcagaaactattatacaccagaccgtatggtcctggccggagttggtgtcgaacatgagcacctggtggattgtgcacgtaaatatctgctgggagtgcagcccgcctgggggagtgccgaagctgtcgatatcgacaggtccgtcgcgcagtataccggtgggattgctaagctagaaagagatatgagcaacgtttccctggggcccactcctatcccagagcttacacatattatggtgggtttagagagttgtagcttccttgaggaggacttcattccttttgcagtgttgaacatgatgatggggggaggcggtagtttctccgcaggtggaccaggaaagggcatgtttagccgcctgtacctgaatgtcctgaatcgtcaccactggatgtataatgccacatcctaccaccattcttatgaagataccgggctgctgtgcattcacgcaagcgccgatccgaggcaggtgcgtgagatggttgaaatcattaccaaggagtttatcctcatgggtgggacagtggataccgtcgaacttgagcgggctaagacacagctgactagtatgcttatgatgaatctggaatccaggccggtgattttcgaagatgttggccgacaggttctggctacaagatctcggaagttgccgcacgaattgtgtaccctgatccgaaatgtcaagcccgaagatgtgaagcgggtagcttccaaaatgctccgtgggaaaccagccgtagccgcactgggcgatctgacagatctccctacatacgaacatatccagaccgccctgtcctccaaagacggtcggcttccccggacatatcggttattccggtag

SEQ ID NO: 184829 - DNA, 441 bp, Artificial Sequence
  derived and/or modified sequence
atggcagccgtggtgctcgcagccactaggttgttgaggggaagcggatcctggggttgctcacgtctgcggttcgggccccccgcttacaggcgattttcctctggaggagcctacccgaacattcctttgtctagtcccctccccggcgtgccgaagcctgtgtttgccaccgtggacggccaggaaaagttcgaaacaaaggtcaccaccctcgacaatggcctgcgggtggcttcacagaacaaattcggccagttttgtactgtcggcattctgatcaattctggtagccggtacgaggcgaagtacttgtctggcattgcacactttctggagaaactggcctttagctcaacagctcgctttgacagcaaagacgaaatcctcttgacgctggagaagcacggcgggatctgtgattgtcagacttcaagatag

SEQ ID NO: 184830 - DNA, 1578 bp, Artificial Sequence
  derived and/or modified sequence
atggctgctgtggtgctggccgccacccggctgctgcggggcagcggctcctggggctgcagccggctgcgctttggacctccagcctaccgccgcttcagcagtggaggagcctaccccaacatccccctgagcagccccctgcccggggtgcccaagcctgtgtttgccaccgtggatggccaggagaagtttgagaccaaggtgaccaccctggacaatggcctgcgggtggccagccagaacaagtttggccagttctgcaccgtgggcatcctgatcaacagcggcagccgctatgaggccaagtacctgagcggcatcgcccacttcctggagaagctggccttcagcagcacagccaggtttgacagcaaggatgagatcctgctgaccctggagaagcacggcggcatctgtgactgccagaccagccgggacaccaccatgtatgctgtgtctgctgacagcaagggcctggacacagtggtggccctgctggctgatgtggtgctgcagccccggctgacagatgaggaggtggagatgaccaggatggctgtgcagtttgagctggaggacctgaacctgcggccagaccctgagcccctgctgacagagatgatccacgaggccgcctaccgggagaacacagtgggcctgcaccgcttctgccccacagaaaatgtggccaagatcaaccgggaggtgctgcacagctacctgaggaactactacaccccagacaggatggtgctggccggcgtgggcgtggagcacgagcacctggtggactgtgccaggaagtacctgctgggcgtgcagcctgcctggggcagcgctgaggccgtggacatcgacagatctgtggcccagtacacaggaggcatcgccaagctggagcgggacatgagcaatgtgtccctgggccccacccccatccctgagctgacccacatcatggtgggcctggagagctgcagcttcctggaggaggacttcatcccctttgctgtgctgaacatgatgatgggcggcggcggcagcttctctgctgggggccctgggaagggcatgttcagccggctgtacctgaatgtgctgaacagacaccactggatgtacaatgccaccagctaccaccacagctatgaggacaccggcctgctgtgcatccacgccagcgctgacccccggcaggtgcgggagatggtggagatcatcaccaaggagttcatcctgatgggcggcaccgtggacacagtggagctggagcgggccaagacccagctgacctccatgctgatgatgaacctggagagcaggcctgtgatctttgaagatgtgggccggcaggtgctggccaccaggagcaggaagctgccccatgagctgtgcaccctcatcagaaatgtgaagccagaagatgtgaagagggtggccagcaagatgctgcggggcaagccagctgtggccgccctgggggacctgacagacctgcccacctatgagcacatccagacagccctgagcagcaaggatggccgcctgcccaggacctaccgcctcttcagatag

SEQ ID NO: 184831 - DNA, 441 bp, Artificial Sequence
  derived and/or modified sequence
atggctgctgtggtgctggccgccacccggctgctgcggggcagcggctcctggggctgcagccggctgcgctttggacctccagcctaccgccgcttcagcagtggaggagcctaccccaacatccccctgagcagccccctgcccggggtgcccaagcctgtgtttgccaccgtggatggccaggagaagtttgagaccaaggtgaccaccctggacaatggcctgcgggtggccagccagaacaagtttggccagttctgcaccgtgggcatcctgatcaacagcggcagccgctatgaggccaagtacctgagcggcatcgcccacttcctggagaagctggccttcagcagcacagccaggtttgacagcaaggatgagatcctgctgaccctggagaagcacggcggcatctgtgactgccagaccagcaggtag

SEQ ID NO: 184832 - DNA, 1578 bp, Artificial Sequence
  derived and/or modified sequence
atggccgccgtggtgctggccgccacccggctgctgcggggcagcgggtcttggggctgcagcagactgcgatttgggccccctgcctacagacgtttttcgtctggcggtgcataccccaacatccctctcagctcaccgcttcctggagtacccaagccagtgtttgcaacagtggatggacaggaaaaattcgagaccaaagtaacaacactagataatggcctgcgcgttgcaagtcagaacaagtttgggcagttctgtacggtgggtatactgatcaatagtggcagccgttacgaggctaaatatctctccggaatcgctcatttcctggaaaagctagccttttcctcaaccgcccggtttgactctaaggacgagatcttgctcacactcgagaagcacggggggatttgtgattgtcaaacctctcgcgacacgacgatgtacgctgtttccgcagattccaaagggttggacactgtggttgctctgctggccgacgtggtattacaaccccgccttacggatgaggaggtcgaaatgacaaggatggcggtgcagttcgagttagaagacttaaacttgcgcccggaccctgagccgctgctgaccgagatgatccacgaagccgcttatcgcgaaaatactgtgggccttcacaggttttgccctaccgaaaatgtggctaagatcaatagggaggtgctgcatagctacttaagaaactattacacacctgaccgtatggtcctggcgggcgtgggcgtcgagcacgaacaccttgtcgactgtgctaggaagtacttgctaggcgtccaaccagcttggggcagcgccgaggctgtcgacattgaccgttctgttgcccagtacactggcggaattgccaagctggaacgcgatatgagcaatgtttccctgggacccactcctatcccagaactcactcacatcatggttgggctggaatcatgctccttcttggaagaggacttcatcccctttgccgtgctgaatatgatgatgggagggggagggtccttctcagccggggggccggggaaaggaatgttcagccggctgtacttgaatgtgctcaaccggcaccactggatgtacaatgctacctcatatcaccactcctatgaagacacagggctgctgtgtatccatgcctctgctgacccaaggcaagttcgagaaatggtcgagattattaccaaagagtttatcctgatgggagggaccgtggacaccgtggagttggagagagccaagacccaactgacttcaatgctgatgatgaacctagaatcgaggccagttatattcgaggatgttggtcggcaagtgctagcaacgcgcagccggaaactgccccatgagctgtgcacacttatccgaaatgtcaaacccgaggatgtcaagcgcgtagcatccaagatgctcagaggtaaaccagcagtcgctgccctcggggacctgaccgatttgccaacctatgagcatattcaaacagccttatcgtccaaggacggccgcttgccccgcacctaccggctctttcggtag

SEQ ID NO: 184833 - DNA, 441 bp, Artificial Sequence
  derived and/or modified sequence
atggccgccgtggtgctggccgccacccggctgctgcggggcagcggcagttggggatgtagtagattgcggttcgggccgccagcgtacaggcgcttttcatccggtggtgcttatccaaacattcccctctcctctcccctcccgggtgtaccaaagcctgtctttgccaccgtggatggccaggagaagtttgagacgaaggtcacaactctggataacggactgagagtcgcttcacagaacaagtttggacaattctgcaccgtagggattcttattaattcaggcagtcggtacgaagcaaagtatctctcaggcatagcccattttcttgagaagctcgctttttcctccacagctcggtttgacagcaaggatgaaattctcctgacacttgagaagcatgggggaatctgcgattgccagacttctcgttag

SEQ ID NO: 184834 - DNA, 2084 bp, Artificial Sequence
  derived and/or modified sequence
agacgcaagatggcggctgtggtgctggcggcgacgcggttgctgcggggctcgggttcttggggctgttcgcggctgaggtttggacctcctgcgtacagacggtttagtagtggtggtgcctatcccaacatccccctctcttctcccttacctggagtacccaagcctgtttttgctacagttgatggacaggaaaagtttgaaaccaaagtaaccacattggataatgggcttcgcgtggcatctcagaataagtttggacagttttgtacagtaggaattcttatcaattcaggatcgagatatgaagcgaaataccttagtggaattgctcactttttggaaaaattggcattttcgtctactgctcgatttgacagcaaagatgaaattctgcttacgttggaaaagcatgggggtatctgtgactgccagacatcaagagacaccaccatgtatgctgtgtctgctgatagcaaaggcttggacacggtggttgccttactggctgatgtggttctgcagccccggctaacagatgaagaagtcgagatgacgcggatggcggtccagtttgagctggaggacctgaacctgcggcctgacccagagccacttctcaccgagatgattcatgaagcggcttacagggagaacacagttggcctccaccgtttctgccccacagaaaacgtagcaaagatcaaccgagaggtgctgcattcctacctgaggaactactacactcccgaccgcatggtgctggccggcgtgggcgtggagcacgagcatctggtggactgtgcccggaagtacctcctgggggtccagccggcctgggggagcgcagaggccgtggatattgacagatctgtggcccagtacactggggggattgccaagctagaaagagacatgtccaatgtcagcctgggcccgacccccatccccgagctcacgcacatcatggttggactggagagctgctccttcctggaggaggacttcatcccctttgcagtgttgaacatgatgatgggcggaggtggctccttctcggctggtgggcccggcaagggcatgttctccaggctctacctcaacgtgctcaacaggcaccactggatgtataacgcgacctcctaccaccacagctacgaggacactggcctcctttgcatccatgccagcgccgacccaagacaggttcgagaaatggtagaaatcatcacaaaggagtttattttaatgggcggaaccgtggacacggtggagctggaacgagccaagacgcagctgacatcaatgctcatgatgaacctggaatccaggcctgtgatcttcgaggatgtggggaggcaggtgctggccactcgctccagaaagctgccgcacgagctgtgcacgctcatccgcaacgtgaagccggaagatgtgaagagagtcgcttctaagatgctccgagggaagccggcagtggccgccctgggtgacctgactgacctgcccacgtatgagcacatccagaccgccctgtcgagtaaggacgggcgcctgcccaggacgtaccggctcttccggtagaaccgctccccggcctgacagacccagggagctgcagctggagcccgttcccgtgcgtgttagtttggacacgaatttagtctaaaaagctgtctggttgtataaacggtgcaaacaatgtcgccacagcacccacgcggtttgcattcttttggaactcaatgtgccgatcagtggagtcagtatcgagcctgaccaccgcaagccaggaagcaggtgaagtgcccagcgctggagtgcagcgtgccacgaggagggcggtcggtgcttccctcctcgggctgtgggcacatggggccccgcaggttccttggaggagccctgagctgggaggcagcaaaggctgacctatcaaagcctcccggaggccaccgtgctgggtaccaggactcacctctgacaagcaggagaaggtaagggcccggtcagctccaaggagcgcgctccacgcgcgtgcacacagcttccctggtaataaagagctggcatctttctta

SEQ ID NO: 184835 - DNA, 713 bp, Artificial Sequence
  derived and/or modified sequence
ggagacgcaagatggcggctgtggtgctggcggcgacgcggttgctgcggggctcgggttcttggggctgttcgcggctgaggtttggacctcctgcgtacagacggtttagtagtggtggtgcctatcccaacatccccctctcttctcccttacctggagtacccaagcctgtttttgctacagttgatggacaggaaaagtttgaaaccaaagtaaccacattggataatgggcttcgcgtggcatctcagaataagtttggacagttttgtacagtaggaattcttatcaattcaggatcgagatatgaagcgaaataccttagtggaattgctcactttttggaaaaattggcattttcgtctactgctcgatttgacagcaaagatgaaattctgcttacgttggaaaagcatgggggtatctgtgactgccagacatcaagatgaagaagtcgagatgacgcggatggcggtccagtttgagctggaggacctgaacctgcggcctgacccagagccacttctcaccgagatgattcatgaagtaaaatgtcaaactcgagaatgcccccgcatctcgaacagtggtcctcgggacaccaggggtggtggggagggtgcctccgtgatgttgtccttgcaggttatggatatatacagaacatttttttgttttttgagatgaggtttctccacattgcctacgct

SEQ ID NO: 184836 - DNA, 1578 bp, Artificial Sequence
  derived and/or modified sequence
atggccgcagtggtgttagcagctaccagactcctgagaggatccgggtcctggggatgtagtcggctgcgcttcggtcctccggcatatcggcgtttcagctctggaggcgcttatccgaacatcccgttgtcaagcccgctccccggagtaccaaaacctgtctttgccacagtggatggtcaggaaaagttcgagaccaaagtaacaacgctggacaatggcctgcgggttgcgtcacagaacaaattcggccaattttgcaccgtgggtattttgatcaactccgggagcagatacgaagcaaaatatctaagcggcatcgctcattttcttgagaaactggcattcagctccacagctcggttcgattccaaagacgaaatcctgctgacgcttgaaaaacacggaggaatatgcgactgtcagacaagcagagacactactatgtatgccgtgtccgccgacagtaagggcctcgataccgtcgtggctttgctagcagacgttgtgctgcagcccaggttaacggacgaggaggtggagatgaccaggatggcagtacagtttgaacttgaggatctgaacctcagacctgacccggagcccctgctcaccgaaatgatacatgaggctgcgtatcgcgaaaacacagtgggtctccaccggttctgcccaactgagaacgtggcaaagatcaatagggaagtcttacattcttatctgcgcaactactacacccctgaccggatggtgcttgcaggcgtgggagtagagcacgaacatctggttgattgtgccaggaagtatctgctgggggtccagcctgcttggggatccgccgaggctgtggacatcgacagatctgtcgcacagtacactggagggattgctaaactcgagagggacatgtccaatgttagtctcggccctactcctatccccgagttgacccacatcatggtgggcctggaaagctgcagctttcttgaagaagatttcatccccttcgccgtgctgaacatgatgatggggggaggcggatcctttagcgccggtgggccaggaaagggtatgttcagccggctgtatcttaacgtgctcaatcgccatcattggatgtacaacgcaacctcataccaccattcttacgaggacaccggcttgctgtgtatccacgctagtgcagatccacgccaggtccgagagatggtggaaattattactaaggagtttattctcatgggaggtaccgtagacaccgtagagctggaacgcgcaaaaactcaactcactagcatgctcatgatgaatctggagtcacgcccagtgatcttcgaggacgtgggtcgccaagtcttggcgaccagatcccggaagctgcctcacgagctgtgtaccctcatcaggaatgtgaagcctgaagacgtgaagcgggtagcatctaagatgctgagaggaaaacccgctgtggcagctctgggcgatctgaccgaccttccgacctacgagcacattcagaccgccctgagttccaaggatggccgtctgcctaggacctacagactgtttcggtag

SEQ ID NO: 184837 - DNA, 441 bp, Artificial Sequence
  derived and/or modified sequence
atggctgctgtcgttttggctgcaaccaggctcttacggggtagcggatcatgggggtgctcccggttgagatttggacccccagcatatcgtagattctcatcggggggtgcataccccaatatcccgctgtcaagccccttgccgggagtccctaagccggtcttcgcaacggttgacggacaggaaaagttcgaaaccaaggtgacaacattggacaatggattaagagtcgcatcccaaaataaatttgggcaattctgcacagtgggaatcctcatcaacagtgggagtaggtacgaggcaaagtatctgtccgggattgctcacttcctggaaaaacttgctttctcatcaaccgctcgattcgactccaaggacgaaatcctactgaccctggaaaaacatgggggaatctgcgactgccagaccagcaggtag

SEQ ID NO: 184838 - DNA, 1578 bp, Artificial Sequence
  derived and/or modified sequence
atggccgccgtggtgctggccgccaccagactgctgagaggcagcggcagctggggctgcagcagactgagattcggcccccccgcctacagaagattcagcagcggcggcgcctaccccaacatccccctgagcagccccctgcccggcgtgcccaagcccgtgttcgccaccgtggacggccaggagaagttcgagaccaaggtgaccaccctggacaacggcctgagagtggccagccagaacaagttcggccagttctgcaccgtgggcatcctgatcaacagcggcagcagatacgaggccaagtacctgagcggcatcgcccacttcctggagaagctggccttcagcagcaccgccagattcgacagcaaggacgagatcctgctgaccctggagaagcacggcggcatctgcgactgccagaccagcagagacaccaccatgtacgccgtgagcgccgacagcaagggcctggacaccgtggtggccctgctggccgacgtggtgctgcagcccagactgaccgacgaggaggtggagatgaccagaatggccgtgcagttcgagctggaggacctgaacctgagacccgaccccgagcccctgctgaccgagatgatccacgaggccgcctacagagagaacaccgtgggcctgcacagattctgccccaccgagaacgtggccaagatcaacagagaggtgctgcacagctacctgagaaactactacacccccgacagaatggtgctggccggcgtgggcgtggagcacgagcacctggtggactgcgccagaaagtacctgctgggcgtgcagcccgcctggggcagcgccgaggccgtggacatcgacagaagcgtggcccagtacaccggcggcatcgccaagctggagagagacatgagcaacgtgagcctgggccccacccccatccccgagctgacccacatcatggtgggcctggagagctgcagcttcctggaggaggacttcatccccttcgccgtgctgaacatgatgatgggcggcggcggcagcttcagcgccggcggccccggcaagggcatgttcagcagactgtacctgaacgtgctgaacagacaccactggatgtacaacgccaccagctaccaccacagctacgaggacaccggcctgctgtgcatccacgccagcgccgaccccagacaggtgagagagatggtggagatcatcaccaaggagttcatcctgatgggcggcaccgtggacaccgtggagctggagagagccaagacccagctgaccagcatgctgatgatgaacctggagagcagacccgtgatcttcgaggacgtgggcagacaggtgctggccaccagaagcagaaagctgccccacgagctgtgcaccctgatcagaaacgtgaagcccgaggacgtgaagagagtggccagcaagatgctgagaggcaagcccgccgtggccgccctgggcgacctgaccgacctgcccacctacgagcacatccagaccgccctgagcagcaaggacggcagactgcccagaacctacagactgttcagatag

SEQ ID NO: 184839 - DNA, 441 bp, Artificial Sequence
  derived and/or modified sequence
atggccgccgtggtgctggccgccaccagactgctgagaggcagcggcagctggggctgcagcagactgagattcggcccccccgcctacagaagattcagcagcggcggcgcctaccccaacatccccctgagcagccccctgcccggcgtgcccaagcccgtgttcgccaccgtggacggccaggagaagttcgagaccaaggtgaccaccctggacaacggcctgagagtggccagccagaacaagttcggccagttctgcaccgtgggcatcctgatcaacagcggcagcagatacgaggccaagtacctgagcggcatcgcccacttcctggagaagctggccttcagcagcaccgccagattcgacagcaaggacgagatcctgctgaccctggagaagcacggcggcatctgcgactgccagaccagcagatag

SEQ ID NO: 184840 - protein, 203 aa, Artificial Sequence
  derived and/or modified sequence
MAEGDNRSTNLLAAETASLEEQLQGWGEVMLMADKVLRWERAWFPPAIMGVVSLVFLIIYYLDPSVLSGVSCFVMFLCLADYLVPILAPRIFGSNKWTTEQQQRFHEICSNLVKTRRRAVGWWKRLFTLKEEKPKMYFMTMIVSLAAVAWVGQQVHNLLLTYLIVTSLLLLPGLNQHGIILKYIGMAKREINKLLKQKEKKNE

SEQ ID NO: 184841 - protein, 155 aa, Artificial Sequence [sequence omitted]

SEQ ID NO: 184842 - protein, 174 aa, Artificial Sequence
  derived and/or modified sequence
MLMADKVLRWERAWFPPAIMGVVSLVFLIIYYLDPSVLSGVSCFVMFLCLADYLVPILAPRIFGSNKWTTEQQQRFHEICSNLVKTRRRAVGWWKRLFTLKEEKPKMYFMTMIVSLAAVAWVGQQVHNLLLTYLIVTSLLLLPGLNQHGIILKYIGMAKREINKLLKQKEKKNE

SEQ ID NO: 184843 - DNA, 612 bp, Artificial Sequence
  derived and/or modified sequence
atggccgagggcgacaacagaagcaccaacctgctggccgccgagaccgccagcctggaggagcagctgcagggctggggcgaggtgatgctgatggccgacaaggtgctgagatgggagagagcctggttcccccccgccatcatgggcgtggtgagcctggtgttcctgatcatctactacctggaccccagcgtgctgagcggcgtgagctgcttcgtgatgttcctgtgcctggccgactacctggtgcccatcctggcccccagaatcttcggcagcaacaagtggaccaccgagcagcagcagagattccacgagatctgcagcaacctggtgaagaccagaagaagagccgtgggctggtggaagagactgttcaccctgaaggaggagaagcccaagatgtacttcatgaccatgatcgtgagcctggccgccgtggcctgggtgggccagcaggtgcacaacctgctgctgacctacctgatcgtgaccagcctgctgctgctgcccggcctgaaccagcacggcatcatcctgaagtacatcggcatggccaagagagagatcaacaagctgctgaagcagaaggagaagaagaacgagtag

SEQ ID NO: 184844 - DNA, 612 bp, Artificial Sequence
  derived and/or modified sequence
atggctgagggcgacaatcggtccacaaacctgctggccgctgagaccgcctccctggaagagcagttgcaaggttggggcgaagttatgttgatggccgataaggtgcttcggtgggaacgtgcctggtttcctccggcaattatgggagtggtgagtctcgtgttccttatcatttattaccttgacccctccgtgctctccggagtgtcttgctttgtcatgttcctctgcctggctgactatctggtgccaattctagcaccccgtatatttggcagcaacaagtggactactgagcaacagcagcggttccatgaaatttgtagcaacctcgtgaaaacacggcgtcgcgctgttggatggtggaagaggctctttacgcttaaggaagagaaacccaaaatgtacttcatgaccatgatcgtatccctcgctgccgtcgcatgggtcgggcagcaggtccacaatctcttgctcacctatctgattgtgacaagcctcctgctgctgccaggcctgaatcagcacggtattatcctgaagtatataggaatggctaaaagggaaatcaacaaactcctgaagcagaaggagaagaaaaacgaatag

SEQ ID NO: 184845 - DNA, 612 bp, Artificial Sequence
  derived and/or modified sequence
atggccgagggggacaacagaagcaccaacctgctggccgctgagacagccagcctggaggagcagctgcagggctggggcgaggtgatgctgatggctgacaaggtgctgcgctgggagcgggcctggttccccccagccatcatgggcgtggtgtccctggtgttcctgatcatctactacctggaccccagcgtgctgagcggcgtgtcctgctttgtgatgttcctgtgcctggccgactacctggtgcccatcctggccccccgcatcttcggcagcaacaagtggaccacagagcagcagcagcgcttccacgagatctgcagcaacctggtgaagaccaggagaagagctgtgggctggtggaagaggctcttcaccctgaaggaggagaagcccaagatgtacttcatgaccatgattgtgtccctggccgctgtggcctgggtgggccagcaggtgcacaacctgctgctgacctacctgattgtgaccagcctgctgctgctgcccggcctgaaccagcacggcatcatcctgaagtacatcggcatggccaagcgggagatcaacaagctgctgaagcagaaggagaagaagaatgaatag

SEQ ID NO: 184846 - DNA, 2324 bp, Artificial Sequence
  derived and/or modified sequence
gggaagggcggccgacccatataagcagcctgcggggcgttccctcgggttgtggttggtgtgcgggtttcggttggaggactcgttggggaggtggcctgcgcttgtagagactgcatccccgagacgatggcggagggagataatcgcagcaccaacctgctggctgcagagactgcaagtctggaagaacagctgcaaggatggggagaagtgatgctgatggctgataaagtcctccgatgggaaagagcctggtttccacctgccatcatgggtgtggtttctttggtgtttctgattatctactatctagatccatctgttctgtccggcgtttcctgttttgttatgtttttgtgcttggctgactaccttgttcccattctagcgcctagaatttttggctccaataaatggaccactgaacaacagcaaagattccatgaaatttgcagcaatctagtaaaaactcgacgcagagctgtgggttggtggaaacgcctcttcacactaaaggaagaaaaacctaagatgtacttcatgaccatgatcgtttcccttgctgcggttgcttgggtgggacaacaagtccacaacctgcttctcacctacctgatagtgacttccttactattgcttcctggactaaaccaacatggaatcattttgaagtacattggaatggccaagagggagataaacaaacttctcaaacaaaaagaaaagaaaaacgaatgattcatctgctttaatcagtgtgattaatgcagcacccattgccccgggaaccgtttctgctgtactatctggatactaaaatgttacggaagtagctctttgttctccctcactctgcccttagttaatagaaattcagactcgccaagtaaggcttcgtgcatagtgtcttcatgtcgcgtatagttgagcgcgttcttagcagttggcttcatggacaactcattagtgttttgacttttcttacccagcgttaattgaattcttgcttttagacaacttcctttttgtagtggtgaaccttgccctttagtacagttcaagtgaatctggataattgttcatctttgctttagcttagataccatgtagtggtctgtggctacaggaagctggttctgtctgcttccacagtctgcttaaaaaactgtctgacttcgtgaatatagagaccaagtttaccacttctgatgaagagaccaattaagattcattcctcattctgtttctttccagtgggagaagagtccccatgaaataagatgaaactgattccatgcactagtacatgtaggcttctcccttgtgcaaagcttagcaatttgtaggaaactttgatctttttgtccaagaaaaggaatgtctgacaggcttaagctttcgtccccttgcacttagactcgaagttagtaaatccttaaaggctttttaatagcagacttccaaaagattgcatttaggatttctagcatgcttttaatttcagattttcagctgacattagctatagtatacagtaggttaagactcatgtctatgactttcactctaagactggcaaaaggacagcagtcttctatgtttagtcaatattcatttcagtagaagataatcttatctaatttttgagaccagaataagccttttaaggtaaacctcaaaattatcattttatggtaatactgaccattttagtcccctaggtttgacatgggagatagtgactacactggtgtctgacttttttcctagagatttctccctgaaaaatacaagggctgttggtgagagcagacttgaggtgatgatagttggcctctggtctacaaagatttcataactccttggaaagcttcttataatcattcttaacttcttggtagctagaaatttagagtagttgaaatctttaggaatgaacttctgagggccaaaaaatgtgactgacgggaacaattcttaaactgattaactagctgtaatatagttttgtgaatttattgcactgatgttgtaccttgtggtatatctgtccctattaaataagtgttgttttctcctctttaatattgctgtgaacagtggtgcccattgtagcatatgtttgatttttttttattatttcataagaaaactacgttaattttaccttactttcattgtaaataagcctgtcttcctatctggattttttgtgtgcatacatattctactgattaactacttttgcagttttaatcctgtattatttcttctactttgttttgtgtaaaaggggaaaaaataaaaaaagctggaatctt

SEQ ID NO: 184847 - DNA, 1053 bp, Artificial Sequence
  derived and/or modified sequence
aaacaccgcggcctcgtccctgtcacccgccgcgggcccggcccttctctccctgggcaggcgacgatgcctggccctcgggcttcttgggtgactcctgggtgtcgaacccttacctttcctggggacggtgcgcgacggggcgaggagggcgcgtgattcatcaccgcgagctgcagagactgcaagtctggaagaacagctgcaaggatggggagaagtgatgctgatggctgataaagtcctccgatgggaaagagcctggtttccacctgccatcatgggtgtggtttctttggtgtttctgattatctactatctagatccatctgttctgtccggcgtttcctgttttgttatgtttttgtgcttggctgactaccttgttcccattctagcgcctagaatttttggctccaataaatggaccactgaacaacagcaaagattccatgaaatttgcagcaatctagtaaaaactcgacgcagagctgtgggttggtggaaacgcctcttcacactaaaggaagaaaaacctaagatgtacttcatgaccatgatcgtttcccttgctgcggttgcttgggtgggacaacaagtccacaacctgcttctcacctacctgatagtgacttccttactattgcttcctggactaaaccaacatggaatcattttgaagtacattggaatggccaagagggagataaacaaacttctcaaacaaaaagaaaagaaaaacgaatgattcatctgctttaatcagtgtgattaatgcagcacccattgccccgggaaccgtttctgctgtactatctggatactaaaatgttacggaagtagctctttgttctccctcactctgcccttagttaatagaaattcagactcgccaagtaaggcttcgtgcatagtgtcttcatgtcgcgtatagttgagcgcgttcttagcagttggcttcatggacaactcattagtgttttgacttttcttacccagcgttaattgaattcttgcttttagacaacttcctttttgtagtggtgaaccttg

SEQ ID NO: 184848 - DNA, 612 bp, Artificial Sequence
  derived and/or modified sequence
atggccgagggcgacaaccggagcaccaacctgctggccgccgagaccgcgtcgttggaggaacaactgcagggctggggagaggtaatgctcatggccgacaaggtactgcggtgggaaagggcgtggtttcctccagccatcatgggagtggtctcacttgttttccttattatctattaccttgatccatctgtgctatcgggagtgtcttgttttgtgatgtttctgtgtcttgccgactacttggtccccatcctggctccgaggatttttggctcaaataagtggacaactgaacaacagcagcgctttcacgagatttgctccaatctggtgaaaacgcgcaggagagccgttggctggtggaaacgcctctttactttgaaagaagagaaacccaagatgtattttatgaccatgattgtgagcctcgctgctgtagcttgggtcggacagcaggtgcacaacctcctcttgacctacctgatcgtaacatccctcttactcctcccggggctgaaccagcatggcattatcctaaagtatattggaatggccaagcgggagatcaataagctcctcaagcagaaggaaaaaaaaaacgagtag

SEQ ID NO: 184849 - DNA, 612 bp, Artificial Sequence
  derived and/or modified sequence
atggctgaaggagacaatcgcagcaccaatctgcttgcagctgagacggcctctcttgaggagcagctgcagggctggggtgaggtgatgttgatggccgacaaagtgctcaggtgggaaagggcctggttccctccggcaatcatgggcgtagtttctctggtgtttcttataatatactacctggacccatctgtcttatctggcgtttcttgttttgtgatgtttctttgcctggccgactacttagtgccaattcttgctccacggatattcggcagtaataaatggaccactgaacagcagcagcggttccacgaaatatgctcaaacctggtcaagacaaggcgcagagcggtcggatggtggaagcgcctgttcaccctcaaagaagagaagcctaaaatgtacttcatgacaatgatagtgtctctggctgctgtcgcttgggttggacagcaggtccacaatttacttcttacatatcttatcgtgacatccctactgctcctgcctggcctgaaccaacatggaataatattgaaatacattggaatggccaaacgtgagatcaataagctgctcaagcaaaaggagaagaagaacgaatag

SEQ ID NO: 184850 - protein, 724 aa, Artificial Sequence
  derived and/or modified sequence
MPRNSGAGYGCPHGDPSMLDSRETPQESRQDMIVRTTQEKLKTSSLTDRQPLSKESLNHALELSVPEKVNNAQWDAPEEALWTTRADGRVRLRIDPSCPQLPYTVHRMFYEALDKYGDLIALGFKRQDKWEHISYSQYYLLARRAAKGFLKLGLKQAHSVAILGFNSPEWFFSAVGTVFAGGIVTGIYTTSSPEACQYIAYDCCANVIMVDTQKQLEKILKIWKQLPHLKAVVIYKEPPPNKMANVYTMEEFMELGNEVPEEALDAIIDTQQPNQCCVLVYTSGTTGNPKGVMLSQDNITWTARYGSQAGDIRPAEVQQEVVVSYLPLSHIAAQIYDLWTGIQWGAQVCFAEPDALKGSLVNTLREVEPTSHMGVPRVWEKIMERIQEVAAQSGFIRRKMLLWAMSVTLEQNLTCPGSDLKPFTTRLADYLVLAKVRQALGFAKCQKNFYGAAPMMAETQHFFLGLNIRLYAGYGLSETSGPHFMSSPYNYRLYSSGKLVPGCRVKLVNQDAEGIGEICLWGRTIFMGYLNMEDKTCEAIDEEGWLHTGDAGRLDADGFLYITGRLKELIITAGGENVPPVPIEEAVKMELPIISNAMLIGDQRKFLSMLLTLKCTLDPDTSDQTDNLTEQAMEFCQRVGSRATTVSEIIEKKDEAVYQAIEEGIRRVNMNAAARPYHIQKWAILERDFSISGGELGPTMKLKRLTVLEKYKGIIDSFYQEQKM

SEQ ID NO: 184851 - DNA, 2175 bp, Artificial Sequence
  derived and/or modified sequence
atgccacggaattctggtgccgggtacgggtgtccccatggggacccctctatgctcgactccagggagacaccgcaggagtcacgtcaggacatgatcgtgcggacgacccaagagaaattaaaaacatccagtctcaccgatagacagccactcagtaaagagagtctgaaccatgccctcgaactatctgttcctgaaaaggtcaacaacgcacagtgggacgcgcctgaggaagctctgtggacgacaagggccgacggcagggttagactccgcattgaccctagctgcccacagctgccctacaccgttcataggatgttttatgaagcactcgacaagtatggggacctgattgccttggggttcaagaggcaagacaaatgggaacatatctcttatagccagtattacctcctggccagaagagccgcaaaaggcttcttgaagctcggcctcaaacaagcacactccgtggccatcctgggcttcaattcaccagaatggttcttttctgccgttggcaccgttttcgctggtggcatcgtaactggcatatacacgacctcatccccagaagcctgtcaatacattgcatatgactgctgcgccaatgtcatcatggtggacacacagaaacagctggagaagatcttgaaaatttggaaacagctccctcacttgaaagccgtggttatctacaaggaaccaccacctaacaaaatggccaatgtttatacaatggaggagttcatggaactgggcaatgaggtgcccgaggaagctctcgacgccatcatagacacacagcagcctaaccaatgttgtgtgttggtatatacaagcggaacgactgggaatcccaagggagtaatgctgagccaagataacattacatggactgctaggtacggatcccaggcgggcgacatccgccctgccgaagtccaacaagaggttgtcgtgagctacctgccattgtctcatatagctgcccagatctacgacctgtggacaggaatccagtggggagcccaggtatgcttcgcggagccggacgccctaaaaggaagccttgtgaatacccttcgcgaagtggagccaacctctcacatgggagtccctcgagtgtgggagaagatcatggaacgcattcaggaagtggccgcacaatccgggtttatccgacggaaaatgctgttgtgggccatgagcgttacgttagaacagaatttgacgtgtcccggctccgaccttaaaccctttaccaccaggttggcagactacctcgtgcttgctaaggtgagacaggctctggggtttgccaaatgtcagaaaaacttctatggggctgcgcctatgatggccgaaacccagcactttttcctggggctcaacattaggctctacgcgggatacgggttaagtgagacttctggaccacactttatgtcgtctccttataactaccgtctctactccagcgggaagcttgtgccaggatgtcgggtcaaactggtaaatcaagatgcagagggtatcggagaaatctgcctgtggggcagaacaatctttatgggctatctaaacatggaggacaaaacgtgtgaggcgattgacgaagagggatggctgcacacaggtgatgccggcaggcttgacgctgatgggtttctgtacataaccggtcgcttgaaggaactgatcatcacggccggcggagagaatgtgccgccagtgccgatagaggaagcagtcaagatggagctgcccatcatctcaaacgcaatgctgatcggggaccagcgaaaatttctgtccatgcttctgaccctgaagtgcacactggatcctgacacttcggatcagactgacaaccttacagaacaagccatggaattttgccaacgggtgggaagtagagccaccacagtgtcggagattattgaaaagaaggacgaagccgtctatcaggcaatcgaagagggaatccgcagggtgaatatgaatgccgccgccaggccataccacatacagaagtgggctattctcgagcgggatttctcaatatctggaggggagctggggccgaccatgaagctcaagaggcttactgtactggaaaagtacaaaggcattatcgattcattctaccaggaacaaaagatgtag

SEQ ID NO: 184852 - DNA, 2175 bp, Artificial Sequence
  derived and/or modified sequence
atgcccagaaattctggagctggctacggctgcccccatggagaccccagcatgctggacagccgggagaccccccaggagagccggcaggacatgattgtgaggaccacccaggagaagctgaagaccagcagcctgacagaccggcagcccctgagcaaggagagcctgaaccacgccctggagctgtctgtgcctgagaaggtgaacaatgcccagtgggatgcccctgaggaggccctgtggaccaccagggcagatggccgggtgcggctgagaattgaccccagctgcccccagctgccctacacagtgcacaggatgttttatgaggccctggacaagtacggggacctgattgccctgggcttcaagaggcaggacaagtgggagcacatctcctacagccagtactacctgctggccaggagagctgccaagggcttcctgaagctgggcctgaagcaggcccacagcgtggccatcctgggcttcaacagccctgagtggttcttctctgctgtgggcaccgtgtttgctgggggcatcgtgacaggcatctacaccaccagcagccctgaggcctgccagtacatcgcctatgactgctgtgccaacgtcatcatggtggacacccagaagcagctggagaagatcctgaagatctggaagcagctgccccacctgaaggctgtggtgatctacaaggagcccccacccaacaagatggccaacgtgtacaccatggaggagttcatggagctgggcaatgaggtgcctgaggaggccctggatgccatcatcgacacccagcagcccaaccagtgctgcgtgctggtgtacaccagcggcaccaccggcaaccccaagggcgtgatgctgagccaggacaacatcacctggacagcccgctatggcagccaggccggggacatccggcctgctgaggtgcagcaggaggtggtggtgtcctacctgcccctgagccacatcgccgcccagatctatgacctgtggacaggcatccagtggggcgcccaggtgtgctttgctgagccagatgccctgaagggcagcctggtgaacaccctgcgggaggtggagcccaccagccacatgggcgtgccccgggtgtgggagaagatcatggagcgcatccaggaggtggccgcccagagcggcttcatccggaggaagatgctgctgtgggccatgtctgtgaccctggagcagaacctgacctgccccggcagtgacctgaagcccttcaccacccggctggccgactacctggtgctggccaaggtgcggcaggccctgggctttgccaagtgccagaagaacttctacggggccgcccccatgatggccgagacccagcacttcttcctgggcctgaacatccggctgtatgccggctacggcctgtctgagaccagcggcccccacttcatgagcagcccctacaactaccgcctgtacagcagcggcaagctggtgcccggctgccgggtgaagctggtgaaccaggatgctgagggcattggagagatctgcctgtggggccgcaccatcttcatgggctacctgaacatggaggacaagacctgtgaggccattgatgaggagggctggctgcacactggagatgctggccgcctggatgctgatggcttcctgtacatcaccggccgcctgaaggagctgatcatcacagctggaggagaaaatgtgccccctgtgcccatcgaggaggccgtgaagatggagctgcccatcatcagcaatgccatgctgattggagaccagaggaagttcctgtccatgctgctgaccctgaagtgcaccctggaccctgacaccagtgaccagacagacaacctgacagagcaggccatggagttctgccagagggtgggcagccgggccaccaccgtgtctgagatcatcgagaagaaggatgaggccgtgtaccaggccatcgaggagggcatccggcgggtgaacatgaatgctgctgcccggccctaccacatccagaagtgggccatcctggagcgggacttcagcatcagcggcggggagctgggccccaccatgaagctgaagaggctgactgtgctggagaagtacaagggcatcatcgacagcttctaccaggagcagaagatgtag

SEQ ID NO: 184853 - DNA, 2175 bp, Artificial Sequence
  derived and/or modified sequence
atgccccggaacagcggcgccggctacggctgcccccacggcgacccttccatgctggacagccgcgaaacacctcaggagagtcggcaagacatgatcgtgcggacgacacaagagaaacttaagacatccagtttgaccgatcgacagccactgagcaaggaaagccttaatcacgctcttgagctctcggtacccgagaaggttaataatgcccaatgggatgcgcccgaggaagcgctctggaccacgcgagccgatggtagagtccgcctgaggattgacccgagctgtccacagctcccatacaccgtgcatcgcatgttttatgaagccctggataagtacggagacctgatagcccttggtttcaagaggcaagacaagtgggaacacatctcatattctcagtactatctcctggccaggcgcgccgccaagggcttcttaaagcttggactgaagcaggctcactcggtcgcgattttaggctttaacagtcctgagtggttctttagcgccgtgggaaccgtatttgctggtggtatcgtgactggtatttataccacatcttctcctgaggcctgtcagtatatagcctatgactgttgtgccaatgttattatggtagatacccagaaacagttagagaaaattctgaaaatctggaagcaactcccacatcttaaggcagttgtgatttacaaagaacccccccccaacaaaatggcaaacgtctacacaatggaggaattcatggagttgggaaatgaagtccctgaggaagcactagacgctattatcgacacacagcaaccaaatcagtgctgcgtattggtttatacctctggcactaccggtaacccaaaaggggtaatgctgtcccaggataatattacctggactgcccggtacggaagccaagctggtgatatcaggcctgccgaggtgcagcaggaagtggtggtgtcttacctcccactgtcacatatcgctgcccagatctacgatctctggaccgggatccagtggggcgcccaagtgtgcttcgcagagccagatgcactcaaaggctcactggttaacactctccgggaagtcgaacctacgagccatatgggtgtgccaagggtgtgggaaaagattatggaaaggatccaagaggtcgctgcacaatcaggtttcatacgcaggaagatgctgctgtgggcaatgagtgtcactcttgagcagaatctgacatgccccggcagcgacttgaaaccatttacaaccagactggcagactatttagtcctcgccaaagttcggcaggccctgggcttcgccaaatgtcaaaagaatttttatggcgccgcccctatgatggcagagacacagcactttttcctgggcctcaatattagactatacgctggttacgggctgtccgaaacttccgggccacacttcatgtcctcgccctacaattacaggttgtattccagcggaaagctggtccctgggtgtcgagtgaagctcgtgaaccaagacgctgaagggatcggcgagatatgtctctggggccggacaatcttcatggggtatcttaatatggaagacaagacttgcgaagcgattgatgaggagggctggctccatacaggagacgcagggagactcgacgcagatggcttcctctacatcacaggcagactgaaggaacttattattacggccggcggagaaaatgttccaccggtacccattgaggaggcagtgaagatggagctgcctataatctccaacgctatgctcatcggcgaccagaggaagttcttaagtatgctcctcactcttaagtgcacattagaccctgatacaagcgaccaaaccgataatctgaccgagcaagctatggagttttgtcagagagtgggaagtcgggcaacaacagtgtccgagatcattgagaagaaggatgaggctgtgtaccaagccattgaagaaggcatacgcagagtgaacatgaatgcagcagctcggccgtaccatatacaaaagtgggctattctggaaagagatttcagtatttcaggcggggaactcggtccaacgatgaagctcaaaaggctgaccgtgcttgagaagtataagggtataatcgattctttttaccaggagcagaagatgtag

SEQ ID NO: 184854 - DNA, 2175 bp, Artificial Sequence
  derived and/or modified sequence
atgccccgtaattcgggggcaggctatggctgtccacacggtgacccatctatgctcgacagtcgggaaacgcctcaggagagtcgccaggacatgatcgtcaggacgacgcaggagaaacttaagaccagctccttgactgacagacagcccctcagtaaggaatccctaaatcatgcgctggaactgtctgtgccagagaaagtgaacaatgcccagtgggatgctcccgaagaggccctttggaccacacgggcagacggtagagtacggttgcggatcgacccgtcatgtcctcaactgccttacactgttcatcgcatgttctacgaggcacttgacaagtacggtgatcttatcgcactgggcttcaaaagacaggataagtgggagcatatcagctacagccagtactatctgctcgccaggagggccgcaaagggattcctgaaactcggtttgaagcaagctcacagcgtggccattctcggctttaactctcccgagtggtttttctccgcagtcggcacggtattcgcaggcggtattgtgacgggcatttataccacctccagtcccgaggcatgccagtatatcgcttatgattgctgcgccaacgtgatcatggtggatactcagaagcagctcgaaaaaatccttaaaatttggaaacagctcccacaccttaaggcagtggtgatatacaaggagcctcccccaaacaaaatggccaacgtctatactatggaggaattcatggaactgggcaatgaagtgcctgaggaagcgcttgacgccatcatagacacacagcagcctaatcagtgttgcgtgctcgtgtacacctccggcactacagggaaccccaaaggtgtgatgctgtcccaggataacatcacatggaccgccaggtatgggtcacaagcaggagacatccggccagcagaggttcagcaggaggtggttgtatcctatctgccactgagccacatcgctgctcagatctatgatctgtggactggcatacagtggggcgcacaggtttgctttgcagaacccgatgccctaaaaggctctttggtgaatactctgagggaggtggagcctaccagccatatgggtgtgccacgcgtgtgggagaagataatggagcgcattcaggaggtggccgcacaaagcgggtttatcaggagaaagatgctgttatgggccatgagcgttactctggaacagaacttaacttgccccggttccgatctcaagccctttactacaaggctggccgactatctagtactggccaaagttagacaggccctggggttcgctaaatgccaaaagaacttctacggggcagcacctatgatggccgaaacccagcacttcttccttggcctgaatatcagactgtacgcaggctatggcttgagcgagacctccggacctcattttatgtctagtccctacaactatagactgtatagctcaggcaagctagtcccaggctgtagagtgaaacttgtgaatcaagacgcagagggaatcggggagatttgtctgtggggtcggacaatttttatggggtacctgaacatggaggataagacgtgcgaggccattgacgaagaaggatggttacacacaggagacgcaggaaggctggacgctgacggctttctgtatattaccgggagactaaaggaacttatcatcaccgcaggtggtgagaacgtcccacctgtgcccatagaggaggcagtgaaaatggagctgccaatcatctcaaatgcaatgctgatcggtgaccagagaaagtttttatccatgctcctcacactcaaatgcactctggatccagatactagcgaccagaccgacaatctgaccgagcaagcgatggagttttgtcagagagttggcagtcgcgcaactactgtttcagaaatcatcgaaaaaaaggatgaggccgtgtaccaggctatagaagagggaatcagaagagtgaacatgaacgcagccgctcgcccataccatatccagaaatgggcgattctggaaagggatttctctatttccggaggggaactgggccctacaatgaagctgaagcgactgacagtgctggaaaaatataaaggtataatagacagcttttatcaagaacagaagatgtag

SEQ ID NO: 184855 - DNA, 2175 bp, Artificial Sequence
  derived and/or modified sequence
atgcccagaaacagcggcgccggctacggctgcccccacggcgaccccagcatgctggacagcagagagaccccccaggagagcagacaggacatgatcgtgagaaccacccaggagaagctgaagaccagcagcctgaccgacagacagcccctgagcaaggagagcctgaaccacgccctggagctgagcgtgcccgagaaggtgaacaacgcccagtgggacgcccccgaggaggccctgtggaccaccagagccgacggcagagtgagactgagaatcgaccccagctgcccccagctgccctacaccgtgcacagaatgttctacgaggccctggacaagtacggcgacctgatcgccctgggcttcaagagacaggacaagtgggagcacatcagctacagccagtactacctgctggccagaagagccgccaagggcttcctgaagctgggcctgaagcaggcccacagcgtggccatcctgggcttcaacagccccgagtggttcttcagcgccgtgggcaccgtgttcgccggcggcatcgtgaccggcatctacaccaccagcagccccgaggcctgccagtacatcgcctacgactgctgcgccaacgtgatcatggtggacacccagaagcagctggagaagatcctgaagatctggaagcagctgccccacctgaaggccgtggtgatctacaaggagcccccccccaacaagatggccaacgtgtacaccatggaggagttcatggagctgggcaacgaggtgcccgaggaggccctggacgccatcatcgacacccagcagcccaaccagtgctgcgtgctggtgtacaccagcggcaccaccggcaaccccaagggcgtgatgctgagccaggacaacatcacctggaccgccagatacggcagccaggccggcgacatcagacccgccgaggtgcagcaggaggtggtggtgagctacctgcccctgagccacatcgccgcccagatctacgacctgtggaccggcatccagtggggcgcccaggtgtgcttcgccgagcccgacgccctgaagggcagcctggtgaacaccctgagagaggtggagcccaccagccacatgggcgtgcccagagtgtgggagaagatcatggagagaatccaggaggtggccgcccagagcggcttcatcagaagaaagatgctgctgtgggccatgagcgtgaccctggagcagaacctgacctgccccggcagcgacctgaagcccttcaccaccagactggccgactacctggtgctggccaaggtgagacaggccctgggcttcgccaagtgccagaagaacttctacggcgccgcccccatgatggccgagacccagcacttcttcctgggcctgaacatcagactgtacgccggctacggcctgagcgagaccagcggcccccacttcatgagcagcccctacaactacagactgtacagcagcggcaagctggtgcccggctgcagagtgaagctggtgaaccaggacgccgagggcatcggcgagatctgcctgtggggcagaaccatcttcatgggctacctgaacatggaggacaagacctgcgaggccatcgacgaggagggctggctgcacaccggcgacgccggcagactggacgccgacggcttcctgtacatcaccggcagactgaaggagctgatcatcaccgccggcggcgagaacgtgccccccgtgcccatcgaggaggccgtgaagatggagctgcccatcatcagcaacgccatgctgatcggcgaccagagaaagttcctgagcatgctgctgaccctgaagtgcaccctggaccccgacaccagcgaccagaccgacaacctgaccgagcaggccatggagttctgccagagagtgggcagcagagccaccaccgtgagcgagatcatcgagaagaaggacgaggccgtgtaccaggccatcgaggagggcatcagaagagtgaacatgaacgccgccgccagaccctaccacatccagaagtgggccatcctggagagagacttcagcatcagcggcggcgagctgggccccaccatgaagctgaagagactgaccgtgctggagaagtacaagggcatcatcgacagcttctaccaggagcagaagatgtag

SEQ ID NO: 184856 - DNA, 6357 bp, Artificial Sequence
  derived and/or modified sequence
aaaccacaaagaaaaggaaagttttaattctgagaaacttcactgaggagcaattttttttgagcttctaaaaatagagaggaaatgagcctctttgggtcactctagttgccgcctcccctgccccatgcccacccccactgctcactcaaggctagcctctctcagtgggtgactgagctgtcttcagtggaagcccgaggcagatgccacgcaattctggagctggatacggctgcccacacggggaccccagcatgctggacagcagagagaccccacaggagagccggcaggacatgattgtgaggaccacccaagaaaaattgaaaaccagctcactgactgacaggcagccactctccaaagagtccctgaaccatgctctcgagctctcagtgccagagaaggtgaataatgcccagtgggatgctccagaggaggcgctgtggacgactcgggccgatgggcgggtgcgcctgcgcatagaccccagctgcccacagcttccctacactgtgcatcggatgttctacgaggccctggataagtatggggacctcatcgctttgggcttcaagcgccaggacaagtgggaacacatctcctactcccaatactacctgctcgcccgcagagccgccaagggcttcctgaagctcggcctgaagcaggcccacagtgtggccatcctcggcttcaactccccggagtggttcttctcggcagtgggcacagtatttgcaggtggcatcgtcactggcatctacaccaccagctccccagaggcctgccagtacatcgcttatgactgctgcgccaatgtcatcatggtcgacacgcagaagcagctggaaaagatcctgaagatctggaaacagttgccacatctaaaggcagtcgtgatatataaagaacctcctccaaacaagatggccaatgtgtacacgatggaggaattcatggagctggggaatgaagtgcctgaggaagccctggacgccatcattgacacccagcagcccaaccagtgctgtgtgctagtctacacttccggcaccactgggaaccccaagggcgtgatgctgagtcaagacaatatcacgtggacggcacggtacggcagccaggccggtgacatccggccggcagaagtccagcaggaggtggtagtcagctacctgcccctcagccatattgccgcccagatctacgacctgtggacaggcatccagtggggggcccaggtttgctttgccgaacccgacgccctgaaggggagcctggtgaacacgctgcgggaggtggagcccacatcacacatgggggtgccccgggtatgggagaagatcatggagcgcatccaggaggtggcggctcagtctggcttcatccggcgaaagatgctgctgtgggccatgtcggtgaccttggagcagaacctcacctgccccggcagcgacctgaagcccttcacaaccagactggcagattacctggtgctagccaaggttcgccaggcactgggatttgccaagtgtcaaaagaacttctatggagcggcccccatgatggcagagacacagcacttcttcctgggtctcaacatccgcttgtatgcgggctacggcctcagtgagacctcaggcccccacttcatgtccagtccctacaactaccggctgtacagctcaggcaagttggtgcccggctgtcgggtgaagctggtgaaccaggacgcagagggcattggcgagatctgcctgtggggccgcaccatattcatgggctacctgaacatggaggacaagacttgtgaggccatcgacgaggaaggctggctgcacacgggtgatgctggccgcctggacgccgatggcttcctctacatcactgggcgcctcaaagaattaatcatcacagctggtggggagaatgtgccccctgtgcccatcgaggaggccgtgaagatggagctgcccatcatcagcaacgccatgctcattggggaccagaggaagttcctgtccatgctgctcaccttgaagtgcactctggacccagacacctctgaccagactgataatctgactgaacaagctatggagttctgccagagggtgggcagcagagccaccacagtgtccgagatcatagagaagaaggatgaggccgtgtaccaggccatcgaagaggggatccggagggtcaacatgaacgcggcggcccggccctaccacatccagaagtgggccattctcgagagagacttctccatttcgggtggagagttgggtcccacgatgaaactgaaacggctcacagttttggagaagtacaaaggtatcattgactccttttaccaagagcaaaaaatgtaatcagggcctatgcctgcagtttctatagaatagagggcaggcgttccgagcctcttcctgagccccaggtctcttcagtctgggcacaggcatttctgccaagtctgttagatctccaggtcagggcacagcactggctctacatttaccaggtcttacgccaacaatagctgacaattccaagaagcttcacgtgtgggtagttttaattcagtttaagtattgctttttgttcaggtgacaaatgagatcagctctccttccagaacgaaagggctgataatttttggccttagttccaggtagattaaaaagctgctagctcacatacaggacagccagcagtaggctgtggagcgggtaggagagagatggctgatactgctcacgtgcgctgcaggaaaagcaatcagtcacaactcacctagcgacctgacttactctggaatcttggcgggcatcgccgaccctattattccattaccaggcactccgccacccacatgccaactgacttgatgcttaataaaactgctgctgcctgtttgattctatttaatgtataatttgaatattaaaccttttaacagaactgtcaacaaggacctgattttttttgtcaattgagcaggtgggaccagtgcagagagtagtgggcatttaactcacaggactgtgcacagcgggcatgcgagtgaccattagtgccctggaataaacaaaggtgcaggatggggtcaagtggcgcattctcataaaagcagccagctctacgttagcctgtcgccaccagaccaccccacttccattctgaatacgggaagcagccattctcagtagcaagctgagccaaaatgaccgaaggcatctgaacaggaaacaggtagagaaagcaaacatctcagttttggaattctttattactttgaacccaagagccactgataactggcacaatccaatgaaacagaggaagcagcagcttaaacaaaggaaaatacatttaagattataagtctgggggggcggttacaagcttaaaaagtgacccagacagggatatcattgctaaaaaaaaaaaaatccccttgtgacctgggtacattttgcaaagccacaggtttgcaatgttacacaagggccaaaggaggccatgagttgtctttggttgtggggacagagggtaactgttcatgaaaatagtgagtgtctgaagattaagaaaatcatgctgcagcagaggagaagggagaggaagacaggaagggaaaggagatgcctgagggtcaaaagctgagcccaagcctaagcccaagctcaagctcaagccccagcatggcataattttgtgaattaactcaggctgagttgcctccagtctttggaatgtcatcttatactggtactgctgaggcagagggcagtaattggtgctttgggataggagaaggggcagttgctgaaatacaaaattaatagcatcccaagttcctcaattgcagccaaaatacatgtgttcgggcctttcggcagtatcgcccccagaactacctgctgtagtgtggtccattcccagacagcaacatgcaagaataagtttacaatacactcagcccttctggcttcagatcaggggctcagaggctgtgacaactcatgatgctgaaaatgtatccagtgaaaatgaagtactagctctctgcttcattaaaagctcttggaaagaatattaaatctcaagacaacaaaataattgaacacacaatacatttgtgtctttgtatccaatatattacctttgtcttattaacaaaaattatatctctcattatatatttcttggatctgaagtttttattcacactcagtaatttctgtaaaggacaaatctgtctctattttccatatcatttagaaatataccacattcactctttttgatgtgaactttcccaggaaaattctcttgtgcccatttagttttagaagagtgtcattttgtgctattatgtcaatatcctgttttatttccattatgtttttcaaaaaccgaagaaaataaggtttttcttaaaaagttagacattttctcttgttaattctgtatcctgttatttacagctgaagagaaactattttaacttaagtgtaaaatggtttagaatagcaaatgatacagtccactcagagtttacaaaaaaaacatttaccaggtagacacttaataaataaaacaagcacttggaaaaagttctttgaaaacagacctagggacatccacctgcatcttttgcacagattttgttaagaaaaggccagatctaaaaatgtactgtcaagaaacaagcaaaccaatgcatacatacgtaggtattctaaacagaggttcatgtggtgtccatttagagtgactgatgtaaatgccagttgtagaagtgttaatctaaatcttttactcggcgacagatttcctctgtgaagtctgagcattttgcattgcctcccaaatcttttgtcaagctctgagaaaaggaaaaagcaaaaataaaagatgtatccgcaaactaaactaaaccaaggagattttaaagccctcagtgagatgccacctgggcaagttactcggctgctctttcatttagttcctcatttcaaagtgaggaaccactccaccaccatctacccagcccaggaggatcgggatccaatctcatagtgtatacaacagcactctgcaaagaataaggtgctcttgatgcaaagggaggcagggagctttaccaaaattttccctttgttcacacaatagaccctaacccagattagttggtcatggatatttaaataaaagcgaatctaaataagaagtttcataaaaatccttgggaaatatgtctcaggaatagacctgagacatattttgatctatttttgtttttattattattttttttttagatggagtctcactctgttgcccaggctggagtgcagtggcacgatcccagctcaccacaacctctgcctcctgggttcaagcgattctcctgcctcagcgtcctgaatagctggaattacaagtgcatgccaccatacccaactaatttttgtatctgatctatttttggaggctgggacacaaatacgaaagaaatatttaaatcattaactcttttttttttttttaagagacggggtctcactatgtggcccaggctggtcttgaactcagaggctaaggtgatcctcctgcctcagcctatagctgcaactacaggcatgcaccaccacacctgcctaaatcattaactcttaaacctccctctttaggaaagaaagcctcccatacaactgatctgttctaccagcttatcctttctttcctgcatacagaccccaatatatttaattctctttatctttccatcctacacaataaaagggcccactatgtaattcaggcacctctctactgggctgtagattataacttcccaaatataactttaaagaataagaaaatcatatgacctccaatgtgactatcaggctgttaaaaacaagcctgaatttcttgtattttggccacacgatataatttcaaattacagaatttttttaaaagaagggaccaactttgaagatattacgctaagtgaaataagccagactcaaaggacaaatactgtatgattccacttacatgaggtacctagagtagtcaaattcatagagacaggaagcagaatggcaggtgtcagaggatgggagggggaagggaaagttactgtttaacgggtgcagagtctcagtttgagaaaatgaaactggtctggagatgactgatggtgatggttacattacaatgtgaatgtacttaacattattgaactgtatacctaaatacggctaaaatggcaaattttatgttatgcatatttttcacaatttttgttaaaaaggacctcaaattagg

SEQ ID NO: 184857 - protein, 710 aa, Artificial Sequence
  derived and/or modified sequence
MEEMEEELKCPVCGSFYREPIILPCSHNLCQACARNILVQTPESESPQSHRAAGSGVSDYDYLDLDKMSLYSEADSGYGSYGGFASAPTTPCQKSPNGVRVFPPAMPPPATHLSPALAPVPRNSCITCPQCHRSLILDDRGLRGFPKNRVLEGVIDRYQQSKAAALKCQLCEKAPKEATVMCEQCDVFYCDPCRLRCHPPRGPLAKHRLVPPAQGRVSRRLSPRKVSTCTDHELENHSMYCVQCKMPVCYQCLEEGKHSSHEVKALGAMWKLHKSQLSQALNGLSDRAKEAKEFLVQLRNMVQQIQENSVEFEACLVAQCDALIDALNRRKAQLLARVNKEHEHKLKVVRDQISHCTVKLRQTTGLMEYCLEVIKENDPSGFLQISDALIRRVHLTEDQWGKGTLTPRMTTDFDLSLDNSPLLQSIHQLDFVQVKASSPVPATPILQLEECCTHNNSATLSWKQPPLSTVPADGYILELDDGNGGQFREVYVGKETMCTVDGLHFNSTYNARVKAFNKTGVSPYSKTLVLQTSEVAWFAFDPGSAHSDIILSNDNLTVTCSSYDDRVVLGKTGFSKGIHYWELTVDRYDNHPDPAFGVARMDVMKDVMLGKDDKAWAMYVDNNRSWFMHNNSHTNRTEGGITKGATIGVLLDLNRKNLTFFINDEQQGPIAFDNVEGLFFPAVSLNRNVQVTLHTGLPVPDFYSSRASIA

SEQ ID NO: 184858 - DNA, 2133 bp, Artificial Sequence
  derived and/or modified sequence
atggaggagatggaggaggagctgaagtgccccgtgtgcggcagcttctacagagagcccatcatcctgccctgcagccacaacctgtgccaggcctgcgccagaaacatcctggtgcagacccccgagagcgagagcccccagagccacagagccgccggcagcggcgtgagcgactacgactacctggacctggacaagatgagcctgtacagcgaggccgacagcggctacggcagctacggcggcttcgccagcgcccccaccaccccctgccagaagagccccaacggcgtgagagtgttcccccccgccatgcccccccccgccacccacctgagccccgccctggcccccgtgcccagaaacagctgcatcacctgcccccagtgccacagaagcctgatcctggacgacagaggcctgagaggcttccccaagaacagagtgctggagggcgtgatcgacagataccagcagagcaaggccgccgccctgaagtgccagctgtgcgagaaggcccccaaggaggccaccgtgatgtgcgagcagtgcgacgtgttctactgcgacccctgcagactgagatgccacccccccagaggccccctggccaagcacagactggtgccccccgcccagggcagagtgagcagaagactgagccccagaaaggtgagcacctgcaccgaccacgagctggagaaccacagcatgtactgcgtgcagtgcaagatgcccgtgtgctaccagtgcctggaggagggcaagcacagcagccacgaggtgaaggccctgggcgccatgtggaagctgcacaagagccagctgagccaggccctgaacggcctgagcgacagagccaaggaggccaaggagttcctggtgcagctgagaaacatggtgcagcagatccaggagaacagcgtggagttcgaggcctgcctggtggcccagtgcgacgccctgatcgacgccctgaacagaagaaaggcccagctgctggccagagtgaacaaggagcacgagcacaagctgaaggtggtgagagaccagatcagccactgcaccgtgaagctgagacagaccaccggcctgatggagtactgcctggaggtgatcaaggagaacgaccccagcggcttcctgcagatcagcgacgccctgatcagaagagtgcacctgaccgaggaccagtggggcaagggcaccctgacccccagaatgaccaccgacttcgacctgagcctggacaacagccccctgctgcagagcatccaccagctggacttcgtgcaggtgaaggccagcagccccgtgcccgccacccccatcctgcagctggaggagtgctgcacccacaacaacagcgccaccctgagctggaagcagccccccctgagcaccgtgcccgccgacggctacatcctggagctggacgacggcaacggcggccagttcagagaggtgtacgtgggcaaggagaccatgtgcaccgtggacggcctgcacttcaacagcacctacaacgccagagtgaaggccttcaacaagaccggcgtgagcccctacagcaagaccctggtgctgcagaccagcgaggtggcctggttcgccttcgaccccggcagcgcccacagcgacatcatcctgagcaacgacaacctgaccgtgacctgcagcagctacgacgacagagtggtgctgggcaagaccggcttcagcaagggcatccactactgggagctgaccgtggacagatacgacaaccaccccgaccccgccttcggcgtggccagaatggacgtgatgaaggacgtgatgctgggcaaggacgacaaggcctgggccatgtacgtggacaacaacagaagctggttcatgcacaacaacagccacaccaacagaaccgagggcggcatcaccaagggcgccaccatcggcgtgctgctggacctgaacagaaagaacctgaccttcttcatcaacgacgagcagcagggccccatcgccttcgacaacgtggagggcctgttcttccccgccgtgagcctgaacagaaacgtgcaggtgaccctgcacaccggcctgcccgtgcccgacttctacagcagcagagccagcatcgcctag

SEQ ID NO: 184859 - DNA, 2133 bp, Artificial Sequence
  derived and/or modified sequence
atggaggaaatggaggaggaactgaagtgtccagtttgcggttccttttatcgcgagcccatcatcctgccttgctcccataacctttgtcaggcttgtgctcgcaacatcttggttcagactccggaaagcgaaagccctcagagccatagggcggccggtagtggggtcagtgactatgattatcttgacctggacaaaatgtctttgtacagcgaggcagattccggctacggctcctacggcggctttgcatccgcacccactacaccctgtcagaagtctcccaatggcgtgcgggtgttccctcccgcaatgccacctcctgcaactcatttgtctcccgcactcgccccagttccgcgaaattcctgcattacatgcccgcagtgtcatcgctccctgatcctggatgaccgaggtttgagaggattcccgaaaaacagagtcttagaaggggttattgaccggtaccagcagtccaaggcggccgccttgaagtgtcaactgtgcgaaaaagcccctaaggaggctaccgtcatgtgcgagcagtgcgacgtattctattgtgatccctgcaggctgcgctgtcaccctccacgtggcccgctagctaagcacaggctcgtcccaccagcccaaggaagggtgtcaaggaggctgtcacccaggaaagttagcacatgcaccgatcacgaattagagaatcacagtatgtactgtgtgcagtgcaagatgccggtctgttaccagtgtctggaggagggcaaacacagtagtcatgaagtcaaagctctcggggccatgtggaaactccataaatcgcagctgagccaagctttgaatggcttgagcgacagggcgaaggaggctaaagagtttctcgtgcaactcagaaatatggtccagcagatccaggagaattctgttgagtttgaagcctgcctggtggcgcaatgcgatgccctgatcgacgcactgaaccgtcgtaaagcacagcttctcgcacgcgtgaacaaggaacacgagcacaagttaaaagtggtacgggatcagatctctcactgtacggttaagctcaggcagactactgggctgatggagtattgcctggaggtgattaaggaaaacgacccaagcggtttcctgcagattagcgacgcactaatcaggagggttcacctgaccgaggatcagtggggaaagggcactttgacccctaggatgactactgacttcgacctgagcctggacaactctccccttctccagagtattcatcagcttgatttcgtgcaagtgaaggcttctagccctgtgcccgcaactcccatcctgcagctggaagaatgctgcacgcacaacaattccgctaccctgtcctggaaacaaccccctctttctactgttcctgctgatgggtacattctggagcttgacgacgggaacgggggacaatttagggaggtgtacgtaggtaaagagactatgtgcactgtggatgggttgcattttaactcgacctataacgcgcgggttaaggcttttaataagacgggcgtgtctccctacagtaagacccttgtcctccagaccagcgaggtcgcatggttcgcattcgaccctgggtcagctcactccgatattatcctgagcaatgataacctcaccgtgacctgcagctcctacgacgatcgggtagtactcggcaaaaccggtttctctaaggggatccattactgggagctcacagttgatagatacgacaatcaccccgatccagcattcggagtagcacggatggatgtaatgaaggacgttatgttggggaaggacgacaaggcttgggccatgtacgttgataacaaccgttcatggtttatgcacaacaattcccatacaaaccgcactgaggggggtatcactaagggggcaaccatcggcgtcctgctggacctgaatcgtaagaacctgacattcttcattaatgatgagcagcagggtcctatcgcattcgataatgtcgaggggctattctttccggcagtttcccttaaccgcaatgttcaggttacactccacactggccttccagtgccggacttttactccagtcgtgcaagcatcgcttag

SEQ ID NO: 184860 - DNA, 2133 bp, Artificial Sequence
  derived and/or modified sequence
atggaggagatggaggaggagctgaagtgccctgtgtgtggcagcttctaccgggagcccatcatcctgccctgcagccacaacctgtgccaggcctgtgccaggaacatcctggtgcagaccccagagagcgagagcccccagagccacagagctgctggcagcggcgtgtctgactatgactacctggacctggacaagatgagcctgtacagcgaggccgacagcggctacggcagctatggaggctttgccagcgcccccaccaccccctgccagaagagccccaatggagtgcgggtcttccccccagccatgcctcctccagccacccacctgagccctgccctggcccctgtgcccaggaacagctgcatcacctgcccccagtgccacaggagcctcatcctggatgaccggggcctgcggggcttccccaagaacagagtgctggagggcgtgattgaccgctaccagcagagcaaggccgccgccctgaagtgccagctgtgtgagaaggcccccaaggaggccaccgtgatgtgtgagcagtgtgatgtgttctactgtgacccctgccgcctgcgctgccaccccccccggggccccctggccaagcaccggctggtgcccccagcccagggccgggtgtcccggcggctgagccccaggaaggtgtccacctgcacagaccacgagctggagaaccacagcatgtactgtgtgcagtgcaagatgcctgtgtgctaccagtgcctggaggagggcaagcacagcagccatgaggtgaaggccctgggcgccatgtggaagctgcacaagagccagctgagccaggccctgaatggcctgagtgaccgggccaaggaggccaaggagttcctggtgcagctgaggaacatggtgcagcagatccaggagaacagcgtggagtttgaggcctgcctggtggcccagtgtgatgccctgattgatgccctgaacagaaggaaggcccagctgctggcccgggtgaacaaggagcacgagcacaagctgaaggtggtgcgggaccagatcagccactgcaccgtgaagctgcggcagaccaccggcctgatggagtactgcctggaggtgatcaaggaaaatgaccccagcggcttcctgcagatcagtgatgccctgatcagaagagtgcacctgacagaggaccagtggggcaagggcaccctgacccccaggatgaccacagactttgacctgagcctggacaacagccccctgctgcagagcatccaccagctggactttgtgcaggtgaaggccagcagccctgtgcctgccacccccatcctgcagctggaggagtgctgcacccacaacaacagcgccaccctgtcctggaagcagccccccctgagcacagtgcctgcagatggctacatcctggagctggatgatggaaatggaggccagttccgggaggtgtatgtgggcaaggagaccatgtgcaccgtggatggcctgcacttcaacagcacctacaatgcccgggtgaaggccttcaacaagacaggagtgagcccctacagcaagaccctggtgctgcagaccagcgaggtggcctggtttgcctttgaccccggcagcgcccacagcgacatcatcctgagcaatgacaacctgactgtgacctgcagcagctatgatgacagagtggtgctgggcaagacaggcttcagcaagggcatccactactgggagctgactgtggacagatatgacaaccacccagaccctgccttcggcgtggccaggatggatgtgatgaaggatgtgatgctgggcaaggatgacaaggcctgggccatgtatgtggacaacaacagatcctggttcatgcacaacaacagccacaccaacagaacagaaggaggcatcaccaagggggccaccatcggcgtgctgctggacctgaacaggaagaacctgaccttcttcatcaatgatgagcagcagggccccatcgcctttgacaacgtggagggcctcttcttccctgctgtgtccctgaacagaaatgtgcaggtgaccctgcacacaggcctgcctgtgcctgacttctacagcagccgggccagcatcgcctag

SEQ ID NO: 184861 - DNA, 2133 bp, Artificial Sequence
  derived and/or modified sequence
atggaggagatggaggaggagctgaagtgccccgtgtgcggcagcttctatcgggagccaattatactcccatgctctcataatctgtgtcaggcctgcgcaaggaacatcttggttcagactccggaatctgagtcaccgcagtcccaccgggccgccggatccggcgtctctgattatgactatctggatctggacaaaatgagcctgtattcagaggcggactcgggctatggttcctatggtggctttgcgagcgcgccaacaactccctgccagaagtccccaaacggagtgcgtgtgtttccgccagctatgccgccacccgcaacccacctgtcgcccgcccttgcgccagtgcccagaaatagctgtattacctgtcctcaatgccacagaagcctgatactggacgacagggggctccggggattccccaagaatcgggtgctggagggggtgatcgataggtatcagcagtccaaagccgcagccctgaaatgtcagctctgcgagaaagcaccaaaagaagccactgtaatgtgcgagcagtgcgatgtgttttattgcgatccttgtagacttaggtgtcatcctccacgggggcctctggccaagcatcggctggtgccgccagcccagggcagggtatcgcgacgtcttagtcccagaaaggtgagcacgtgcactgaccacgagcttgaaaatcacagtatgtattgcgtccagtgcaaaatgcctgtgtgttaccagtgtttggaggaaggtaaacactccagccacgaggttaaggcacttggcgctatgtggaagctgcataagagtcagctgagccaggcccttaacggcctgtcagatagagcgaaggaagctaaggagttcttagtccagctgcgaaacatggtacagcaaattcaggaaaactcggtcgagttcgaagcttgcttagtcgcacaatgcgacgctctgatcgatgccctcaatagaaggaaggctcagctgttggcgagggtcaataaggagcatgagcataaacttaaggtggttcgggaccaaatttcccactgtaccgtaaagctccgccagacaaccggccttatggaatactgcttggaggtcatcaaggaaaacgatccttcgggattcctacagatatccgacgccctaatccggcgtgtgcacctgacggaggaccagtggggaaaaggaacactgacgccgcgaatgactactgattttgacctgtcgctagataactctcccctactccaatctatacatcagctagattttgtccaggttaaagcttcaagccccgttcctgcgacacccatcctacaactcgaggagtgctgcactcataacaatagcgccacactgtcctggaaacagccaccactaagtaccgttcctgcagacggctacatcctggagctggatgatggcaatggaggtcaattcagagaagtgtatgtcggcaaagagacaatgtgcactgttgacggcctacactttaactcaacttacaatgcccgggtgaaagcgttcaataagactggtgtaagcccatattccaagaccctggtgctccagacttccgaagtggcttggtttgccttcgaccctggatccgctcattccgacatcatcctgagcaacgacaatttgaccgttacgtgctcgtcttatgatgatcgagtggtcctcggaaagaccggctttagtaaaggaattcactactgggagttgactgtcgatcggtacgacaaccaccctgaccccgcattcggcgttgcgagaatggacgtaatgaaggacgtgatgctcggcaaggatgataaagcctgggctatgtatgtggacaacaatcggtcctggtttatgcataataattcgcatactaacagaaccgagggaggtatcaccaagggcgccactatcggcgttctattggatttgaacaggaagaaccttactttctttatcaatgatgagcaacagggtcccatcgcttttgataacgtggagggtctgttttttcccgcagtgtcactcaatcgcaatgtccaggttaccctccatacaggattgccggttccggacttttattccagtagggccagcatcgcatag

SEQ ID NO: 184862 - DNA, 2133 bp, Artificial Sequence
  derived and/or modified sequence
atggaagagatggaagaggagttgaagtgtcccgtctgcgggtccttctacagagagccaatcatcttgccatgctcccacaatctgtgccaggcctgcgcaaggaatattctggttcagacaccagaatcagaatccccccagtctcatagagcagcaggttctggagtgtctgactatgattatctggatttggacaagatgtccttatattccgaggccgattctggctatggttcttacggcggatttgcctcagcacccaccacaccgtgccagaaatcacctaatggcgttcgggtgttcccccctgccatgcccccacccgctacccacctgtcacctgcgctggcccctgtacctaggaacagctgcatcacttgtccgcagtgtcaccgaagtttaatcttggatgataggggtttgcggggattcccgaaaaatagggttctcgagggcgtgattgaccgctatcagcagagcaaagccgctgccctgaagtgccaactttgcgagaaggcccctaaagaggcaactgttatgtgtgaacagtgcgatgtcttctactgtgatccgtgtagactgcgctgccacccccctcggggacctctcgcaaaacatcggttggtacctccagctcagggtagggtttctcgacgcctttcaccacgcaaagtgtcaacctgtactgatcacgagctggagaaccactccatgtactgtgtccagtgtaagatgcccgtttgctaccaatgcctcgaggaaggcaagcacagtagtcatgaggttaaagcgctcggcgctatgtggaagctccataaaagccagctgtcacaggctctcaatgggctgtcagacagagcaaaggaggcgaaagagtttctggtgcagctgcggaacatggtacagcaaatccaggagaactctgttgaatttgaagcatgtttagtggcccagtgcgacgccctgatcgatgccctgaatagacgtaaggcccagttgcttgctagggtgaataaagagcatgaacacaaacttaaagttgtgagggaccagatatctcattgcacagtgaaattgaggcaaactacgggacttatggagtattgtttggaggtgattaaggaaaacgaccccagtggctttttgcagatttccgatgctctgatcagacgtgtgcacctgactgaggatcagtggggcaaaggcaccctgactccccgaatgacaaccgatttcgacttgtcccttgataactctcctctgctgcaaagcatccatcaactggactttgtgcaggtgaaggcatcaagcccggtgcccgcaacaccaatcctgcagcttgaagagtgctgcacacacaacaactctgcgacgctctcttggaagcagccgcctctgtccacggttcctgcagatgggtacatcttggaactcgacgatgggaatgggggacaatttcgggaagtttatgtgggaaaagagaccatgtgtacagttgacggattgcactttaacagcacttataacgcaagagtcaaagcattcaataagactggggtgagtccatactccaagacactcgtcctgcaaacatcagaagtcgcatggttcgcatttgacccaggaagcgctcactctgacatcattctcagcaacgataatcttaccgtgacttgttcttcttatgatgaccgggttgttctcggtaaaactggattttcaaaaggtatccactactgggagttaacagtcgacagatacgacaaccatccggaccccgcattcggagtcgctaggatggatgtcatgaaagacgttatgttagggaaggacgataaggcctgggccatgtacgtggacaacaatcgaagctggttcatgcacaacaattctcacacgaatcgaacagaaggcggaattaccaagggggctaccataggtgtgctcctcgacctaaatcgcaagaatctgactttcttcatcaatgatgagcagcagggtcctatcgccttcgataatgttgagggactgttcttccctgcagtgagcctgaatcgaaatgtgcaggttaccttacatactgggcttcctgttcccgacttttatagctctcgggctagcattgcctag

SEQ ID NO: 184863 - DNA, 5284 bp, Artificial Sequence
  derived and/or modified sequence
aaactacgggcactcagaaatagacaaactgttcttgcctcaaccgaaccaaaggcccagcgggcctcgaaaaagctcagccaggtgctttgggaggccgcgaggaggaagaaggatccgtggaaggaagcacgttcacaccacggcactgaggcctctgggccgagctataatttaaagcatgaaacgaaggggtcatagattctgactaatgctgaccatttccatcggttacccagttgaatctcatgtcgacactaggaaatcgactttatacatgctctttaggaaacgagggacgcaggatgaaagaagccaagagtgtcgccagggcttgcgccagcgccgtcagactcccgggatgggggagctccagggcacggcgtcagcggattcacggagaaggagaaaagccccactgccgtgcagaagcctaggcccgggtgagacgcctgcgaaggctgccagcagcggaagagaaggggcgtcctccgtgctgcgcagcactcgcccgcggtaggtgggcgcggagctcagagctgggagccaaacgcaaacgctggcgagaagccccagccccctccggcagcccactcgctgcggggaggggtttctcacgcccccagctcctgggagactgcaccggaggtcggaagtaagccgggcgaggatgaatcatcccgcctaactcctccttcccggtcccctagcctccgcacgccggcccccttcagagatcttgcagccgcgagcgaagactgccctatcctcagactctaccgaaccccctgtggcctgcggagacgaggagacggacgggtctggtggccaatgagagcttcgatctcttgccccccgcccaatgggccgctgctcatgggccggggcgggactaggagggcaggtaggggcggtccgggctggcgcgcggcgcggcggctacgcggctgcggctcacagagctagcgcctctctgggtgtccgtgccagtgctgcgcgggaaggcaccaccaccacagccgccgccgctggccagggtgctggacaagacgggcccgtcggccacctcgccagctcaggcacccgctgcagccgtcgctgtctcctcccagaccggtccccatggaggagatggaagaggagttgaaatgccccgtgtgcggctccttctatcgggagcccatcatcctgccctgctctcacaatttgtgtcaggcgtgcgcccgcaacatcctggtgcagaccccagagtctgaatccccccagagccatcgggccgcgggctccggggtctccgactatgactatctggacctggacaagatgagcctatacagcgaggcggacagcggctatggctcctacggggggttcgccagcgcccccactaccccgtgccagaagtcccccaacggcgtccgcgtgtttcccccggctatgccgccaccggccacccacttgtcaccggccctggccccggtgccccgcaactcctgtatcacctgcccccagtgtcaccgcagcctcatcctggatgaccgggggctccgcggcttccccaagaatcgcgtactggaaggggtaattgaccgctaccagcagagcaaagccgcggccctcaagtgccagctctgcgagaaggcgcccaaggaagccaccgtcatgtgcgaacagtgcgatgtcttctactgcgatccgtgccgcctgcgctgccacccgccccgggggcccctagccaagcaccgcctggtgcccccggcccagggtcgtgtgagccggaggctgagcccacgcaaggtctccacctgcacagaccacgagctggagaaccacagcatgtactgcgtgcaatgcaagatgcccgtgtgctaccagtgcttggaggagggcaaacactccagccacgaagtcaaggctctgggggccatgtggaaactacataagagccagctctcccaggcgctgaacggactgtcagacagggccaaagaagccaaggagtttctggtacagctgcgcaacatggtccagcagatccaggagaacagtgtggagtttgaagcctgtctggtggcccaatgtgatgccctcatcgatgccctcaacagaagaaaagcccagctgctggcccgcgtcaacaaggagcatgagcacaagctgaaggtggttcgagatcagatctctcactgcacagtgaaattgcgccagaccacaggtctcatggagtactgcttggaggtgattaaggaaaatgatcctagtggttttttgcagatttctgacgccctcataagaagagtgcacctgactgaggatcagtggggtaaaggcacactcactccaaggatgaccacggactttgacttgagtctggacaacagccctctgctgcaatccatccaccagctggatttcgtgcaagtgaaagcttcctctccagtcccagcaacccctatcctacagctggaggaatgttgtacccacaacaacagcgctacgttgtcctggaaacagccacctctgtccacggtgcccgccgatggatacattctggagctggatgatggcaacggtggtcaattccgggaggtgtatgtggggaaggagacaatgtgcactgtggatggtcttcacttcaacagcacatacaacgctcgggtcaaggccttcaacaaaacaggagtcagcccgtacagcaagaccctggtcctccaaacgtctgaggtggcctggtttgctttcgaccctggctcggcgcactcggacatcatcctctccaatgacaacctgacagtgacctgtagtagctatgatgaccgggtggtgctagggaagactggcttctccaagggcatccactactgggagctcacggtagatcgctatgacaaccaccctgatcctgcctttggtgtggctcgcatggacgtgatgaaggatgtgatgttaggaaaagacgacaaagcttgggcaatgtatgtggacaataaccggagctggttcatgcacaacaactcgcacaccaacagaactgagggagggatcacaaaaggggccacaattggggtcctcctcgacttaaatagaaaaaacttgacattttttatcaacgatgaacaacaaggtcccatagcatttgataacgtggagggcctcttcttccctgcggtcagcctgaacaggaacgtgcaggtcacgctgcacaccgggctcccagtccccgacttctactccagcagagcatcaatagcctaaggatgtgccgtggaggcgccagctgcctgttcttacctccgcctgcgagagccacagcaaggagctcagccagccgtggtggggtgcagagttggcaggagtgggagaaggaggagagaaaagctggtcctctgcagtctttacacccacagctctgcccttttccctttcaacctctcctccgctgtcatgcctgcttccgcttccatgtccaacaattctaaccaacaaaggacctagacagcccaccaagtcacttggttcccactcccagattttgcttttatttaacttaattttttatgtaggtgagttatattttctttcttttctgatcaggttattggtgacttactggactggcaccgccaggagaaaattctcctgctaactttttttcttaagctttctgtcaaacaatgaggttgtagggggaggtagggaagaatgagctgaatttgtagcatacagcttacctgctagaatgttcttaccctcttacctctcctgtagcgttagctctgcagagctaagctttgggagaatgaatctatcactgagaagttttactactcattgaagcacaaaaatatccgctacacaggttcacatcagggtaggatcgttaggatggctctataattaggataggccagaaccctggccactgtataaaattggaaagtctctaagacacaggcaaaccaggggacttaatgatttggttcgtttatttaataaaagcttttaattgagaacctactattgaccaggcactgttcaagacactagaacattatgttctagacactgtggggacacagtggtgaacagacaggcatggtctctgcccttcggagcttatattccagtaggagaaaaagcaaaaataaaataattataaatggtcatatgtactagaaaggaaatgggcaagggtcaaagagactcatgggcaagatctttcaggcttcctagaatgatgctaaaaatccacacattctggccatagcaccagaaatgtaccaactcaatgccttttcagctgcactatttaattatggtacctgctgccactcatcacagagcccttcttggtagaaatgatgtcagcattcttatttgctgatgctgctatgataccacgccttaaaaattgacagttgaaaaaaaaaagagtgaccagagggcaaaggacccattctcagtaatgggagatcttgagttgcagtccacagcattcacattctcaggataaacatgcttgtctccatatatactatctgtgcctgttatgaatgaaaaatccatccactctgctgccattcacagcctaattttctggagtagtccaaacaatgtttggaaaaacatgggactgtatgtcattactatgactgatagcagaataataatgcatcttacttctatatagagatagacttacataggttacccttgaaattcattagtttgtcataaagttttaggaaaggtaggacccggaaagaagttctaattagttgtctaaatatttttcagtgagccaagaaattcaccatgaaaaaacaagaataacaaatagaagggaagagataggatgggaaagctaacaaattaaagttttggcaaaaaggaatatatgtaaatagctaattatttacttttgtgcttactttatttagattatttctatcagttacaatctttttctagttaagtgtacctaatttatggaatgggtgctatcctgtttatgtgtgtcttggtttttcttggctacagaaaaactgttgcagggcaacactagtttgatatttgatttactctccaatgagactcaatggctgggccgtggtagactcatagttcctcttgttctttattaaattcatcctgctaattagatttctagtgacttgtaacatgtagtttacactgaattgcaattacagatgcatacaactactatactagaaaaaattgtcatttctgatgtgccaataaatgatttttatgagagaataaa

SEQ ID NO: 184864 - protein, 403 aa, Artificial Sequence
  derived and/or modified sequence
MNHKSKKRIREAKRSARPELKDSLDWTRHNYYESFSLSPAAVADNVERADALQLSVEEFVERYERPYKPVVLLNAQEGWSAQEKWTLERLKRKYRNQKFKCGEDNDGYSVKMKMKYYIEYMESTRDDSPLYIFDSSYGEHPKRRKLLEDYKVPKFFTDDLFQYAGEKRRPPYRWFVMGPPRSGTGIHIDPLGTSAWNALVQGHKRWCLFPTSTPRELIKVTRDEGGNQQDEAITWFNVIYPRTQLPTWPPEFKPLEILQKPGETVFVPGGWWHVVLNLDTTIAITQNFASSTNFPVVWHKTVRGRPKLSRKWYRILKQEHPELAVLADSVDLQESTGIASDSSSDSSSSSSSSSSDSDSECESGSEGDGTVHRRKKRRTCSMVGNGDTTSQDDCVSKERSSSR

SEQ ID NO: 184865 - DNA, 1119 bp, Artificial Sequence
  derived and/or modified sequence
atgaatcataagagcaagaaacggatcagagaggccaagagatccgctcgccccgaacttaaggacagtctggattggacccggcataactactatgagagcttttcgttgagtccagcagctgtggccgacaacgtggaaagggctgatgccctgcagcttagcgtggaggaatttgtggagcggtacgagagaccatataaaccagtggtactactgaatgcccaggagggctggtcagcccaggagaaatggaccctggagaggctgaagcgcaaatatcggaatcagaagttcaagtgcggagaggataacgacggctatagcgtgaaaatgaaaatgaagtactacatcgaatatatggaatctacgcgggatgattcaccactgtacattttcgacagcagctacggcgagcatccgaagcggcgcaagctgctagaggactacaaggtgcctaaattctttacagacgatctctttcagtatgctggggaaaagcgcagaccaccctacaggtggtttgtaatgggccctccgcgctcgggtacaggcatccacatcgatcccttgggtaccagtgcttggaacgctctggtccagggtcataaaagatggtgcttgtttcctaccagcacacccagagagctcattaaagtgaccagggatgaaggtggtaatcagcaggatgaggccattacttggttcaatgtgatctaccctcggacccagctgcctacatggccacctgaattcaaacctctcgagattcttcaaaaacccggcgaaacagtgttcgtgccaggcgggtggtggcatgtagtactcaacttagataccacgattgctattacacaaaacttcgctagcagcaccaatttcccagtggtctggcataaaactgttcgagggcgccctaagctgagccggaagtggtaccggatactgaagcaagagcatccagaattggccgtattagcggactcagtcgatctgcaggaaagcaccggtatcgcctccgactcttccagcgatagcagctcatcttcgagcagctcttcatctgatagtgactcagagcgtatccgcgatacatgtggcggccgcgcacacccttag

SEQ ID NO: 184866 - DNA, 1212 bp, Artificial Sequence
  derived and/or modified sequence
atgaaccacaaatccaaaaaacggatcagggaggcaaaaaggtcagccagacctgaattgaaggattcactggattggactaggcataactactacgaatctttttccctctcgcctgcagctgtggctgacaacgtcgagcgtgctgatgccttgcagctgagtgtcgaagagtttgtcgagcgatacgaacggccttacaagcccgtggttctcctgaacgcacaggagggctggtcagctcaggagaaatggacactggagagactgaagcgtaaataccggaatcaaaaattcaagtgcggcgaggataacgatgggtactccgtcaagatgaagatgaagtattacatcgagtacatggagtccacccgcgacgactccccactttatatctttgatagctcctacggcgagcatcccaagagacgcaagttattagaagattataaggtccctaagttctttaccgatgacttgtttcagtatgccggtgagaagagaaggccaccataccgctggttcgtgatggggcctccacgttccggcacaggcatacacatcgacccactcggtaccagtgcgtggaacgctctcgttcaaggacacaaacgctggtgcctatttcccacttctaccccaagagagctgatcaaagtgacccgtgatgagggcggcaatcagcaagatgaagccattacatggttcaatgtcatatacccacgtacccagctccctacatggcccccggaattcaaaccactggaaattctgcaaaaaccgggtgagacagtgtttgtgcccggcggctggtggcatgttgtactaaacctggacacaacaatcgcaataacgcaaaactttgcatcctctaccaatttccctgtggtgtggcacaagaccgttcggggacgtccaaagctctcccgtaagtggtaccgcattctgaaacaggagcaccctgagcttgcagttctcgccgactccgtggatctgcaagaatccaccggcattgcctcagactcttcctctgacagcagtagtagctcgagtagtagctcaagcgacagtgacagcgagtgtgaatctggaagcgagggtgatggcaccgtgcaccgacgaaagaaaaggaggacatgctcaatggtggggaatggggacactaccagccaggatgattgtgtgtcaaaggaaagatcctccagccggtag

SEQ ID NO: 184867 - DNA, 1220 bp, Artificial Sequence
  derived and/or modified sequence
gggtactgccgtcgccgccgcccaggccggggaggggtgcgttagtgtcaggaagcgggctgcgccgaggtcgtagcggaaccagctggcgaccccgcagaatgaaccacaagagcaagaagcgcatccgcgaggccaagcggagtgcgcggccggagctcaaggactcgctggattggacccggcacaactactacgagagcttctcgctgagcccggcggccgtggcggataacgtggaaagggcagatgctttacagctgtctgtggaagaatttgtggagcggtatgaaagaccttacaagcccgtggttttgttgaatgcgcaagagggctggtctgcgcaggagaaatggactctggagcgcctaaaaaggaaatatcggaaccagaagttcaagtgtggtgaggataacgatggctactcagtgaagatgaagatgaaatactacatcgagtacatggagagcactcgagatgatagtcccctttacatctttgacagcagctatggtgaacaccctaaaagaaggaaacttttggaagactacaaggtgccaaagtttttcactgatgaccttttccagtatgctggggagaagcgcaggcccccttacaggtggtttgtgatggggccaccacgctccggaactgggattcacatcgaccctctgggaaccagtgcctggaatgccttagttcagggccacaagcgctggtgcctgtttcctaccagcactcccagggaactcatcaaagtgacccgagacgaaggagggaaccagcaagacgaagctattacctggtttaatgttatttatccccggacacagcttccaacctggccacctgaattcaaacccctggaaatcttacaaaaaccaggagagactgtctttgtaccaggaggctggtggcatgttgtcctcaatctcgacactactatcgccatcacccaaaattttgccagcagcaccaacttccctgtggtatggcacaagacggtaagagggagaccaaagttatcaaggaaatggtataggattttgaagcaagagcaccccgagttggcagtcctcgcagactcggttgaccttcaggagtccacagggatagcttccgacagctccagcgactcttccagctcctccagctccagttcgtcagactccgactcagagaggattagggacacttgtggaggccgggctcacccctga

SEQ ID NO: 184868 - DNA, 1603 bp, Artificial Sequence
  derived and/or modified sequence
agcgaagggcgtttgggtactgccgtcgccgccgcccaggccggggaggggtgcgttagtgtcaggaagcgggctgcgccgaggtcgtagcggaaccagctggcgaccccgcagaatgaaccacaagagcaagaagcgcatccgcgaggccaagcggagtgcgcggccggagctcaaggactcgctggattggacccggcacaactactacgagagcttctcgctgagcccggcggccgtggcggataacgtggaaagggcagatgctttacagctgtctgtggaagaatttgtggagcggtatgaaagaccttacaagcccgtggttttgttgaatgcgcaagagggctggtctgcgcaggagaaatggactctggagcgcctaaaaaggaaatatcggaaccagaagttcaagtgtggtgaggataacgatggctactcagtgaagatgaagatgaaatactacatcgagtacatggagagcactcgagatgatagtcccctttacatctttgacagcagctatggtgaacaccctaaaagaaggaaacttttggaagactacaaggtgccaaagtttttcactgatgaccttttccagtatgctggggagaagcgcaggcccccttacaggtggtttgtgatggggccaccacgctccggaactgggattcacatcgaccctctgggaaccagtgcctggaatgccttagttcagggccacaagcgctggtgcctgtttcctaccagcactcccagggaactcatcaaagtgacccgagacgaaggagggaaccagcaagacgaagctattacctggtttaatgttatttatccccggacacagcttccaacctggccacctgaattcaaacccctggaaatcttacaaaaaccaggagagactgtctttgtaccaggaggctggtggcatgttgtcctcaatctcgacactactatcgccatcacccaaaattttgccagcagcaccaacttccctgtggtatggcacaagacggtaagagggagaccaaagttatcaaggaaatggtataggattttgaagcaagagcaccccgagttggcagtcctcgcagactcggttgaccttcaggagtccacagggatagcttccgacagctccagcgactcttccagctcctccagctccagttcgtcagactccgactcagagtgcgagtctggatccgagggcgatgggacagtgcaccgcaggaagaagaggaggacgtgcagcatggtgggaaacggggacaccacctcccaggacgactgtgtcagcaaagagcgcagctcctccaggtgacccagcaaggctgttgtctgtatggaaggacacgctcgcggcaagggcagggcctggggagggtggcctgtccagtcctgcagacaaggggaggcctgacagagcccaagaatgaggacaccctcggcacgggaacccattcacttagcgtttgctccagtagctttccctctgctaccaatgcagataaacgcggcttgttttactcaggcaagagaatgtgaatagtgccaagaaaatcctttacattatttaataaaaattgaatccattttc

SEQ ID NO: 184869 - DNA, 1119 bp, Artificial Sequence
  derived and/or modified sequence
atgaaccacaagagcaagaagaggatccgggaggccaagaggtctgcccggcctgagctgaaggacagcctggactggaccaggcacaactactatgagagcttcagcctgagccctgctgctgtggccgacaacgtggagcgggcagatgccctgcagctgtctgtggaggagtttgtggagagatatgagcggccctacaagcctgtggtgctgctgaatgcccaggagggctggagcgcccaggagaagtggaccctggagcggctgaagaggaagtacagaaaccagaagttcaagtgtggagaagataatgatggctacagcgtgaagatgaagatgaagtactacatcgagtacatggagagcaccagagatgacagccccctgtacatctttgacagcagctatggagagcaccccaagaggaggaagctgctggaggactacaaggtgcccaagttcttcacagatgacctcttccagtatgctggggagaagaggcggcccccctaccgctggtttgtgatgggccccccaagaagtggcaccggcatccacatcgaccccctgggcaccagcgcctggaatgccctggtgcagggccacaagcgctggtgcctcttccccaccagcaccccccgggagctgatcaaggtgaccagagatgaaggaggcaaccagcaggatgaggccatcacctggttcaacgtcatctaccccaggacccagctgcccacctggcccccagagttcaagcccctggagatcctgcagaagccaggagagaccgtgtttgtgcctgggggctggtggcacgtggtgctgaacctggacaccaccatcgccatcacccagaactttgccagcagcaccaacttccctgtggtgtggcacaagacagtgcggggccggcccaagctgagcaggaagtggtaccgcatcctgaagcaggagcaccctgagctggccgtgctggccgacagcgtggacctgcaggagagcacaggcatcgccagtgacagcagcagtgacagcagcagcagcagcagcagcagcagcagtgacagcgacagcgagcgcatccgggacacctgtggcggccgggcccacccctag

SEQ ID NO: 184870 - DNA, 1212 bp, Artificial Sequence
  derived and/or modified sequence
atgaaccacaagagcaagaagaggatccgggaggccaagaggtctgcccggcctgagctgaaggacagcctggactggaccaggcacaactactatgagagcttcagcctgagccctgctgctgtggccgacaacgtggagcgggcagatgccctgcagctgtctgtggaggagtttgtggagagatatgagcggccctacaagcctgtggtgctgctgaatgcccaggagggctggagcgcccaggagaagtggaccctggagcggctgaagaggaagtacagaaaccagaagttcaagtgtggagaagataatgatggctacagcgtgaagatgaagatgaagtactacatcgagtacatggagagcaccagagatgacagccccctgtacatctttgacagcagctatggagagcaccccaagaggaggaagctgctggaggactacaaggtgcccaagttcttcacagatgacctcttccagtatgctggggagaagaggcggcccccctaccgctggtttgtgatgggccccccaagaagtggcaccggcatccacatcgaccccctgggcaccagcgcctggaatgccctggtgcagggccacaagcgctggtgcctcttccccaccagcaccccccgggagctgatcaaggtgaccagagatgaaggaggcaaccagcaggatgaggccatcacctggttcaacgtcatctaccccaggacccagctgcccacctggcccccagagttcaagcccctggagatcctgcagaagccaggagagaccgtgtttgtgcctgggggctggtggcacgtggtgctgaacctggacaccaccatcgccatcacccagaactttgccagcagcaccaacttccctgtggtgtggcacaagacagtgcggggccggcccaagctgagcaggaagtggtaccgcatcctgaagcaggagcaccctgagctggccgtgctggccgacagcgtggacctgcaggagagcacaggcatcgccagtgacagcagcagtgacagcagcagcagcagcagcagcagcagcagtgacagcgacagtgaatgtgagagcggctctgaaggagatggcaccgtgcacaggaggaagaagaggaggacctgcagcatggtgggcaatggagacaccaccagccaggatgactgtgtgtccaaggagaggagcagcagcaggtag

SEQ ID NO: 184871 - DNA, 1119 bp, Artificial Sequence
  derived and/or modified sequence
atgaaccacaagagcaagaagcggatccgggaggccaagcggagcgctcgtccagaactaaaagattcacttgactggacgcggcacaattattatgaatccttttcgctatcccccgccgccgttgctgacaatgtggagagggccgacgcactacagctgtccgtcgaagaatttgtggagcggtacgagcgaccctacaaacctgttgttctcctgaatgcccaggaaggttggtcagcccaggagaagtggacactggagcgcctaaaaagaaagtaccgcaaccaaaagttcaaatgtggagaggataatgacggctactccgtcaaaatgaagatgaaatactacatcgaatacatggaatcaacgcgggacgattcacccctgtatattttcgatagttcttacggagaacaccctaagcgccgcaagctcctggaggactataaagtgcctaaattttttaccgacgatctgttccagtatgctggagaaaaaagaagaccaccttacaggtggttcgtcatgggacccccacgctccgggactggaattcacatcgatccactcgggacaagtgcatggaacgctctcgtgcaggggcacaagcgctggtgcctgtttcctacaagcacccccagggagttaatcaaggtcacccgcgatgaagggggtaaccagcaagatgaggctatcacttggttcaacgtgatttatcctagaacccaactcccgacatggcctccagaatttaagccgctggagatcttgcaaaaaccgggtgagacagtatttgtgcccggaggctggtggcacgttgttctgaacctcgacacaacgattgctataacccaaaatttcgcaagcagcactaatttcccggtagtttggcataaaaccgtgcgagggcggcctaagctgtcccgtaagtggtatcgcattctgaagcaggaacaccctgagctggctgtcctcgccgattcagtggatctccaggaaagcacaggtatcgcgagtgactcttcctccgactcttctagcagctctagttccagctcgtcagactccgacagcgagcgaatcagagacacctgtggtgggcgggcacacccgtag

SEQ ID NO: 184872 - DNA, 1212 bp, Artificial Sequence
  derived and/or modified sequence
atgaaccacaagagcaagaagcggatccgggaggccaagcggagcgcacgaccagaacttaaagatagcctcgattggacacgccacaattattatgagtcattctctctgtcacctgctgctgtcgccgacaatgtagagagggccgacgccctgcaactgtccgtggaggaatttgtggagcgatatgaaaggccttacaaacctgtggtcttgcttaacgcccaggaggggtggtctgcccaggaaaaatggaccctggaaagacttaaacggaaatacaggaatcagaagtttaagtgcggcgaggacaacgacggctactctgtgaaaatgaagatgaaatattatatcgaatatatggagagcactcgcgacgattctccactctacatattcgattcatcatatggcgagcatcccaagcgacgaaagctgcttgaggactacaaagtgcccaagtttttcactgatgatctgttccagtatgcaggtgagaaaaggagacctccataccgctggtttgtgatgggaccccctaggtcagggaccggaatccacattgacccattgggcacgtctgcttggaatgctctggtccagggccataagagatggtgtctcttccctactagcactccccgcgagttgatcaaggtcacaagggacgaaggcggtaatcagcaggatgaagctatcacatggtttaacgtgatctatcctagaacccagttgccaacatggccacccgagttcaaaccactggagattctccaaaagcctggcgaaactgtgttcgtgccaggcggctggtggcacgttgtgctgaacctggataccacaatcgccatcacacagaacttcgcgtcttctaccaatttccccgtggtctggcataagaccgtcagaggcagacctaagctcagtagaaaatggtatagaatacttaagcaggaacatcctgaactggctgttctggcagactccgtggaccttcaggaaagtacaggcattgcctctgatagttcctccgacagttcctccagctcctcttcatctagctcggactccgactcagagtgcgagagtggatcagaaggagacgggactgtgcaccgccgcaagaaacggcgcacatgctctatggttggaaatggcgatacgacaagtcaagacgattgcgtttccaaggagcgaagcagttccaggtag

SEQ ID NO: 184873 - DNA, 1119 bp, Artificial Sequence
  derived and/or modified sequence
atgaaccacaagtcaaaaaagcggattcgcgaagccaaaaggtcagccaggccggaattaaaggattctctagactggacacgccataattactatgaatctttttctctctctccggcagccgttgcagacaatgtcgaacgcgcagatgcattgcagctgagtgtggaggagttcgtagagcgatatgagaggccgtataaaccagttgttcttctcaatgcacaggaaggctggtcagcccaggagaagtggacactcgaacggctgaagcggaagtaccgaaaccaaaagtttaaatgcggcgaggacaacgacgggtactccgttaagatgaagatgaaatattatattgagtatatggagagcacccgcgacgactcccccttatatatttttgatagtagctatggagaacaccccaagcggcgaaagttgttagaagactataaggttcctaagttcttcacggacgacctgttccagtacgcgggagaaaaaaggagacccccttaccggtggttcgttatggggccacccagaagtgggaccggaatacatatagaccctctgggtacctctgcttggaacgccctggtgcagggtcacaagcgctggtgtctctttccaaccagcacacctagggagctgatcaaagtcaccagagatgagggtggaaaccagcaggacgaggccattacctggttcaatgtgatctaccctcggactcagttgcctacatggcctcccgaattcaagcctctggaaatactgcaaaaaccaggagaaacagtgtttgtgcctggagggtggtggcacgtggtgttaaacctggatactacgatcgcgatcacccagaacttcgctagctcaaccaattttccagtagtgtggcacaagacggtccggggaaggccaaaattgtcacgcaagtggtatcggatcttgaagcaggaacatcccgagttggcagtgttagcagacagcgttgacctccaggagtctacagggattgcatccgactcaagcagcgacagctcaagcagcagctctagctcatccagtgactctgactccgagagaatccgcgacacttgcgggggtagggcacatccctag

SEQ ID NO: 184874 - DNA, 1212 bp, Artificial Sequence
  derived and/or modified sequence
atgaaccacaaaagcaagaagaggatcagggaagctaaacgatcggcccgtcccgaattaaaagactcgctagactggacccgacacaactattatgagtccttcagcttaagccccgcagccgtcgctgacaacgtcgagagggctgatgccctccagctgagcgttgaggaattcgttgagcgttacgagagaccttataaacctgttgtgctgttgaatgcccaagaaggttggagcgcccaggagaagtggaccctggaaagactaaaaagaaagtacagaaaccagaagtttaaatgcggcgaggacaatgacggatattcagtcaagatgaagatgaagtactacattgagtatatggagtcaactagagatgactctccgttgtacatcttcgacagttcctacggcgagcacccaaaaagacgtaagctgctcgaagactacaaagtgcccaaattcttcacagacgacttgttccagtatgcgggtgagaagagacgtcctccttatcggtggttcgtgatggggcctcctaggagtggcacgggcatccatatcgacccactggggacaagcgcctggaacgctttagttcagggccataagagatggtgcctgtttcctacttcaacaccccgagagttgatcaaagtgacacgagacgaagggggaaaccaacaggacgaggcgattacctggttcaacgttatatatccgagaacccagcttccaacttggccacccgaattcaagcccctggagatcctgcagaagccaggagagaccgtgttcgttcctgggggttggtggcacgtggtgctgaacctggacacgactatcgcaatcacccaaaattttgcatcatccaccaatttccctgtggtatggcacaagactgtcaggggtcgccctaagttgagtcgaaagtggtaccgaatcttgaagcaggagcatcccgagctagcagtgctcgccgactctgtggacttacaggagagcaccgggatcgcctcggactcatcctccgactcctccagttcttctagttcctcctcgtctgatagtgatagtgagtgcgagagtggatccgagggggacggtactgtacaccgtagaaagaaaagaagaacatgttctatggtgggcaatggggataccacttcccaagacgattgtgtcagcaaagagcgaagttcttcaagatag

SEQ ID NO: 184875 - DNA, 1119 bp, Artificial Sequence
  derived and/or modified sequence
atgaaccacaagagcaagaagagaatcagagaggccaagagaagcgccagacccgagctgaaggacagcctggactggaccagacacaactactacgagagcttcagcctgagccccgccgccgtggccgacaacgtggagagagccgacgccctgcagctgagcgtggaggagttcgtggagagatacgagagaccctacaagcccgtggtgctgctgaacgcccaggagggctggagcgcccaggagaagtggaccctggagagactgaagagaaagtacagaaaccagaagttcaagtgcggcgaggacaacgacggctacagcgtgaagatgaagatgaagtactacatcgagtacatggagagcaccagagacgacagccccctgtacatcttcgacagcagctacggcgagcaccccaagagaagaaagctgctggaggactacaaggtgcccaagttcttcaccgacgacctgttccagtacgccggcgagaagagaagacccccctacagatggttcgtgatgggcccccccagaagcggcaccggcatccacatcgaccccctgggcaccagcgcctggaacgccctggtgcagggccacaagagatggtgcctgttccccaccagcacccccagagagctgatcaaggtgaccagagacgagggcggcaaccagcaggacgaggccatcacctggttcaacgtgatctaccccagaacccagctgcccacctggccccccgagttcaagcccctggagatcctgcagaagcccggcgagaccgtgttcgtgcccggcggctggtggcacgtggtgctgaacctggacaccaccatcgccatcacccagaacttcgccagcagcaccaacttccccgtggtgtggcacaagaccgtgagaggcagacccaagctgagcagaaagtggtacagaatcctgaagcaggagcaccccgagctggccgtgctggccgacagcgtggacctgcaggagagcaccggcatcgccagcgacagcagcagcgacagcagcagcagcagcagcagcagcagcagcgacagcgacagcgagagaatcagagacacctgcggcggcagagcccacccctag

SEQ ID NO: 184876 - DNA, 1212 bp, Artificial Sequence
  derived and/or modified sequence
atgaaccacaagagcaagaagagaatcagagaggccaagagaagcgccagacccgagctgaaggacagcctggactggaccagacacaactactacgagagcttcagcctgagccccgccgccgtggccgacaacgtggagagagccgacgccctgcagctgagcgtggaggagttcgtggagagatacgagagaccctacaagcccgtggtgctgctgaacgcccaggagggctggagcgcccaggagaagtggaccctggagagactgaagagaaagtacagaaaccagaagttcaagtgcggcgaggacaacgacggctacagcgtgaagatgaagatgaagtactacatcgagtacatggagagcaccagagacgacagccccctgtacatcttcgacagcagctacggcgagcaccccaagagaagaaagctgctggaggactacaaggtgcccaagttcttcaccgacgacctgttccagtacgccggcgagaagagaagacccccctacagatggttcgtgatgggcccccccagaagcggcaccggcatccacatcgaccccctgggcaccagcgcctggaacgccctggtgcagggccacaagagatggtgcctgttccccaccagcacccccagagagctgatcaaggtgaccagagacgagggcggcaaccagcaggacgaggccatcacctggttcaacgtgatctaccccagaacccagctgcccacctggccccccgagttcaagcccctggagatcctgcagaagcccggcgagaccgtgttcgtgcccggcggctggtggcacgtggtgctgaacctggacaccaccatcgccatcacccagaacttcgccagcagcaccaacttccccgtggtgtggcacaagaccgtgagaggcagacccaagctgagcagaaagtggtacagaatcctgaagcaggagcaccccgagctggccgtgctggccgacagcgtggacctgcaggagagcaccggcatcgccagcgacagcagcagcgacagcagcagcagcagcagcagcagcagcagcgacagcgacagcgagtgcgagagcggcagcgagggcgacggcaccgtgcacagaagaaagaagagaagaacctgcagcatggtgggcaacggcgacaccaccagccaggacgactgcgtgagcaaggagagaagcagcagcagatag

SEQ ID NO: 184877 - protein, 1303 aa, Artificial Sequence
  derived and/or modified sequence
MEAAPGTPPPPPSESPPPPSPPPPSTPSPPPCSPDARPATPHLLHHRLPLPDDREDGELEEGELEDDGAEETQDTSGGPERSRKEKGEKHHSDSDEEKSHRRLKRKRKKEREKEKRRSKKRRKSKHKRHASSSDDFSDFSDDSDFSPSEKGHRKYREYSPPYAPSHQQYPPSHATPLPKKAYSKMDSKSYGMYEDYENEQYGEYEGDEEEDMGKEDYDDFTKELNQYRRAKEGSSRGRGSRGRGRGYRGRGSRGGSRGRGMGRGSRGRGRGSMGGDHPEDEEDFYEEEMDYGESEEPMGDDDYDEYSKELNQYRRSKDSRGRGLSRGRGRGSRGRGKGMGRGRGRGGSRGGMNKGGMNDDEDFYDEDMGDGGGGSYRSRDHDKPHQQSDKKGKVICKYFVEGRCTWGDHCNFSHDIELPKKRELCKFYITGFCARAENCPYMHGDFPCKLYHTTGNCINGDDCMFSHDPLTEETRELLDKMLADDAEAGAEDEKEVEELKKQGINPLPKPPPGVGLLPTPPRPPGPQAPTSPNGRPMQGGPPPPPPPPPPPPGPPQMPMPVHEPLSPQQLQQQDMYNKKIPSLFEIVVRPTGQLAEKLGVRFPGPGGPPGPMGPGPNMGPPGPMGGPMHPDMHPDMHPDMHPDMHADMHADMPMGPGMNPGPPMGPGGPPMMPYGPGDSPHSGMMPPIPPAQNFYENFYQQQEGMEMEPGLLGDAEDYGHYEELPGEPGEHLFPEHPLEPDSFSEGGPPGRPKPGAGVPDFLPSAQRALYLRIQQKQQEEEERARRLAESSKQDRENEEGDTGNWYSSDEDEGGSSVTSILKTLRQQTSSRPPASVGELSSSGLGDPRLQKGHPTGSRLADPRLSRDPRLTRHVEASGGSGPGDSGPSDPRLARALPTSKPEGSLHSSPVGPSSSKGSGPPPTEEEEGERALREKAVNIPLDPLPGHPLRDPRSQLQQFSHIKKDVTLSKPSFARTVLWNPEDLIPLPIPKQDAVPPVPAALQSMPTLDPRLHRAATAGPPNARQRPGASTDSSTQGANLPDFELLSRILKTVNATGSSAAPGSSDKPSDPRVRKAPTDPRLQKPTDSTASSRAAKPGPAEAPSPTASPSGDASPPATAPYDPRVLAAGGLGQGGGGGQSSVLSGISLYDPRTPNAGGKATEPAADTGAQPKGAEGNGKSSASKAKEPPFVRKSALEQPETGKAGADGGTPTDRYNSYNRPRPKAAAAPAATTATPPPEGAPPQPGVHNLPVPTLFGTVKQTPKTGSGSPFAGNSPAREGEQDAASLKDVFKGFDPTASPFCQ

SEQ ID NO: 184878 - DNA, 3912 bp, Artificial Sequence
  derived and/or modified sequence
atggaggccgcccccggcacccccccccccccccccagcgagagcccccccccccccagcccccccccccccagcacccccagcccccccccctgcagccccgacgccagacccgccaccccccacctgctgcaccacagactgcccctgcccgacgacagagaggacggcgagctggaggagggcgagctggaggacgacggcgccgaggagacccaggacaccagcggcggccccgagagaagcagaaaggagaagggcgagaagcaccacagcgacagcgacgaggagaagagccacagaagactgaagagaaagagaaagaaggagagagagaaggagaagagaagaagcaagaagagaagaaagagcaagcacaagagacacgccagcagcagcgacgacttcagcgacttcagcgacgacagcgacttcagccccagcgagaagggccacagaaagtacagagagtacagccccccctacgcccccagccaccagcagtacccccccagccacgccacccccctgcccaagaaggcctacagcaagatggacagcaagagctacggcatgtacgaggactacgagaacgagcagtacggcgagtacgagggcgacgaggaggaggacatgggcaaggaggactacgacgacttcaccaaggagctgaaccagtacagaagagccaaggagggcagcagcagaggcagaggcagcagaggcagaggcagaggctacagaggcagaggcagcagaggcggcagcagaggcagaggcatgggcagaggcagcagaggcagaggcagaggcagcatgggcggcgaccaccccgaggacgaggaggacttctacgaggaggagatggactacggcgagagcgaggagcccatgggcgacgacgactacgacgagtacagcaaggagctgaaccagtacagaagaagcaaggacagcagaggcagaggcctgagcagaggcagaggcagaggcagcagaggcagaggcaagggcatgggcagaggcagaggcagaggcggcagcagaggcggcatgaacaagggcggcatgaacgacgacgaggacttctacgacgaggacatgggcgacggcggcggcggcagctacagaagcagagaccacgacaagccccaccagcagagcgacaagaagggcaaggtgatctgcaagtacttcgtggagggcagatgcacctggggcgaccactgcaacttcagccacgacatcgagctgcccaagaagagagagctgtgcaagttctacatcaccggcttctgcgccagagccgagaactgcccctacatgcacggcgacttcccctgcaagctgtaccacaccaccggcaactgcatcaacggcgacgactgcatgttcagccacgaccccctgaccgaggagaccagagagctgctggacaagatgctggccgacgacgccgaggccggcgccgaggacgagaaggaggtggaggagctgaagaagcagggcatcaaccccctgcccaagcccccccccggcgtgggcctgctgcccaccccccccagaccccccggcccccaggcccccaccagccccaacggcagacccatgcagggcggcccccccccccccccccccccccccccccccccccccggccccccccagatgcccatgcccgtgcacgagcccctgagcccccagcagctgcagcagcaggacatgtacaacaagaagatccccagcctgttcgagatcgtggtgagacccaccggccagctggccgagaagctgggcgtgagattccccggccccggcggcccccccggccccatgggccccggccccaacatgggcccccccggccccatgggcggccccatgcaccccgacatgcaccccgacatgcaccccgacatgcaccccgacatgcacgccgacatgcacgccgacatgcccatgggccccggcatgaaccccggcccccccatgggccccggcggcccccccatgatgccctacggccccggcgacagcccccacagcggcatgatgccccccatcccccccgcccagaacttctacgagaacttctaccagcagcaggagggcatggagatggagcccggcctgctgggcgacgccgaggactacggccactacgaggagctgcccggcgagcccggcgagcacctgttccccgagcaccccctggagcccgacagcttcagcgagggcggcccccccggcagacccaagcccggcgccggcgtgcccgacttcctgcccagcgcccagagagccctgtacctgagaatccagcagaagcagcaggaggaggaggagagagccagaagactggccgagagcagcaagcaggacagagagaacgaggagggcgacaccggcaactggtacagcagcgacgaggacgagggcggcagcagcgtgaccagcatcctgaagaccctgagacagcagaccagcagcagaccccccgccagcgtgggcgagctgagcagcagcggcctgggcgaccccagactgcagaagggccaccccaccggcagcagactggccgaccccagactgagcagagaccccagactgaccagacacgtggaggccagcggcggcagcggccccggcgacagcggccccagcgaccccagactggccagagccctgcccaccagcaagcccgagggcagcctgcacagcagccccgtgggccccagcagcagcaagggcagcggccccccccccaccgaggaggaggagggcgagagagccctgagagagaaggccgtgaacatccccctggaccccctgcccggccaccccctgagagaccccagaagccagctgcagcagttcagccacatcaagaaggacgtgaccctgagcaagcccagcttcgccagaaccgtgctgtggaaccccgaggacctgatccccctgcccatccccaagcaggacgccgtgccccccgtgcccgccgccctgcagagcatgcccaccctggaccccagactgcacagagccgccaccgccggcccccccaacgccagacagagacccggcgccagcaccgacagcagcacccagggcgccaacctgcccgacttcgagctgctgagcagaatcctgaagaccgtgaacgccaccggcagcagcgccgcccccggcagcagcgacaagcccagcgaccccagagtgagaaaggcccccaccgaccccagactgcagaagcccaccgacagcaccgccagcagcagagccgccaagcccggccccgccgaggcccccagccccaccgccagccccagcggcgacgccagcccccccgccaccgccccctacgaccccagagtgctggccgccggcggcctgggccagggcggcggcggcggccagagcagcgtgctgagcggcatcagcctgtacgaccccagaacccccaacgccggcggcaaggccaccgagcccgccgccgacaccggcgcccagcccaagggcgccgagggcaacggcaagagcagcgccagcaaggccaaggagccccccttcgtgagaaagagcgccctggagcagcccgagaccggcaaggccggcgccgacggcggcacccccaccgacagatacaacagctacaacagacccagacccaaggccgccgccgcccccgccgccaccaccgccacccccccccccgagggcgcccccccccagcccggcgtgcacaacctgcccgtgcccaccctgttcggcaccgtgaagcagacccccaagaccggcagcggcagccccttcgccggcaacagccccgccagagagggcgagcaggacgccgccagcctgaaggacgtgttcaagggcttcgaccccaccgccagccccttctgccagtag

SEQ ID NO: 184879 - DNA, 3912 bp, Artificial Sequence
  derived and/or modified sequence
atggaagctgcgccaggcacgcctcctcctccaccgtcagagtctccacctccgccaagccctcctcccccctccaccccttccccccctccttgttccccggatgcccgccctgccactccccaccttctacaccatagactgccactacctgatgacagagaagacggtgaactcgaagagggcgaactggaggatgatggggctgaagaaactcaagatacatctggtgggcccgagcgctcccggaaagagaagggggaaaagcaccatagcgactctgacgaagagaaaagccatcggcgccttaaaagaaaaaggaagaaggagagagaaaaggagaaaagacggagcaagaaaaggcgcaagagcaaacacaaacggcacgccagtagttccgatgatttctcagactttagcgatgattctgatttcagcccaagcgagaaaggacatagaaagtaccgcgaatattctcctccctatgcaccttcccaccaacagtacccaccatcccacgccactcccctccctaaaaaggcctatagtaagatggacagtaagtcctatggaatgtacgaggattacgaaaacgaacagtatggtgaatacgaaggcgatgaggaggaggacatgggtaaggaagattacgatgattttactaaagagctgaatcagtataggcgagctaaagaaggctcaagcaggggccgggggagcagggggcgaggtagagggtataggggtcgtggctctaggggaggctcgcgcggacgcggaatgggccggggcagtcgcggtcgaggccgagggtccatgggcggggatcaccctgaggacgaggaagacttttatgaggaagagatggattacggagagagcgaagaacccatgggcgatgatgattatgatgagtatagcaaagaactaaaccagtataggcgcagcaaagactctcggggcagggggctcagcagaggaagaggtcggggttctcggggccgcggaaagggaatgggacgagggcggggacgtggaggatcaaggggcgggatgaacaagggcggtatgaacgatgacgaagacttttacgacgaggatatgggggatggaggaggcggcagttatcggtctcgtgaccatgataagccccatcagcagtctgacaaaaaggggaaagtcatttgtaaatattttgtggaggggaggtgtacttggggagaccattgtaacttctcccatgatatcgagctgcctaagaagagggagctgtgtaagttctacatcacaggattctgtgccagagccgagaattgtccatatatgcacggcgactttccctgtaaattgtatcacacgaccgggaattgtatcaacggcgatgattgcatgttcagccacgatcctctgaccgaggaaaccagagaactgctggacaagatgctggctgacgatgctgaagccggggcggaagatgagaaggaggtggaagaacttaaaaaacagggtattaatcctctcccaaagccaccaccaggcgtgggtctgctccctaccccaccacgcccaccaggaccccaggcacctacttcccctaatggcagaccgatgcagggtgggccgcccccccccccccctcctccacctccaccacccgggccaccacagatgcccatgcctgtgcatgagcccctatctccccagcagcttcagcagcaagatatgtacaacaaaaagattcctagtctgtttgaaattgtggtccggccaacaggtcagttggccgagaaacttggtgtgcgctttccaggcccagggggtccacccggacccatgggacctggcccaaacatgggtccccccggcccaatggggggcccaatgcatccagacatgcaccctgatatgcatccggatatgcatcctgatatgcatgccgatatgcacgcggacatgcccatgggcccaggtatgaatccaggccctccaatgggcccagggggaccgcccatgatgccgtacggacctggagacagcccacacagtgggatgatgcctcccataccccctgcacagaatttttacgaaaatttctatcaacaacaggaaggcatggagatggagcccggactgctgggggacgctgaggactacggacattatgaagaattaccgggggagccaggtgagcacctatttccagaacatcccttagaacctgattcttttagcgaaggaggccctccgggacggccaaagcccggagccggcgtcccagacttcctcccaagcgcccagagggccctgtatctgcgtattcaacagaaacagcaagaagaagaagagcgagcccgacgactggctgaaagctctaaacaggaccgagaaaacgaagagggtgacacaggaaattggtactccagtgacgaagacgagggaggcagtagtgtcacgtcaatcctgaagacactgcgccagcaaaccagtagccggcctcccgcgtcagtcggagagttgtccagctccggtctcggagaccctcgtctgcagaaaggccacccgactggtagccggcttgccgatccaagactgagcagagaccccagattaactcgtcatgtagaagcctccggcggaagcggccctggcgattccggcccttcagatccccggctggccagggccttacctaccagcaaaccagagggctccctgcatagtagtcctgtcggccccagtagcagtaaggggtccggcccacctccaactgaagaagaggaaggggaaagagctctccgcgaaaaagccgtgaacatcccccttgatcctctcccaggccatcctcttagagatcctaggtcccagctccagcagtttagtcacatcaagaaagacgtcacactgtccaagcctagttttgcccgaacagtattgtggaatcccgaagatctaatacctctccccattcccaaacaggatgctgtgcctcccgtacccgcagctttgcagtctatgcccacgctggacccaaggctgcatcgcgcagctaccgcaggtccaccaaacgcccgtcagaggcctggcgccagtacggatagcagcacccaaggcgctaacctaccggactttgaactgctttccaggatcctgaagacagtaaatgccacagggagctctgccgctcctggctcctcagataaaccttctgaccctcgagtgcgcaaggctcctaccgacccccgtctccagaagcccaccgactctaccgcctcaagtcgggccgcaaagcctggacctgccgaagctccatcaccaacagcttctcctagtggagatgcctcccctccagcgaccgcgccttacgatccgcgggtgctggcagccggtgggctgggacagggcggaggcggaggacaatcatcggtcctgagcggaatcagcctgtatgaccctcgcacaccaaacgccggcggcaaggcaaccgaacccgccgcagatacaggtgctcagcccaagggcgccgaggggaacggcaaatcatccgcctctaaggccaaggaacccccctttgtgcggaagagcgcccttgaacagcctgagacaggcaaagctggcgcagatgggggaactccgacagacaggtacaactcttataaccggccaagaccaaaagccgctgctgcccccgccgcgactacagctaccccacctcccgaaggcgccccaccccaaccgggcgtgcataacctcccagtcccaacgctgtttggaaccgtgaaacagacccctaagactggatcgggctcccccttcgccggtaactctcctgcaagagagggcgaacaggacgccgcgagcctcaaagacgttttcaagggcttcgaccccacagcttcaccattctgtcagtag

SEQ ID NO: 184880 - DNA, 3912 bp, Artificial Sequence
  derived and/or modified sequence
atggaggccgcccctggcaccccacctcctcctccttctgagagccccccaccacccagccccccaccacccagcacccccagccccccaccctgcagcccagatgcccggcctgccaccccccacctgctgcaccaccggctgcccctgcctgatgacagagaagatggagagctggaggagggggagctggaggatgatggagctgaggagacccaggacaccagcggcggccctgagaggagcaggaaggagaagggggagaagcaccacagcgacagtgatgaggagaagagccaccggcggctgaagaggaagaggaagaaggagcgggagaaggagaagaggaggagcaagaagaggaggaagagcaagcacaagagacatgccagcagcagtgatgacttcagtgacttcagtgatgacagcgacttcagccccagcgagaagggccacaggaagtaccgggagtacagccccccctatgcccccagccaccagcagtacccacccagccacgccacccccctgcccaagaaggcctacagcaagatggacagcaagagctatggcatgtatgaggactatgaaaatgagcagtatggagaatatgaaggagatgaggaggaggacatgggcaaggaggactatgatgacttcaccaaggagctgaaccagtaccgccgggccaaggagggcagcagccggggccggggcagccggggccggggccggggctaccggggccggggcagccggggcggcagccggggccggggcatgggccggggcagccggggccggggccggggctccatgggcggggaccacccagaagatgaggaggacttctatgaggaggagatggactatggagagagcgaggagcccatgggagatgatgattatgatgagtacagcaaggagctgaaccagtaccgccgcagcaaggacagccggggccggggcctgagccggggccggggccggggcagccggggccggggcaagggcatgggccggggccggggccggggcggcagccggggcggcatgaacaagggcggcatgaatgatgatgaggacttctatgatgaggacatgggagatggcggcggcggcagctaccgcagccgggaccatgacaagccccaccagcagagcgacaagaagggcaaggtgatctgcaagtactttgtggagggccgctgcacctggggagaccactgcaacttcagccatgacatcgagctgcccaagaagcgggagctgtgcaagttctacatcaccggcttctgtgcccgggcagagaactgcccctacatgcatggagacttcccctgcaagctgtaccacaccaccggcaactgcatcaatggagatgactgcatgttcagccatgaccccctgacagaggagacccgggagctgctggacaagatgctggctgatgatgctgaggccggggctgaagatgagaaggaggtggaggagctgaagaagcagggcatcaaccccctgcccaagcccccacctggggtgggcctgctgcccaccccacccaggcctcctggcccccaggcccccaccagccccaacggccggcccatgcagggcggccccccacctcctcctcctcctcctcctcctcctcctggccccccccagatgcccatgcctgtgcatgagcccctgagcccccagcagctgcagcagcaggacatgtacaacaagaagatccccagcctgtttgagatcgtggtgcggcccaccggccagctggccgagaagctgggcgtgcgcttccctggccctgggggccccccaggccccatgggccctggccccaacatgggccccccaggccccatgggcggccccatgcacccagacatgcacccagacatgcacccagacatgcacccagacatgcacgccgacatgcacgccgacatgcccatgggccctggcatgaaccctggcccccccatgggccctgggggcccccccatgatgccctacggccctggggacagcccccacagcggcatgatgccacccatccccccagcccagaacttctatgagaacttctaccagcagcaggagggcatggagatggagcccggcctgctgggagatgctgaggactatggccactatgaggagctgcctggagagcccggggagcacctgtttcctgagcaccccctggagccagacagcttcagcgagggcggccccccaggccggcccaagccaggggccggcgtgcctgacttcctgcccagcgcccagagggccctgtacctgcgcatccagcagaagcagcaggaggaggaggagcgggcccggcggctggccgagagcagcaagcaggaccgggagaatgaggagggggacaccggcaactggtacagcagtgatgaagatgaaggaggcagctctgtgaccagcatcctgaagaccctgcggcagcagaccagcagccggcccccagcctctgtgggggagctgagcagcagcggcctgggggacccccggctgcagaagggccaccccaccggcagccggctggccgacccccggctgagccgggacccccggctgaccaggcatgtggaggccagcggcggcagcggccctggggacagcggccccagcgacccccggctggcccgggccctgcccaccagcaagccagagggcagcctgcacagcagccctgtgggccccagcagcagcaagggcagcggccccccacccacagaggaggaggagggggagcgggccctgcgggagaaggctgtgaacatccccctggaccccctgcccggccaccccctgcgggaccccaggagccagctgcagcagttcagccacatcaagaaggatgtgaccctgagcaagcccagctttgccaggacagtgctgtggaaccctgaggacctgatccccctgcccatccccaagcaggatgctgtgccccctgtgcctgctgccctgcagagcatgcccaccctggacccccggctgcacagagctgccacagctggccccccaaatgcccggcagaggcctggggccagcacagacagcagcacccagggcgccaacctgcctgactttgagctgctgagccgcatcctgaagacagtgaatgccaccggcagcagcgctgcccctggcagcagtgacaagcccagcgacccccgggtgaggaaggcccccacagacccccggctgcagaagcccacagacagcacagccagcagccgggccgccaagccaggccctgctgaggcccccagccccacagccagccccagcggagatgccagccccccagccacagccccctatgacccccgggtgctggccgccggcggcctgggccagggcggcggcggcggccagagctctgtgctgagcggcatcagcctgtatgaccccaggaccccaaatgctgggggcaaggccacagagcctgctgctgacacaggagcccagcccaagggagctgagggcaatggcaagagcagcgccagcaaggccaaggagcccccatttgtgaggaagagcgccctggagcagcctgagaccgggaaggccggggctgatggcggcacccccacagaccgctacaacagctacaaccggccccggcccaaggctgctgctgccccagctgccaccacagccaccccacctcctgagggcgccccaccccagcccggggtgcacaacctgcctgtgcccaccctgtttggcaccgtgaagcagacccccaagacaggcagcggcagcccctttgctggcaacagccctgcccgggagggggagcaggatgctgccagcctgaaggatgtgttcaagggctttgaccccacagccagccccttctgccagtag

SEQ ID NO: 184881 - DNA, 3912 bp, Artificial Sequence
  derived and/or modified sequence
atggaggccgcccccggcacccccccccccccccccagcgagagcccaccaccacccagcccccctcccccctcaaccccatccccacccccatgctcccctgacgcccgccccgcgacaccccacttacttcaccacaggctcccacttccagatgatcgagaggatggagagctggaggagggcgagctggaggatgatggtgctgaagaaacccaggacacctccggcggccccgagagatctcgaaaagaaaagggcgagaaacaccacagcgactctgatgaagagaaatctcacagaagactgaagcgcaaacgcaagaaggagcgagagaaggaaaagcggaggtcaaaaaaacgcagaaagagtaagcacaagagacacgccagcagctcagatgacttctccgacttcagtgatgactctgatttctccccttcagaaaaagggcatcgaaagtaccgcgaatactcaccgccttacgcgccatcacatcagcaatatcccccgtcacacgccacgcctctgcccaaaaaagcttactccaaaatggatagcaagtcatacggcatgtatgaggattatgaaaatgagcagtatggtgaatatgagggggacgaagaggaagacatgggaaaagaggattacgacgatttcaccaaggagctgaaccagtatcggagggcgaaagagggaagcagtcgggggcgcgggagcaggggccggggaagaggttaccggggaagaggaagtcgcggcggttcccgggggcgcggcatgggacggggctccaggggtcgggggcggggttccatgggaggggatcatcctgaggacgaggaggatttttatgaggaagagatggactacggagaatctgaggaaccgatgggtgatgacgattacgacgagtactccaaggagctcaaccagtaccggagaagcaaggacagccgcgggagaggcttaagtagaggcaggggtagaggatctagagggagaggcaagggcatggggagagggaggggtaggggcggtagccggggtggcatgaacaagggaggcatgaacgacgatgaggatttctacgacgaagacatgggagatgggggaggcgggagttatcgcagcagagaccacgacaagcctcaccaacagagtgacaagaagggcaaagtgatctgtaaatatttcgtcgagggtcgctgcacatggggtgaccactgcaatttttcgcatgatatagaacttccaaagaaacgcgagttgtgcaaattttatattactggcttttgtgcccgggctgagaattgcccatatatgcacggcgacttcccttgcaagctgtatcacacaaccggcaattgcattaacggagatgactgcatgttctcccacgaccccctcacggaagaaacccgcgaattactggacaaaatgctggccgatgatgcggaagccggtgccgaggacgaaaaggaggttgaagaactcaaaaagcaggggatcaatcctctacccaagcctcctcccggggtgggactcttgccaaccccccctcggccacccgggccacaggcacccacctctccaaatggaagacccatgcaaggcggcccccctccgccccctcctcctccccctccgcccccgggtccaccacaaatgcccatgcctgtgcacgagccccttagcccacagcagctgcagcagcaggatatgtacaataaaaaaattcccagtctcttcgaaatcgtcgtcagacctaccggacaactggctgagaaactgggagttcggtttcctggtcctggggggcctccagggcctatggggcccgggcccaatatgggaccacccggaccaatgggaggacctatgcacccagacatgcacccagatatgcatcctgatatgcacccagacatgcacgcagacatgcatgccgatatgcccatgggacctggtatgaaccccggtccaccaatgggaccaggcgggcctcctatgatgccctacggtcccggcgactcaccccactccggtatgatgccaccgatcccacctgctcagaatttttatgagaacttctatcagcagcaggaaggcatggagatggagccagggctgctgggcgatgccgaagattacggtcattacgaagagctccctggggagcctggggaacatctgttccccgagcaccccctggagccggattccttttcagaagggggtcctcccgggaggccaaaaccgggagccggtgtgcccgacttcctgccaagcgcccagcgggcattgtatttaagaatccagcagaagcaacaagaggaagaggagcgcgctcgtaggttggcagaatctagtaaacaggatcgtgagaacgaggaaggagacacaggcaattggtactcctccgacgaggatgaaggaggatctagcgtcacatccattctgaaaacgctgagacagcaaacctcatcacggcctccggccagcgtgggcgagctgagttcatctggtctcggtgaccccaggcttcagaagggacacccaaccggttccagactggccgacccaaggctgtcaagggacccacgtcttacccggcacgttgaggcttctggaggatcaggccctggggacagtgggccaagtgatccaaggttggcaagagcattacctacatccaagccggaaggtagcttgcatagcagtcccgtgggcccctcaagtagcaagggctcaggcccgccacccactgaagaagaagagggggagagggcactccgcgaaaaagcagttaatatcccactcgaccccctgcccggtcatcctctgcgcgaccctcgctcacaacttcaacaattcagccacatcaaaaaggatgtaacactttccaagcccagtttcgcacgcactgtactgtggaacccagaagatctgataccgcttccgattcccaagcaggatgctgtgccacctgtgccagcagctctgcaaagcatgccaacattggacccacggttgcaccgtgctgcaaccgccggccctccaaatgccagacagcggcccggcgcttctactgacagctccacacagggagccaatctgcccgacttcgaactgctcagccggatcttgaagacggtaaacgccacgggctccagcgccgcacccggatcaagcgacaaacctagcgacccacgggtgcggaaggcacccacagaccctagattgcagaaaccaacagactcaacagcaagctctcgtgctgccaagccaggtcccgcagaagcccccagtccaaccgccagtccgtccggggacgcctctccacccgcgactgctccttatgatccccgggtcctcgcagctggaggccttgggcaaggaggagggggaggacagtcatcagtgttgtctggaatttctttgtacgacccaaggacaccgaatgccgggggcaaagcaaccgaacccgccgcggacaccggggcacagcctaagggagcagagggcaacggcaagtccagtgccagtaaagctaaagagccaccttttgtgagaaaaagcgcactcgagcagccagaaactggaaaggccggcgccgacggaggaacgccaacagatagatataatagttacaatcgaccacggcccaaagctgccgccgcacccgctgcaactaccgctaccccacctcctgaaggagcacccccccaaccgggagtccataacttgcctgtgccaactttatttgggacagttaagcaaacccctaagactggcagtggaagccccttcgcagggaacagcccagctcgtgagggcgaacaggacgccgcaagcctaaaagacgtgttcaaaggatttgatcccacagcaagtccgttctgccaatag

SEQ ID NO: 184882 - DNA, 3912 bp, Artificial Sequence
  derived and/or modified sequence
atggaggctgcccctgggacaccacctccccctcctagcgagtctccccctccacctagtcccccacctcctagcaccccaagcccacccccatgctcccctgatgcccgtccggctaccccccatctcctccatcacagactgcccctgcccgacgaccgcgaggacggcgagttggaagagggagaactggaggacgatggggctgaagagacccaggataccagcggaggccctgagaggagccgcaaagagaagggtgaaaagcaccacagtgacagtgacgaggagaagtcacaccggcgattaaaaaggaaacgtaagaaagagcgcgaaaaggagaagagacgtagcaagaagcggaggaaaagcaagcacaaaaggcacgcttcaagcagtgacgatttttcggacttttctgatgactctgacttctctccatcggagaaagggcaccgcaagtaccgggagtattcaccaccctatgcacctagccaccaacagtatccaccatcccacgcaacaccactgcccaaaaaggcctactcaaagatggactcaaagtcttacggtatgtacgaggattatgagaacgagcagtacggggaatacgagggggatgaagaagaggatatgggaaaggaagattatgatgatttcacaaaggagctcaatcagtaccggagggcgaaagagggatccagccgcggtagggggagccgaggccgaggccgaggctatcggggtaggggatcacgaggtgggagcagaggcagaggcatgggtaggggaagccgcggtagaggaagggggagtatgggaggcgaccacccggaggatgaagaggatttttacgaagaagagatggactatggcgagagcgaggagccaatgggcgacgatgattacgatgaatatagcaaagaactgaatcagtatcgccgaagcaaagatagtcgaggccgaggactgtcaagggggcgtggacgcggatcacgtggcagagggaaagggatggggaggggaaggggcagaggtggatctcggggaggcatgaacaagggaggcatgaacgacgatgaagatttttacgatgaggacatgggcgatgggggaggaggctcctacagatcccgagaccacgataagccgcaccagcagagtgataaaaaagggaaagtgatctgtaaatacttcgtggaggggaggtgtacttggggagatcattgtaacttttcccacgatatcgagctgcctaagaagcgggagctgtgtaagttctacataaccggtttctgcgccagagctgaaaattgcccttacatgcacggtgatttcccatgcaagttgtatcatacgactggtaactgtatcaacggtgacgactgcatgtttagtcatgatcccctgaccgaagaaacccgggagctgctggacaagatgctcgctgatgacgcagaagcaggagcagaggatgaaaaggaggttgaggaactgaagaagcagggtatcaatccgctgccgaaacccccaccgggagtagggttgcttccaacacctccccgacccccaggcccacaggccccaacttccccaaatgggagacccatgcagggcggtcctcctcccccacctccgccaccaccgccacctcctggccctccacagatgcctatgcctgttcacgaacccctctcccctcagcagttacagcagcaggacatgtacaacaagaagatccctagtctatttgaaatcgtggttcgtcccacagggcagctggccgagaaattgggtgtgaggtttccaggaccgggaggaccacctggacccatgggtcccggacccaatatgggccctccaggacccatggggggaccaatgcaccccgacatgcacccagacatgcaccccgacatgcaccctgatatgcatgccgacatgcatgcggacatgccaatgggtccgggtatgaatccgggacctccgatgggccctggcggtccacctatgatgccctacggcccaggcgacagcccccatagtggaatgatgccacccattccacctgcacagaacttttacgagaatttctaccaacaacaggaggggatggagatggaaccaggactgttaggtgatgctgaagactacggccattacgaagaactgccgggagaacctggtgagcacctgttccccgaacatccgctggagcctgattctttttcagaaggtggccctccaggtcggcctaagccaggggcaggggtacctgatttcctcccttcagcccagcgcgctttgtatctccgaattcagcagaagcagcaggaggaagaggaaagagctcggcgtctcgctgagtcaagcaagcaagatagggaaaacgaggaaggagatacaggaaactggtacagctccgacgaggatgagggaggctcatccgtcactagcattttgaagactcttcggcaacaaacatccagtcgccctcccgcttccgtgggagaattgagcagctcaggtctgggtgaccctcgcctccagaaaggtcaccctaccggatctcgcttggcggaccctcggctttctcgagaccctcggctcacccggcatgtcgaagcctccggagggtctggacctggtgattccggtcccagtgatcctaggcttgccagagccctgcctacctcaaagccagagggaagcctgcattcctcccccgtgggaccatccagtagtaaaggatccggtccaccaccaacagaggaggaggaaggcgaacgcgcactgagagaaaaggcggtcaacatcccactggatcccctcccaggacaccctctcagggaccccaggagccagctgcagcagtttagccacatcaagaaagatgttactctgagcaagcctagctttgcacggactgtgctttggaatccagaagaccttatccctctcccgatacccaagcaggacgccgttccaccagtacccgctgctctgcagagcatgccaacactcgacccaagacttcatagagcggctacagcgggaccacccaacgcccgtcagcgcccaggcgcttctacagattcatcgacccagggagccaacctgccagacttcgaactcttgtccaggatcctgaaaaccgtcaatgcaaccggctcctctgccgctcctgggagcagtgataagccctcggaccctcgcgtgcggaaggcccctaccgatccccgtctgcaaaagcccactgactcaactgcgtctagccgggctgctaaaccaggccctgccgaagcaccgtctcccactgctagtccttcaggagatgccagccccccagcaacagccccttatgatcccagagttcttgccgcaggagggttgggccaaggcggaggcggtggacagtcaagtgtgctgtccgggatctccctgtacgatcctcgcacacctaacgctggcggtaaagcgaccgagccggctgcagatactggggctcagcccaagggcgcagaagggaacgggaagtctagcgcttctaaagcaaaggagccacctttcgtgcggaaatccgctctcgagcagcccgaaacggggaaggctggggctgacgggggaactccaacagataggtacaactcctacaacagacccaggcccaaagccgcagcagcccctgcggctacaacggccacacccccacccgaaggagcacccccacagcctggagttcacaatttacctgttcccaccctgttcggaactgtgaagcagaccccaaagacagggtcgggatccccatttgccggaaactcacccgcaagagagggtgagcaggacgcagcctcactgaaagatgtgttcaaaggatttgaccccacagctagccctttttgtcagtag

SEQ ID NO: 184883 - DNA, 6114 bp, Artificial Sequence
  derived and/or modified sequence
ctccgactctcggcacctggcctccagctttcggaactatggaggccgcgcccgggacccccccgccgccgccatcagagtcgccgccgccgccatcgccgccgccgccatcaacgccttcgcctcctccgtgttcccccgacgcccgcccggccaccccgcacctcctccaccaccgcctcccgctccctgacgacagggaagatggagagttggaagaaggtgaattggaagatgatggggcagaggagacccaggatacctccggagggcctgagagaagccggaaagaaaagggggagaagcatcacagtgattcggatgaggagaagtcccacaggagactgaagcggaaacggaagaaagagcgggagaaagagaaaaggaggtcgaagaagaggaggaaatccaagcacaaacgccatgcttcttctagcgatgacttctctgacttctcagatgactcggatttcagccccagtgagaaaggtcaccgcaagtacagagagtacagccccccatatgcgccgtcccaccagcagtaccccccatcgcatgccacgcccctgcccaagaaggcatactccaagatggacagcaagagttatggcatgtacgaggactacgagaatgagcagtatggggaatatgagggcgacgaggaggaggacatgggcaaggaggactatgacgacttcaccaaagagctgaaccagtaccggcgtgccaaggagggcagcagccgcggccgaggcagccgaggccggggccggggctacaggggccgaggaagccgtggaggatcgcgaggccgcggcatgggcaggggcagccgaggcaggggcagaggctctatgggaggagaccacccggaggatgaagaggatttctacgaggaagagatggactatggagagagtgaggagccaatgggagacgacgactatgacgagtactccaaggagctgaaccagtaccgccgctccaaggacagccgaggccgagggctaagtcgaggccgtggcaggggctcccgaggtcgagggaaaggaatgggtcggggccgaggccgaggtggcagccgaggagggatgaacaagggcggaatgaacgatgacgaagacttctatgacgaggacatgggcgacggtggtggtggaagctaccggagtcgtgaccatgacaagccccaccagcagtcggacaagaaaggcaaagtcatttgcaagtacttcgtggaagggcgctgcacctggggagaccactgtaattttagccatgacatcgaactcccaaagaagcgagaactgtgcaagttttacatcactggattttgcgccagagctgagaactgcccttatatgcacggtgatttcccgtgtaagctgtaccacaccactgggaactgcatcaatggtgacgactgcatgttttcccacgaccctctgaccgaagagacgagggagctcttggataagatgttggccgatgatgcagaagcaggtgccgaggatgagaaggaggtggaggaactgaagaagcagggcatcaaccccctgcccaaaccgccccctggtgtgggcctcctgcccacccctcctcggccccctggcccgcaggctccaacctctcccaacggcaggcccatgcagggtggccccccgcccccgccccctccccctcccccaccgcccgggccccctcagatgcccatgccggtgcatgagccactgtccccgcagcagctgcagcagcaggacatgtacaacaagaagatcccctccttgtttgagatcgtggtgcggcccacgggacagctggctgagaagctgggtgtgaggttccctggacccggtggacccccagggccaatgggccctgggcccaacatgggacccccagggccaatgggcggtccaatgcatcctgacatgcaccccgacatgcacccggacatgcaccctgacatgcacgcagacatgcacgcagacatgccgatgggccctggcatgaatcctggcccacccatgggccctggcggccctccaatgatgccctacggccctggagactccccacattctggaatgatgccccctatcccgccagcccagaacttctatgaaaacttctaccagcagcaggagggcatggagatggagcccggactcctgggggatgcagaggactacgggcactacgaagagctgccaggggagcctggggagcacctcttccctgagcaccctctggagcccgacagcttctctgagggagggcccccaggccggccgaagccaggcgccggtgtccctgacttcctgccctcagcccagagggccctgtacctgaggatccagcagaagcagcaggaggaggaggagagagcgaggaggctggctgagagcagcaagcaggaccgggagaatgaggaaggtgacaccggaaactggtactcaagtgatgaggatgagggtggaagcagtgtcacctccatcctgaagaccttgaggcagcagacgtccagccgacccccggcttcagttggggagctgagcagcagtgggctgggggacccccgcctccagaagggacaccccacaggaagccggctggctgaccctcgcctcagccgggaccccagactcacccgccatgtggaggcttctggcgggtctggcccaggtgattcgggaccctccgatcctcggctggctcgcgccctgcccacctccaagcccgaaggcagccttcattccagccctgtgggccccagcagttccaaggggtctgggccgcccccaacggaggaggaggaaggggagcgggccctgcgggagaaggccgtgaacattcccctggacccactccccgggcaccctctgcgggacccacggtcacagctgcagcagttcagccacatcaagaaggacgtgaccctgagcaagcccagcttcgcccgcaccgtgctctggaatcccgaggacctgatccccctacccatccccaagcaggacgcagtgccccccgtgcccgcggccctgcaatccatgcccaccctggacccccggctgcaccgcgctgccacggcagggccccccaacgcccggcagcgcccgggcgcctccacggattccagcacacagggcgccaacctccccgactttgaacttctgtctcgcatcctcaagacagtcaatgccaccggctcctcggccgcccccggttccagcgacaaacccagtgacccccgggtgcggaaggcccccaccgaccctcggctgcagaaacccacagactctacggcctcctcccgggctgccaagcccggccctgctgaggcgccctctcccaccgccagcccgagtggggatgcctccccaccagccaccgctccctacgacccccgcgtgctggcggccggtggactgggccagggcggagggggcgggcagagcagtgtgctgagcggtatcagcctctacgacccgaggactcccaacgcggggggcaaagccacagagccggctgctgacacgggtgcccagcccaagggtgctgagggcaatggcaagagctcggcctccaaggctaaggagcccccgttcgtccgcaagtctgccctggaacagccagagacagggaaggccggtgctgatgggggcacccccacggacagatacaacagctacaaccggccccggcccaaggctgctgcagcccccgctgccaccaccgccaccccaccccccgagggtgccccaccccagcccggggtgcacaacctgcccgtgcccaccctcttcgggacggtgaagcagacacccaagacgggctcaggaagcccatttgctgggaacagtccggcccgcgagggtgagcaggatgcggcatccctgaaggatgtttttaaaggcttcgaccccacggcctcccccttttgccagtagtgtccagccagagctgcggctccagccacccttcctagggtggcattcagggcagcacccagggtagggaacttgggggcaaggggaggcaggctgggtgttccttttttcttttctttttcttttgctttccgtctcttttatttttttttaaagtagtactttctttgagatttgtaaattgtatataaccatcttaagttctggtcagtgtggcgggctcaggggctcctgctgagcaaaccgactcatgcccgcaaacctgtgaactttcgccagtgcctggcctcagactctgtgggctctgcgtggccgggccttgctggaggcccagtgggttttctgggcaaagcatggccccttttccccaggacaaagggaacagttggtgtctgggaaggtattgaacgctcctcaccctgtgcccgaagagacccggaaccaagaccatggcagggcctgcgtggaagcaggtccaggcgtttctagaaccctagggtgcaccatcactgtcttttcagtgcaggctgtaacaacccactcaggagacagtgagagtgaaaaggtattaaggaaaaagcccccagcggcactatgggggctccctggcgcatgcctgctcctgtccctggattaccacacgtgccctccctgccaccctccgtctagagcaagcggatgccccccagcctgcagcagaagcctccacagtgagaactggacccaaaggtagtgggggccggtgtggggcagagtcctgaagagccacctctaggaggcagcccctaggagcacgcacgttctgtcagtattaccccacctgtcctatcaggtgggccacaccctgcttgcccacaccagggtctgtcctggtcctcaagccacgcacccgctatgcctgcactgcagcccagccccggacagctccaggatccgtgcagtggctgcgccgccaggccccaacaatggggaccctggggtggctcctggccaagtgttctctgttttcctcgcacctccttacactgtgtgacctgcagggcatgaggtattgatgtgttcgggtttcctttcccaagccagcagatgcaggtgttccaaggtgtgttgctctgtgggatttgtggacacttaagaaacggactgagtgggaaccctgcagccaggggatggggagcctctgctccccccatgctcccaccctggctgagggccagcctcatctgcagagccctggaggaggcccacctatggacacagcccgagagatgggcgcaaggggtgctgggggaggcctgctatcctgcctctgggccacttgaggggcctcaggaagtgtgtgcttgtggctgcatctgcccgtctccctggcccaccatgtggctgcaggccaagctcttcattgctgaccatgaagagacctagttacctgccaagggattccccttccctcctcctcagggtggggtgaacaaggctcctatcccaccccaccccaaaaagagaaaaatgaaaaactcatagtttggagccaggaggcagggtgtcctacagggctgcacagccctgaggggtcagtgctgggatctggttggttggtttgtctttttgtctttttttttttttttttttttacacaatcattaatgagatttgtcttcagccaccagtgttggccttgaagcagagggcacagcccttggtgtttgtaaaataagtatgaatacacagtgtggcagtgttgtggtttttgttgttgtttttcctctccttttgagaattttcttttgtaaaagaaaaatattttttaaaccgaaatctgtggatgaaatagaagctggagccctcctcttggaatattcagcctaagaacctcataggactatgaattcacccgaaattctcatttgccatcaggccgagcttttaaagaaaaattgttctctaaccaggattgtaacaaaagtgtaaatactgtttcagagttgagagttggtggtgcaaatatgtatataatgaactgtatttttacaatgatcgccgcatgactatttcacaccctttttatactccatatctgtcttccagaaacgtcacctgcctttctcctgtggtctcttaatccagtaattgtattactgccattaaaggatgcagttatttt

SEQ ID NO: 184884 - protein, 365 aa, Artificial Sequence
  derived and/or modified sequence
MEGQSVEELLAKAEQDEAEKLQRITVHKELELQFDLGNLLASDRNPPTGLRCAGPTPEAELQALARDNTQLLINQLWQLPTERVEEAIVARLPEPTTRLPREKPLPRPRPLTRWQQFARLKGIRPKKKTNLVWDEVSGQWRRRWGYQRARDDTKEWLIEVPGNADPLEDQFAKRIQAKKERVAKNELNRLRNLARAHKMQLPSAAGLHPTGHQSKEELGRAMQVAKVSTASVGRFQERLPKEKVPRGSGKKRKFQPLFGDFAAEKKNQLELLRVMNSKKPQLDVTRATNKQMREEDQEEAAKRRKMSQKGKRKGGRQGPGGKRKGGPPSQGGKRKGGLGGKMNSGPPGLGGKRKGGQRPGGKRRK

SEQ ID NO: 184885 - DNA, 1098 bp, Artificial Sequence
  derived and/or modified sequence
atggagggccagagcgtggaggagctgctggccaaggccgagcaggacgaggccgagaagctgcagagaatcaccgtgcacaaggagctggagctgcagttcgacctgggcaacctgctggccagcgacagaaacccccccaccggcctgagatgcgccggccccacccccgaggccgagctgcaggccctggccagagacaacacccagctgctgatcaaccagctgtggcagctgcccaccgagagagtggaggaggccatcgtggccagactgcccgagcccaccaccagactgcccagagagaagcccctgcccagacccagacccctgaccagatggcagcagttcgccagactgaagggcatcagacccaagaagaagaccaacctggtgtgggacgaggtgagcggccagtggagaagaagatggggctaccagagagccagagacgacaccaaggagtggctgatcgaggtgcccggcaacgccgaccccctggaggaccagttcgccaagagaatccaggccaagaaggagagagtggccaagaacgagctgaacagactgagaaacctggccagagcccacaagatgcagctgcccagcgccgccggcctgcaccccaccggccaccagagcaaggaggagctgggcagagccatgcaggtggccaaggtgagcaccgccagcgtgggcagattccaggagagactgcccaaggagaaggtgcccagaggcagcggcaagaagagaaagttccagcccctgttcggcgacttcgccgccgagaagaagaaccagctggagctgctgagagtgatgaacagcaagaagccccagctggacgtgaccagagccaccaacaagcagatgagagaggaggaccaggaggaggccgccaagagaagaaagatgagccagaagggcaagagaaagggcggcagacagggccccggcggcaagagaaagggcggcccccccagccagggcggcaagagaaagggcggcctgggcggcaagatgaacagcggcccccccggcctgggcggcaagagaaagggcggccagagacccggcggcaagagaagaaagtag

SEQ ID NO: 184886 - DNA, 1098 bp, Artificial Sequence
  derived and/or modified sequence
atggagggacagtcagttgaggagctgctggccaaagcggagcaagacgaagccgagaaactgcaaaggataactgtgcacaaggagctggagcttcagttcgaccttggaaacctactggcttcagacagaaatccgccaacaggattaagatgcgctggacccacaccagaagcagagttgcaggccctggcccgggataatacacagctgctgataaatcagctgtggcagctgcctacagagcgagtggaagaggccatagtagctcgactgcccgagcctacaacacgccttcctcgcgaaaagcccttgcctcgaccccgacccctaacaagatggcaacagttcgctcggctgaaaggaatccgacctaaaaagaagacgaatctggtgtgggacgaggtgtcgggacagtggcgtaggagatggggatatcagcgcgcgcgggatgataccaaggaatggctcatcgaggtgcccggtaatgctgaccccttggaagatcagtttgctaagaggattcaggccaaaaaggagcgtgtcgcaaagaatgagttgaataggctacgaaatctggctcgcgcccataagatgcaactgccgtcagctgcaggactccatccgaccggccaccagagtaaggaggaactgggtcgcgcaatgcaagtcgccaaagtgtcgactgctagcgtaggcagattccaagagcgcttaccaaaggaaaaggttccccgtggctccggaaagaaacgtaaattccagcccttattcggtgatttcgctgcggagaaaaagaaccagctggagctacttcgggttatgaactcgaagaagccccagttggatgtgacgagggccacgaataaacagatgagggaggaagatcaggaagaagccgctaagcggcgaaagatgtcacagaagggtaaaaggaagggagggcgacaggggcctggtggcaaaagaaaaggaggtccaccttcccagggaggcaagaggaagggaggtctggggggtaaaatgaatagtgggcccccaggtcttggagggaaacgaaaaggcggccaacggcccgggggcaaacggagaaaatag

SEQ ID NO: 184887 - DNA, 1098 bp, Artificial Sequence
  derived and/or modified sequence
atggagggccagagcgtggaggagctgctggccaaggccgagcaggatgaggccgagaagctgcagaggatcaccgtgcacaaggagctggagctgcagtttgacctgggcaacctgctggccagtgacaggaacccccccaccggcctgcgctgtgccggccccaccccagaggccgagctgcaggccctggcccgggacaacacccagctgctgatcaaccagctgtggcagctgcccacagagcgggtggaggaggccatcgtggcccggctgcctgagcccaccacccggctgccccgggagaagcccctgccccggccccggcccctgacccgctggcagcagtttgcccggctgaagggcatccggcccaagaagaagaccaacctggtgtgggatgaggtgtctggccagtggaggcggcgctggggctaccagagggccagagatgacaccaaggagtggctgattgaggtgcctggaaatgctgaccccctggaggaccagtttgccaagaggatccaggccaagaaggagcgggtggccaagaatgagctgaaccggctgaggaacctggcccgggcccacaagatgcagctgcccagcgctgctggcctgcaccccaccggccaccagagcaaggaggagctgggccgggccatgcaggtggccaaggtgtccacagcctctgtgggccgcttccaggagcggctgcccaaggagaaggtgccccggggcagcggcaagaagaggaagttccagcccctgtttggagactttgctgctgagaagaagaaccagctggagctgctgcgggtgatgaacagcaagaagccccagctggatgtgacccgggccaccaacaagcagatgagggaggaggaccaggaggaggccgccaagaggaggaagatgagccagaagggcaagaggaaaggaggccggcagggccctgggggcaagaggaagggcggcccccccagccagggcggcaagaggaaaggaggcctgggcggcaagatgaacagcggccccccaggcctgggcggcaagaggaagggcggccagaggcctgggggcaagaggaggaagtag

SEQ ID NO: 184888 - DNA, 1098 bp, Artificial Sequence
  derived and/or modified sequence
atggagggccagagcgtggaggagctgctggccaaggccgagcaggacgaggcagaaaagctgcagcgtataacagtccataaggaactggagctgcagtttgacctcgggaacctgctggcatcagaccgtaaccctccgaccggactgcggtgcgctggtccgaccccagaggcggaacttcaggcgctcgctcgggacaatacccaactcctaattaatcagctttggcagttgcccaccgaacgagtcgaggaagccatcgtggcacgcctgccagagcctacgacgagactgcccagggagaaaccgttgcccagacctcggcctctcactaggtggcagcagttcgcgcgcttaaaagggattagaccaaagaaaaaaacaaacttagtttgggacgaggtctcaggccaatggcggagacgttggggctaccagcgggcccgagacgacactaaggagtggctgatagaggtcccaggcaacgccgatcccttagaagatcagttcgccaagagaattcaggccaaaaaggaaagggtagccaagaatgaattgaacaggctgcgcaatctagcccgggctcacaaaatgcagttaccatctgcggctggcctgcatccaaccggccatcagagcaaggaggagctaggtagggccatgcaagtggcaaaggttagcacggcatctgttgggaggttccaggaaaggctaccaaaagaaaaagtgcctagaggttccggtaaaaagaggaagtttcagccactctttggagatttcgcggctgagaaaaagaaccagctggagctgctgcgagtgatgaactctaagaagccccaattggacgtgactcgcgctacaaataaacaaatgagggaggaagaccaggaagaagccgcgaagcgtcgcaaaatgtcccagaaaggcaagagaaaggggggcaggcaggggcccggtggaaaacggaaggggggacccccctcacagggcggcaagcgcaaaggcggcttaggggggaagatgaattcaggccccccgggtttgggcgggaagcgtaagggcggtcaacggccagggggaaagcggagaaaatag

SEQ ID NO: 184889 - DNA, 1098 bp, Artificial Sequence
  derived and/or modified sequence
atggagggccaatccgtggaggagctgctggctaaggccgaacaggacgaggctgaaaagctgcagcgcattaccgttcacaaggagctggagctccagttcgatctgggcaacttgttagcaagtgacagaaaccccccaactggtcttcggtgtgccggtcccacacccgaagctgagttgcaggccctggcacgggacaacacgcagcttctcatcaatcagctctggcagcttcctacggaaagggtggaagaagccatcgtggctcggctcccggaaccaaccactcgccttccccgtgaaaaaccactcccacgcccacgtcctctgacacggtggcagcagtttgccagattgaaaggtatccgccctaaaaagaaaactaaccttgtatgggatgaggtatccggtcagtggaggcggcgatgggggtatcagagggcaagggatgacacgaaagaatggctcatcgaggtccctgggaacgctgatcctctggaagatcagttcgctaaaaggattcaagcaaagaaggaacgggtggcaaaaaatgaattgaaccgactgcgcaatttggctcgcgctcacaaaatgcagttaccctccgctgctgggttgcatcccactggacaccagtccaaggaagaactgggaagggctatgcaggtggcaaaggtgagtacagcgtccgtgggacggttccaggagagactaccgaaggagaaggtgccgaggggctcgggcaaaaagaggaagtttcaacccttgttcggagattttgctgcggagaagaagaaccagttagagctgctgagagtgatgaactccaagaagccgcagttagacgtgacacgggctacaaataagcagatgcgcgaggaggaccaggaagaggccgcaaagcggagaaaaatgtctcagaagggcaagagaaaagggggaaggcaggggcctggagggaagcgcaaaggcggaccccctagccagggtggaaaaaggaaaggaggattaggaggcaaaatgaatagcggacctcccggactgggcggaaaaagaaagggaggacagcgccctgggggaaaaaggagaaagtag

SEQ ID NO: 184890 - DNA, 1704 bp, Artificial Sequence
  derived and/or modified sequence
gcatcccggcatctgcacgtggttatgctgccggagtttgggccgccactgtaggaaaagtaacttcagctgcagccccaaagcgagtgagccgagccggagccatggagggccagagcgtggaggagctgctcgcaaaggcagagcaggacgaggcagagaagttgcaacgcatcacggtgcacaaggagctggagctgcagtttgacctgggcaacctgctggcgtcggaccggaaccccccgaccgggctgcggtgcgccggacccacgccggaggccgagctacaggccctggcgcgggacaacacgcaactgctcatcaaccagctgtggcagctgcccacggagcgcgtggaagaggcgatagtggcgcggctgccggagcccaccacacgcctgccgcgagagaagcctctgccccgaccgcggccacttacacgctggcagcagttcgcgcgcctcaagggcatccgtcccaagaagaagaccaacctggtgtgggacgaggtgagtggccagtggcggcggcgctggggctaccagcgcgcccgggacgacaccaaagaatggctgattgaggtgcccggcaatgccgaccccttggaggaccagttcgccaagcggattcaggccaagaaggaaagggtggccaagaacgagctgaaccggctgcgtaacctggcccgcgcgcacaagatgcagctgcccagcgcggccggcttgcaccctaccggacaccagagtaaggaggagctgggccgcgccatgcaagtggccaaggtctccaccgcctctgtggggcgctttcaggagcgcctccccaaggagaaggtgccccggggctccggcaagaaaaggaagtttcaaccccttttcggggactttgcagccgagaaaaagaaccagttggagctgcttcgtgtcatgaacagcaagaagcctcagctggatgtgactagggccaccaataagcagatgagggaggaggaccaggaggaggccgccaagaggaggaaaatgagccagaagggcaagagaaagggaggccggcaggggcctgggggcaagaggaaagggggcccgcccagccagggagggaagaggaaagggggcttgggaggcaagatgaattctgggccgcctggcttgggtggcaagagaaaaggaggacagcgcccaggaggaaagaggaggaagtaatagtttctaactgtcggacccgtctgtaaaccaaggactatgaatactaaatgttaagttctaggcaattatacggggactcagaaggacctggccgctgccttcattgagtttaaagggacaggattgcccttccgtcaagaaagtatgtaagtgttggactgcacaaattaatgtttttcccacaaccgagactttggagattaagaacttatttgaggatttaagaattagggaaataatttggtggaaaccgggaatgagttctattcttaaacagcctttttttttctttttaatgttggatatacggcgaggtagagttggccatatttcagagacttagattgacgtatatgtttctgcattatttttacaacaagtttgtgtatcagagcgggagtgcgggggagggaaagaaaacaaacagtttcagaattgaataggcaagtgactgttttaaagattaagtaataaagatgtcttatctagtgtgactttt

SEQ ID NO: 184891 - protein, 871 aa, Artificial Sequence
  derived and/or modified sequence
MKYSCCALVLAVLGTELLGSLCSTVRSPRFRGRIQQERKNIRPNIILVLTDDQDVELGSLQVMNKTRKIMEHGGATFINAFVTTPMCCPSRSSMLTGKYVHNHNVYTNNENCSSPSWQAMHEPRTFAVYLNNTGYRTAFFGKYLNEYNGSYIPPGWREWLGLIKNSRFYNYTVCRNGIKEKHGFDYAKDYFTDLITNESINYFKMSKRMYPHRPVMMVISHAAPHGPEDSAPQFSKLYPNASQHITPSYNYAPNMDKHWIMQYTGPMLPIHMEFTNILQRKRLQTLMSVDDSVERLYNMLVETGELENTYIIYTADHGYHIGQFGLVKGKSMPYDFDIRVPFFIRGPSVEPGSIVPQIVLNIDLAPTILDIAGLDTPPDVDGKSVLKLLDPEKPGNRFRTNKKAKIWRDTFLVERGKFLRKKEESSKNIQQSNHLPKYERVKELCQQARYQTACEQPGQKWQCIEDTSGKLRIHKCKGPSDLLTVRQSTRNLYARGFHDKDKECSCRESGYRASRSQRKSQRQFLRNQGTPKYKPRFVHTRQTRSLSVEFEGEIYDINLEEEEELQVLQPRNIAKRHDEGHKGPRDLQASSGGNRGRMLADSSNAVGPPTTVRVTHKCFILPNDSIHCERELYQSARAWKDHKAYIDKEIEALQDKIKNLREVRGHLKRRKPEECSCSKQSYYNKEKGVKKQEKLKSHLHPFKEAAQEVDSKLQLFKENNRRRKKERKEKRRQRKGEECSLPGLTCFTHDNNHWQTAPFWNLGSFCACTSSNNNTYWCLRTVNETHNFLFCEFATGFLEYFDMNTDPYQLTNTVHTVERGILNQLHVQLMELRSCQGYKQCNPRPKNLDVGNKDGGSYDLHRGQLWDGWEG

SEQ ID NO: 184892 - protein, 29 aa, Artificial Sequence
  derived and/or modified sequence
MKYSCCALVLAVLGTELLGSLCSTVRSPR

SEQ ID NO: 184893 - DNA, 2616 bp, Artificial Sequence
  derived and/or modified sequence
atgaagtacagctgctgcgccctggtgctggccgtgctgggcaccgagctgctgggcagcctgtgcagcaccgtgagaagccccagattcagaggcagaatccagcaggagagaaagaacatcagacccaacatcatcctggtgctgaccgacgaccaggacgtggagctgggcagcctgcaggtgatgaacaagaccagaaagatcatggagcacggcggcgccaccttcatcaacgccttcgtgaccacccccatgtgctgccccagcagaagcagcatgctgaccggcaagtacgtgcacaaccacaacgtgtacaccaacaacgagaactgcagcagccccagctggcaggccatgcacgagcccagaaccttcgccgtgtacctgaacaacaccggctacagaaccgccttcttcggcaagtacctgaacgagtacaacggcagctacatcccccccggctggagagagtggctgggcctgatcaagaacagcagattctacaactacaccgtgtgcagaaacggcatcaaggagaagcacggcttcgactacgccaaggactacttcaccgacctgatcaccaacgagagcatcaactacttcaagatgagcaagagaatgtacccccacagacccgtgatgatggtgatcagccacgccgccccccacggccccgaggacagcgccccccagttcagcaagctgtaccccaacgccagccagcacatcacccccagctacaactacgcccccaacatggacaagcactggatcatgcagtacaccggccccatgctgcccatccacatggagttcaccaacatcctgcagagaaagagactgcagaccctgatgagcgtggacgacagcgtggagagactgtacaacatgctggtggagaccggcgagctggagaacacctacatcatctacaccgccgaccacggctaccacatcggccagttcggcctggtgaagggcaagagcatgccctacgacttcgacatcagagtgcccttcttcatcagaggccccagcgtggagcccggcagcatcgtgccccagatcgtgctgaacatcgacctggcccccaccatcctggacatcgccggcctggacaccccccccgacgtggacggcaagagcgtgctgaagctgctggaccccgagaagcccggcaacagattcagaaccaacaagaaggccaagatctggagagacaccttcctggtggagagaggcaagttcctgagaaagaaggaggagagcagcaagaacatccagcagagcaaccacctgcccaagtacgagagagtgaaggagctgtgccagcaggccagataccagaccgcctgcgagcagcccggccagaagtggcagtgcatcgaggacaccagcggcaagctgagaatccacaagtgcaagggccccagcgacctgctgaccgtgagacagagcaccagaaacctgtacgccagaggcttccacgacaaggacaaggagtgcagctgcagagagagcggctacagagccagcagaagccagagaaagagccagagacagttcctgagaaaccagggcacccccaagtacaagcccagattcgtgcacaccagacagaccagaagcctgagcgtggagttcgagggcgagatctacgacatcaacctggaggaggaggaggagctgcaggtgctgcagcccagaaacatcgccaagagacacgacgagggccacaagggccccagagacctgcaggccagcagcggcggcaacagaggcagaatgctggccgacagcagcaacgccgtgggcccccccaccaccgtgagagtgacccacaagtgcttcatcctgcccaacgacagcatccactgcgagagagagctgtaccagagcgccagagcctggaaggaccacaaggcctacatcgacaaggagatcgaggccctgcaggacaagatcaagaacctgagagaggtgagaggccacctgaagagaagaaagcccgaggagtgcagctgcagcaagcagagctactacaacaaggagaagggcgtgaagaagcaggagaagctgaagagccacctgcaccccttcaaggaggccgcccaggaggtggacagcaagctgcagctgttcaaggagaacaacagaagaagaaagaaggagagaaaggagaagagaagacagagaaagggcgaggagtgcagcctgcccggcctgacctgcttcacccacgacaacaaccactggcagaccgcccccttctggaacctgggcagcttctgcgcctgcaccagcagcaacaacaacacctactggtgcctgagaaccgtgaacgagacccacaacttcctgttctgcgagttcgccaccggcttcctggagtacttcgacatgaacaccgacccctaccagctgaccaacaccgtgcacaccgtggagagaggcatcctgaaccagctgcacgtgcagctgatggagctgagaagctgccagggctacaagcagtgcaaccccagacccaagaacctggacgtgggcaacaaggacggcggcagctacgacctgcacagaggccagctgtgggacggctgggagggctag

SEQ ID NO: 184894 - DNA, 2616 bp, Artificial Sequence
  derived and/or modified sequence
atgaagtatagttgttgtgccctggtcctggccgtgcttggtaccgaactcctggggagcttatgctcgaccgtgcgctctcctcggttcagggggaggatccagcaggaaaggaagaacatccgccccaacattatcctagttttgaccgacgaccaggatgtggaactgggctcattgcaggtgatgaacaagactaggaaaatcatggagcacggaggagcaactttcatcaacgcttttgtgactactcccatgtgttgcccgagccgctcttccatgctcaccggtaaatatgtgcacaaccacaacgtatacaccaataacgaaaactgcagctctcccagctggcaggccatgcacgagccacgaactttcgctgtatatcttaacaacacaggatatcgaactgctttttttggcaaatatcttaacgagtacaacggcagctatatacctcctggctggagggaatggctgggactgatcaaaaacagtcgcttttataactatactgtctgtagaaatgggatcaaagagaagcatggatttgattatgctaaggattattttacagacctcattacgaatgaaagtattaactacttcaagatgtctaaacggatgtatccacaccgtccagtaatgatggtcatctcccatgccgctcctcacggccctgaagactctgccccccaattctccaaactgtaccccaacgccagccagcatatcaccccgagctataactacgctcctaacatggacaaacactggattatgcagtatactggccccatgctacctatccatatggagtttacgaacatcctacagcgcaaacggctgcagacactcatgtccgtggatgatagcgtggaaagactgtataatatgctggttgagaccggtgagctggaaaacacgtacattatttatacagctgatcacggctaccacattgggcagtttggcctcgtgaaaggaaagtccatgccctatgacttcgatatccgggtgccgtttttcatccgcggcccatccgtggagccaggctctattgtgcctcaaattgtcctgaacattgacctggcccccacaatcctggatatcgcgggtctcgatacccccccagatgtcgacgggaagtcagtgctgaaacttctggatcccgagaaacctggtaaccgcttcaggaccaataagaaggctaaaatatggagggatacctttttggtggaaaggggtaaattcttacgcaaaaaagaggagtcctccaagaacattcagcaatctaaccaccttccaaaatacgagcgggtgaaggagctgtgtcagcaagctcggtatcagacagcgtgtgagcaaccgggacagaagtggcagtgtatcgaagatacatcaggtaagcttcggattcacaagtgtaagggacccagcgacctgcttacagtgaggcagtcaacccgaaacctatatgctcgcgggttccatgacaaagacaaggagtgttcatgcagagaatcgggttatagagcaagccgctcccagaggaagtcccaacgccaattcctgcgaaatcagggtacacccaagtataaacctcggtttgtccatacacgccagacgcggagcctgtcggtcgagttcgaaggggagatctacgacatcaatttggaagaagaagaggagcttcaggtactgcagccaagaaacatagccaagcggcatgacgaaggtcacaagggacctagagatctgcaggccagttctggaggcaatagaggccgaatgttggcagactcatcaaacgccgtgggacctcctactaccgtacgagttacccacaaatgctttatactgccaaatgacagcattcactgtgaacgcgagttataccagtccgcccgagcctggaaggaccacaaggcctacatcgacaaagagattgaggcactgcaagacaaaataaagaatctgcgggaggtccgcggccacctgaaaagaagaaaacccgaagaatgctcttgtagcaagcagtcttattataataaggaaaagggagtaaaaaagcaggaaaagttgaaatctcacctccatccttttaaggaggctgcccaggaggtggactcaaaactgcagttgtttaaggagaataatcgccggcggaagaaggaaagaaaggaaaaacgaaggcagcggaagggcgaagagtgttcactgcccggcctcacgtgttttactcacgataataaccactggcagacagcgcctttttggaatctaggttctttttgcgcctgtacttccagcaataacaacacatattggtgcttgaggacagtgaacgaaacgcacaacttcttgttctgtgagttcgccaccgggtttcttgaatacttcgatatgaacacagatccataccaactcacaaacaccgtccacactgtagaaagagggattctgaaccaacttcatgtacagttgatggagttgcgctcctgtcagggatataaacagtgtaatcccagacctaagaatctggacgttggaaataaggacggaggctcctatgacctgcatagaggccagttatgggacgggtgggagggctag

SEQ ID NO: 184895 - DNA, 2616 bp, Artificial Sequence
  derived and/or modified sequence
atgaaatattcatgctgcgccctggtgcttgccgtcttaggcacggagctcttaggtagcctctgctccactgtacgctcccccagatttcggggtagaattcagcaggaaaggaagaatataagaccgaatatcatcttagtgctgaccgatgaccaagacgtggagctcgggtccttgcaagtcatgaacaaaaccaggaagatcatggaacacggaggcgcaacctttatcaacgcatttgtcaccacccccatgtgttgcccaagcaggtccagcatgcttacagggaaatatgtccacaatcataatgtatacactaacaatgaaaattgttcttctccatcctggcaggcaatgcatgaaccccggacatttgctgtatacctcaacaatactggctatagaactgcattcttcggaaaatatttaaatgaatataacggaagttatattccaccaggttggagagagtggctgggtcttattaagaatagtaggttttataactataccgtatgccgtaacgggataaaagaaaagcacgggttcgattacgccaaggactatttcaccgatctcattacaaacgaatctatcaactattttaaaatgtcgaagcgaatgtaccctcacagacctgtaatgatggtaatttcccacgctgcgcctcatgggcccgaggactccgctcctcaattcagcaagctctaccctaacgccagtcagcatattactccaagctataattatgctccgaacatggacaaacactggatcatgcaatataccggccctatgctgcctatacacatggagttcaccaacatactgcaaaggaagagacttcagacgctcatgtctgtcgatgactccgtggagcgcttatataatatgctggtggagacaggtgaactggaaaatacttatattatctatacggccgatcacggatatcatattggacagttcgggctggtaaaaggcaagagtatgccctacgattttgacatccgagtacctttctttattcggggccctagcgtcgaaccaggcagcatcgttccgcaaatcgttctgaatattgacctggcccccactattcttgatatcgctgggctcgatacgcccccggacgttgacggtaaatcagtccttaaactgctcgacccggaaaagcccggcaatcgcttccggaccaacaaaaaggccaagatctggagggacacttttttggtcgaacggggcaagttcctgagaaagaaggaggagtcttcgaagaacatccaacagtccaaccatctccccaagtacgagagggtgaaagagttgtgtcagcaggccagatatcaaactgcatgtgagcagccgggccagaaatggcagtgcatcgaggacaccagcgggaagcttaggattcataaatgcaagggtccgagtgatctcctgacagttcggcaatcaacccggaatctgtacgcaagaggattccatgacaaagataaagagtgttcttgtcgagagagtggctaccgcgctagccgtagccagcgcaagagccagagacagttcctgagaaaccagggcacgcccaagtacaaaccgcgctttgtgcacaccagacaaactagatctctctccgtggaatttgagggagagatatatgacattaacctggaggaagaggaagaactacaggtcctacaaccaagaaacatcgcgaagcggcatgacgagggccataaggggccacgagacctgcaggcctcctcgggaggaaatagaggccggatgcttgcagactctagtaacgcagttggaccccctaccacagttagagtaactcataagtgttttatcctccctaatgactccatccattgcgagagggagctttatcagtctgctagagcatggaaggatcataaggcgtatatcgataaggagatagaggctttacaggacaaaattaagaaccttcgtgaagtgcgcggacacctgaagcggaggaagcccgaggagtgttcatgttccaaacaatcctattataacaaagagaaaggcgtcaagaaacaagaaaagttaaagtcacatttacacccattcaaagaggccgctcaagaggtggatagtaaattacagttatttaaagagaataaccgacgccgaaagaaggagaggaaggagaagcgtcggcagaggaaaggagaagagtgcagcctccctgggctgacctgctttacccacgacaacaatcactggcaaactgcacctttttggaatctggggagtttctgcgcctgtaccagttctaacaacaacacctactggtgtctgaggaccgttaatgaaacccacaattttttattttgcgagtttgctacgggattcctagaatacttcgacatgaacaccgacccataccaactgacaaatacagtgcatacagtcgagcgagggattctgaaccaactccacgttcagttgatggagctgcgatcctgccagggctacaagcagtgcaaccctaggcctaaaaatcttgatgtggggaacaaggacggaggatcctatgacctgcatagaggacagttatgggatggatgggaaggatag

SEQ ID NO: 184896 - DNA, 2616 bp, Artificial Sequence
  derived and/or modified sequence
atgaagtatagctgctgcgctctggtgctggctgtcttggggacggaacttctggggtcgctctgttcaacagtgagatctcctcgtttcagaggtagaattcagcaggaacgaaagaatatccgccccaacatcatcctggtgcttacagacgaccaggacgttgaattgggctctcttcaggtgatgaacaagacgagaaaaattatggagcacgggggcgccacgtttattaatgccttcgttaccacccccatgtgctgcccatctcgaagctcgatgttaacaggcaagtacgtgcataaccataatgtctacaccaacaacgagaattgctcctccccctcctggcaggcaatgcacgaacctaggaccttcgcagtttacctgaataacacgggatacaggactgcgttctttggtaagtatctgaacgagtacaacggctcttacatacctccggggtggagagagtggctgggcctcatcaaaaactctaggttctataattataccgtgtgccgtaacgggataaaagagaagcatggattcgactacgctaaggactacttcacggacctcataaccaacgaatctattaactatttcaagatgtcgaaaaggatgtatccacatcgacctgtgatgatggtgatttctcacgctgcccctcacggacctgaagacagtgctccccaattctcaaaactttatcccaatgcgtctcagcatataacaccgagctacaactacgccccaaatatggataaacactggatcatgcagtacaccggccccatgttgccaattcatatggagttcactaacatactgcagcgcaaacggctgcagaccctgatgagtgtggatgacagtgtggagagactgtataacatgcttgtggaaactggggaacttgaaaacacctacatcatctatacggctgatcatgggtatcacatcggacagttcggtcttgtcaagggcaagtctatgccttacgattttgacatccgagtgcctttcttcatccgtgggcccagtgtcgaaccaggcagtatcgtgcctcagatcgtcctcaatatcgacctggctccgacaattctagacatcgccggactggacacccctccagatgttgacggaaagagtgtgctcaagctgctagaccccgagaagcctggtaatcgatttagaaccaataagaaggccaagatctggcgagatacattcctggtcgagcgcggcaagtttctacgcaagaaggaagaaagctcgaaaaacattcaacagagcaaccacctgcccaaatacgagagggttaaggagttgtgccagcaggcaagatatcagacagcctgcgaacagcccggccagaagtggcagtgcatcgaagacaccagcggcaagttgaggatacataaatgcaagggcccttcagatttactcaccgttcgccagtcgacccgtaacctgtacgccaggggttttcatgacaaggataaggagtgtagctgtagggagtccggctatcgcgcctcaaggtcacagagaaagagtcaaaggcagttcctgcgtaaccagggtactcccaagtataagcccaggtttgtgcacacaagacaaaccaggagtctgtcagttgaatttgaaggggagatatatgatataaatttagaggaggaagaggagctccaggtgctccagccacgcaacatcgccaagcgtcacgacgaggggcacaagggtcccagagatttgcaggctagctcaggcggcaacagggggagaatgttagccgattcttctaacgcggtggggccacctacgaccgtgagagtgacccacaaatgcttcatcctgcctaacgactctattcactgcgaacgggaactgtatcagtcagcccgcgcctggaaggaccacaaagcatatatcgacaaagagatcgaggcactacaggacaagatcaaaaatctgagggaggtgcgcggacaccttaaacgaaggaaacctgaagaatgctcctgcagcaagcagagttattacaacaaggagaagggggtcaaaaaacaggagaagctgaaaagccacctgcaccctttcaaagaggccgcccaggaagtagatagcaaactgcagctcttcaaggagaataaccgtcgcaggaagaaggagagaaaagagaaacggagacaacgtaaaggagaggagtgtagtctgccaggcctgacatgcttcacccacgataacaatcattggcagaccgcccccttctggaacctcggaagtttttgcgcctgtactagctcaaacaacaacacctattggtgcctcagaacagtgaacgagacccacaactttctgttttgtgagtttgctacagggtttctggaatacttcgatatgaacacagacccctaccagcttactaataccgtccataccgtggagcggggtatcctaaaccaactgcacgtgcagctaatggaactgaggagttgccaaggatacaagcagtgtaatcctcggccaaaaaacctcgacgtggggaacaaggacggagggtcctatgacctacataggggccagctctgggacggatgggagggatag

SEQ ID NO: 184897 - DNA, 2616 bp, Artificial Sequence
  derived and/or modified sequence
atgaagtattcttgttgcgctctcgtcctggccgtgctcgggactgagctactaggctccctgtgctccacggtgcgttctcctaggtttagagggagaattcaacaggagcggaaaaacatcagacctaatattatcttagtcctgaccgacgatcaggatgtggaattgggctcgttacaggtgatgaataagacgaggaagatcatggagcatggcggagctacatttatcaacgcattcgtgaccacccccatgtgctgtcccagcaggtcatcaatgctgaccggaaagtacgtccacaatcacaacgtctatactaacaacgagaactgcagttccccaagctggcaggcgatgcacgagcctcgcacctttgcagtgtacctgaacaataccggatacagaactgccttcttcggaaagtatctgaacgagtataatggctcctatatcccgccggggtggcgcgagtggctgggcctgatcaagaattcaaggttctataattatacagtctgcaggaatggtataaaggaaaagcacggctttgattacgcgaaagattatttcacagatctaatcacaaatgaatcgatcaactacttcaaaatgagcaaaagaatgtacccccatcgacctgtcatgatggtcatctctcacgcggccccccacggtcctgaagacagcgcgccccagttttcaaagctgtaccccaacgctagccaacatattacgccttcctataactatgcgcccaacatggataagcattggatcatgcagtacaccggccctatgctgcctatccatatggagttcaccaatattctacagagaaagagactgcagaccctgatgagtgtcgacgacagcgtcgagagactgtacaacatgctggtcgaaacaggtgaactggagaatacttatatcatttataccgctgatcatgggtaccatattggacaatttggcttggttaaagggaagtccatgccatatgatttcgatattcgggtcccatttttcatcagaggaccctccgttgagcccggatctatcgtgccgcagattgtgcttaatatagacctggcccctaccatactggatatcgccggcctagacactcctccggatgtggatggaaaatccgtccttaagctcttagaccccgaaaagcctggtaaccggttccggacaaacaagaaggcaaagatctggcgcgatacattcctagttgagcgaggcaaattcttacgaaagaaggaagaatctagcaaaaatatccagcagtctaatcacctgcccaagtacgaaagagtaaaggagttatgtcagcaagcccgctatcagacggcctgtgagcagccaggacagaagtggcagtgcatcgaggatacgtcaggaaagctacgcatacacaaatgcaagggccctagtgacttgctgactgtgcgccaatcaacgcgcaacctgtatgctcgaggcttccacgacaaggataaggagtgctcttgcagggagagcggttaccgcgcaagtcgcagccaacggaagtcgcaacgccagttccttaggaaccagggaacacccaagtataaaccaaggtttgtgcacactagacagactcggtcactttcagtggaattcgagggggaaatctacgacataaacttggaggaagaggaagagctccaggtgctacagccaaggaatatcgccaaacggcatgacgagggtcataaagggcccagagatcttcaggcaagtagtggcgggaatcgtggcagaatgctggccgatagtagtaatgcagtggggccccctactaccgtccgggtgactcacaagtgcttcatcttgcccaacgattcgattcattgtgagagggaactgtaccagtccgcacgcgcctggaaggatcataaagcctacatagataaagaaatcgaggctctccaggacaaaattaagaatcttcgagaagtacgaggacacctcaagcgacggaagcccgaggagtgctcctgctccaagcagtcctactataataaggagaagggcgttaaaaagcaagaaaagctgaagtctcaccttcaccccttcaaggaagctgcccaggaagtagactcaaagctacagctgttcaaagagaataataggaggaggaaaaaagaaagaaaggagaaaagaagacagcggaaaggggaagaatgcagcctgcccgggctgacttgcttcacccacgacaataaccactggcagaccgcacctttctggaacctgggcagtttctgtgcatgcacatccagcaataacaatacttactggtgcctcagaaccgtgaacgagacccacaactttcttttctgcgagtttgccaccggttttctcgaatactttgatatgaacacggatccctatcagctcactaatactgttcacaccgtggagcgtggtattttaaaccagctccacgtacagctgatggagctgcggagctgccagggctacaaacaatgcaacccacgcccaaaaaacttggatgttggtaataaagatggcggctcgtacgatctgcacagagggcagctgtgggatggatgggagggttag

SEQ ID NO: 184898 - DNA, 2616 bp, Artificial Sequence
  derived and/or modified sequence
atgaagtacagctgctgtgccctggtgctggccgtgctgggcacagagctgctgggcagcctgtgcagcacagtgcgcagcccccgcttccggggccgcatccagcaggagaggaagaacatccggcccaacatcatcctggtgctgacagatgaccaggatgtggagctgggcagcctgcaggtgatgaacaagaccaggaagatcatggagcacggcggggccaccttcatcaatgcctttgtgaccacccccatgtgctgccccagccgcagctccatgctgaccgggaagtatgtgcacaaccacaacgtgtacaccaacaatgaaaactgcagcagccccagctggcaggccatgcatgagcccaggacctttgctgtgtacctgaacaacacaggctacagaacagccttcttcggcaagtacctgaatgagtacaacggcagctacatccccccaggctggagggagtggctgggcctcatcaagaacagccgcttctacaactacacagtgtgcagaaatggcatcaaggagaagcacggctttgattatgccaaggactacttcacagacctgatcaccaatgaaagcatcaactacttcaagatgagcaagaggatgtacccccacaggcctgtgatgatggtgatcagccacgccgcccctcatggccctgaggacagcgccccccagttcagcaagctgtacccaaatgccagccagcacatcacccccagctacaactatgcccccaacatggacaagcactggatcatgcagtacacaggccccatgctgcccatccacatggagttcaccaacatcctgcagaggaagaggctgcagaccctgatgtctgtggatgacagcgtggagcggctgtacaacatgctggtggagactggagagctggagaacacctacatcatctacacagctgaccacggctaccacatcggccagtttggcctggtgaagggcaagtccatgccctatgactttgacatccgggtgcccttcttcatccggggccccagcgtggagcccggcagcatcgtgccccagatcgtgctgaacatcgacctggcccccaccatcctggacattgctggcctggacaccccaccagatgtggatggcaagtctgtgctgaagctgctggaccctgagaagccaggcaaccgcttccgcaccaacaagaaggccaagatctggagggacaccttcctggtggagcggggcaagttcctgaggaagaaggaggagagcagcaagaacatccagcagagcaaccacctgcccaagtatgaaagagtgaaggagctgtgccagcaggcccgctaccagacagcctgtgagcagcccggccagaagtggcagtgcatcgaggacaccagcggcaagctgcgcatccacaagtgcaagggccccagcgacctgctgactgtgcggcagagcaccaggaacctgtatgcccggggcttccatgacaaggacaaggaatgtagctgccgggagagcggctaccgggccagccgcagccagaggaagagccagaggcagttcctgaggaaccagggcacccccaagtacaagcccaggtttgtgcacacccggcagaccaggagcctgtctgtggagtttgaaggagagatctatgacatcaacctggaggaggaggaggagctgcaggtgctgcagcccagaaatattgccaagagacatgatgagggccacaagggcccccgggacctgcaggccagcagcggcggcaacagaggaaggatgctggccgacagcagcaatgctgtgggcccccccaccaccgtgcgggtgacccacaagtgcttcatcctgcccaatgacagcatccactgtgagcgggagctgtaccagagcgcccgggcctggaaggaccacaaggcctacatcgacaaggagattgaggccctgcaggacaagatcaagaacctgcgggaggtgcggggccacctgaagaggaggaagccagaggagtgcagctgcagcaagcagagctactacaacaaggagaagggcgtgaagaagcaggagaagctgaagagccacctgcaccccttcaaggaggccgcccaggaggtggacagcaagctgcagctgttcaaggagaacaacagaagaaggaagaaggagaggaaggagaagaggcggcagaggaaaggagaggagtgcagcctgcccggcctgacctgcttcacccatgacaacaaccactggcagacagcccccttctggaacctgggcagcttctgtgcctgcaccagcagcaacaacaacacctactggtgcctgaggacagtgaatgagacccacaacttcctgttctgtgaatttgccaccggcttcctggagtactttgacatgaacacagacccctaccagctgaccaacacagtgcacacagtggagcggggcatcctgaaccagctgcacgtgcagctgatggagctgcggagctgccagggctacaagcagtgcaacccccggcccaagaacctggatgtgggcaacaaggatggcggcagctatgacctgcaccggggccagctgtgggatggctgggagggctag

SEQ ID NO: 184899 - DNA, 2616 bp, Artificial Sequence
  derived and/or modified sequence
atgaagtacagctgctgcgccctggtgctggccgtgctgggcaccgaattgctgggaagcctgtgctcaactgtgcgaagtcctagatttaggggtcggattcagcaagagaggaagaatattagacccaacattatactcgtactaaccgacgaccaggatgttgaactggggtcattgcaggtgatgaacaaaacccgcaaaatcatggaacacggcggagcaaccttcatcaatgcattcgttacaaccccaatgtgttgcccatctcgctctagcatgctgaccggcaaatacgtccataatcataacgtctataccaacaatgagaattgtagttctccctcttggcaggccatgcatgagccgagaaccttcgccgtatacttgaataacacaggttaccgcacggctttttttggcaaatatttgaatgagtataacggcagctatataccccctggatggcgggagtggctgggtctcatcaagaattctcgcttttacaattacacagtgtgcaggaacggcatcaaggaaaagcacggattcgactacgctaaagattattttactgacctgatcaccaatgagagcatcaattattttaaaatgagcaaacgaatgtatccccacaggccagtgatgatggtaatcagccacgccgcaccccacggccccgaggatagcgcaccccagtttagtaagttgtatcccaatgctagtcagcatatcacacccagctataactacgcaccaaatatggataaacactggatcatgcaatacacaggaccgatgcttcccatccacatggagttcactaacattctgcagcggaagcgcctacagaccctgatgtccgtagatgattccgtggagcgcttatataatatgcttgtggagaccggggaactcgagaacacttacatcatctacactgcagatcacgggtaccatattggacagttcggcctggtgaagggtaagtcaatgccttacgattttgatatccgcgtgcccttcttcatccgagggccgagtgtcgagccaggttcaatcgtgcctcaaattgtattgaacattgacctggctcccaccattcttgatatcgcaggactggacacccctccagatgtagacggaaagtcggttctaaagctgctcgatccagagaagcccggtaatcgatttaggaccaacaagaaagcaaagatatggcgggacaccttcctcgtagagcgtgggaagttcttgagaaagaaggaagagagcagtaagaatattcagcagtccaatcacctgccaaagtacgagagggtgaaggagttgtgccagcaggccaggtatcaaaccgcgtgtgaacaacccggccagaagtggcagtgtattgaggatacatcgggtaagctgaggattcacaagtgcaagggcccaagcgacctgctgaccgttagacagtccacacgcaatctgtacgctcgtggattccacgacaaagacaaggaatgtagctgtcgggagtccggttacagagcgtctagaagccagagaaaaagccagaggcagttcttaagaaaccagggaactcctaagtataagcctcgttttgtgcatacgcgacagacacgatccctatcggtcgaatttgaaggggaaatttacgacatcaacctggaggaagaagaggagctccaggtactgcagcctaggaatatcgcgaagcgacacgatgagggacacaagggacctcgagacctacaagctagcagtggtggcaaccgaggacgcatgttggcagacagtagcaacgccgtggggcctccaactacagtaagagtgacgcacaaatgttttatcctgcctaatgacagcatccactgcgagcgggaattgtatcagagcgcgcgggcatggaaggatcacaaggcgtatattgataaagagattgaggctctgcaagataagattaaaaatttgagagaggtgagggggcatttgaaaagacgcaagccggaggaatgttcctgctcaaaacagtcctattacaataaggaaaagggggtaaaaaagcaggagaaattaaagtcgcacctgcatcccttcaaggaagccgcacaggaggtggacagtaagctgcagctcttcaaagaaaataaccgccggcggaagaaggaacgcaaagagaagaggagacagcgcaaaggcgaggaatgtagccttcccgggctgacatgttttacccacgataacaatcactggcaaaccgctcctttctggaacctcggctctttctgcgcttgtacctccagcaacaataatacctactggtgcctcaggactgtcaatgaaactcacaactttttgttctgcgagtttgccacaggcttcttggagtattttgatatgaatacggatccctaccaactgactaatactgttcacaccgtcgagaggggcatcctgaaccaactgcatgtgcaattgatggagttacggagttgccagggctacaaacagtgcaatccaaggccaaaaaacctggacgtgggcaacaaggatggcggttcctatgacctccatcgcggtcaactatgggacgggtgggagggctag

SEQ ID NO: 184900 - DNA, 2616 bp, Artificial Sequence
  derived and/or modified sequence
atgaagtacagctgctgcgccctggtgctggccgtgctgggcaccgaattgctcggttcactgtgtagcacagtgcggtctcccagatttcgggggagaatccagcaggaaaggaagaatatccggcccaatatcatcctggttttgacagatgaccaagacgttgagctgggtagtctacaagtgatgaataagacacgcaagattatggagcacggcggggctacgttcatcaacgcctttgtgaccacacccatgtgctgccccagccgctcttcgatgctgactggtaaatacgtgcataaccataacgtgtacacaaataacgaaaattgctctagcccttcatggcaagccatgcacgaaccacgaacctttgccgtgtacctcaataataccgggtacaggaccgccttcttcgggaagtatttaaatgagtacaacgggagctatatcccgcccgggtggagggagtggctgggcttgatcaagaatagccggttttacaactatacagtctgtagaaacggaattaaagaaaaacacgggtttgactatgcaaaagattatttcactgacctgattacaaacgagtcgatcaactattttaagatgtctaagagaatgtacccccataggccagtcatgatggttatttcacacgccgctcctcatgggcctgaggatagcgctccacagttctcaaagttatacccgaatgccagccagcacattaccccaagctataattatgcacctaacatggacaaacattggattatgcagtacacagggcccatgctgcctatccacatggaattcaccaacatcttgcagcgcaaaagactgcaaacactaatgtccgtcgacgacagcgtcgagcgcttgtacaatatgctagttgaaactggtgagctcgaaaacacctatatcatttataccgccgatcatggctaccacatcggccaattcgggctggtaaaaggtaaatccatgccatacgatttcgacattagagtgccatttttcatccggggaccatccgttgagccaggttcaattgtgccccaaattgtgttaaacatagacctcgctcccacaatcctcgatattgcagggctcgacaccccgcctgatgtggatggcaagagcgttctcaagctgctcgaccctgagaagccgggaaaccggtttcgtacaaacaaaaaagccaagatatggcgggacaccttcctagtggaacgcggcaagttcctgcggaaaaaggaggagagctcaaagaacatccagcagagcaaccatctacctaagtacgagagggtaaaggaactgtgccagcaggcccgctaccagaccgcctgcgagcagccaggtcagaaatggcagtgtatcgaggacacttctggaaagctgcggatacataagtgcaagggcccctcagacctgctgaccgtcaggcagtctactcggaatctttatgctaggggatttcacgacaaggataaggaatgcagctgtcgcgaaagcggataccgcgctagtcgaagccagcgcaagtcacagagacagtttctgcggaaccagggcaccccaaaatacaagccaaggttcgtgcatactcgccagacaagatccctgtcggtggagttcgagggcgagatttacgatattaacctggaggaggaagaagaactgcaggtgcttcagccccgcaatattgcaaagcgccacgatgagggccataaaggtcctcgggacttgcaggcttcatccggtgggaatagaggacgcatgctggccgactcgtccaatgctgtgggcccacctacaacagtgagggtgacacataaatgctttatcctgcctaacgactccattcattgcgagagagagctgtaccagtccgctcgcgcctggaaggatcataaagcatatatagacaaagagatcgaagccttgcaggataaaattaagaacctcagggaggtgcgcggacacctcaagaggagaaaacccgaggagtgtagctgctccaaacagtcctactacaacaaggaaaaaggggtgaaaaaacaggaaaaactgaagtcccacttgcaccccttcaaagaagccgcgcaggaggtagacagtaaactgcagctgttcaaggagaacaacagaaggaggaagaaagaaaggaaagaaaaacggcggcaaagaaagggggaggagtgttctttgcctgggctgacctgcttcacacacgataacaatcattggcagaccgcaccgttttggaacttaggcagcttctgcgcctgtacatctagtaataataacacgtactggtgcctgaggacggtcaatgagacacataacttcctgttctgtgagttcgccaccggcttcttagagtatttcgatatgaatacagacccatatcagctgacaaataccgtccacactgtggagcgggggattctgaaccagctacacgtgcagctgatggagctaaggtcctgccaagggtacaagcaatgcaatcctagaccgaaaaatctggatgtcggtaataaggatggtgggtcctacgacctacaccggggacaattgtgggacgggtgggagggctag

SEQ ID NO: 184901 - DNA, 2616 bp, Artificial Sequence
  derived and/or modified sequence
atgaagtacagctgctgcgccctggtgctggccgtgctgggcaccgagcttctcggttcactctgttccaccgtgagaagccctagatttaggggtaggattcagcaggaacgtaaaaacatccggcctaatattatcctggtgctgacggatgaccaggacgtcgaacttggctctctgcaggtgatgaataaaactagaaaaatcatggagcatggcggcgcgaccttcatcaatgcctttgtgacaacaccaatgtgttgcccttccaggtcgagcatgctgaccggcaaatatgtacacaaccacaacgtgtacacgaacaacgaaaattgttctagtccctcctggcaggcaatgcacgagccccgcacgttcgccgtgtacttgaataacaccgggtatcgcaccgcattctttggaaaatacctgaacgaatataatggcagctacatcccacctggttggcgggaatggctggggctgattaagaattccagattttacaactacacggtgtgcagaaatggtattaaagaaaagcatgggtttgattatgcaaaggattattttactgacctgatcacgaatgagtctataaactattttaaaatgagcaagaggatgtacccacacagaccggtcatgatggtgataagccatgcagccccgcacggccccgaggacagcgcccctcaattctccaagctttaccccaacgcatctcaacacatcactcccagctacaactacgctccaaacatggacaagcattggattatgcagtacacagggcctatgctgccaattcacatggaatttacgaatattcttcagaggaaaaggctccaaacacttatgagtgtcgatgactcagtggagcgtctttacaacatgctggttgaaacgggtgagctggaaaatacatacattatttacacagccgaccacggatatcacatcggccagttcggactggtgaaagggaaatcgatgccatatgacttcgatattagggtgccatttttcatcagggggccttccgtcgagccaggaagcatcgtccctcagattgtgctcaacattgacctggccccaacaatcctcgacattgccggcttagacaccccccctgacgtggatggtaaatccgtacttaagctgctcgaccccgaaaaacccggcaatcgctttagaacaaataaaaaggcgaagatttggcgcgacacatttttagtagagcgtggcaaatttcttcgcaaaaaggaggagtccagtaagaacatccagcagagcaaccacctcccgaagtacgaaagggtaaaagagctttgccagcaggcgcgctaccagacagcatgcgagcagcccggtcaaaagtggcagtgcattgaggatacatcaggcaaattgcgtatccacaagtgcaagggcccgtctgacttgctgaccgtgagacagagcaccaggaatctctatgctcggggttttcatgacaaggataaagagtgcagttgtcgagaaagcggatatcgagcttctagatcacaaagaaagtcacagagacagttcctcaggaatcaagggacccctaagtacaaaccaaggttcgtgcacactagacaaacaagatccctgagcgttgagttcgagggggagatctatgacattaaccttgaggaagaggaggagttacaggtcctgcagcctaggaatatcgcgaaacggcacgatgagggacacaagggaccaagagacctgcaggcctctagcgggggtaaccgcggaagaatgctggccgactccagtaatgccgttggtcctcccaccactgtgcgagttacacacaagtgcttcattctgcccaatgattctattcactgcgagagagaactctaccagtccgccagagcttggaaggatcataaggcctacatagacaaagagatcgaggcgctccaggataaaataaaaaatctacgggaggtgagaggtcacctaaaaaggcgcaaaccggaagaatgcagttgctctaagcaatcatattataataaagaaaagggggtgaagaagcaggaaaagttgaaaagccacctacatccattcaaagaggcggcacaggaggttgactccaagctgcaactgtttaaagagaacaaccggagacggaaaaaggaaagaaaagagaagcgcaggcagaggaaaggtgaggaatgctccctacctggccttacctgcttcacacacgataacaaccattggcagaccgcaccattctggaacctgggcagcttctgcgcctgtactagctctaacaataacacctactggtgtttgcgcactgtgaacgaaactcacaatttcctgttttgtgagttcgctacaggattcttggagtattttgacatgaatacagacccctatcagctaacaaataccgtacacacagtggagcgcggcatattgaatcaactccatgttcagctgatggagctgcgaagttgccaggggtacaaacagtgcaacccccggccaaagaatttggacgtcgggaacaaggacggtggatcctacgacctgcaccgaggccagctatgggacggttgggaagggtag

SEQ ID NO: 184902 - DNA, 2616 bp, Artificial Sequence
  derived and/or modified sequence
atgaagtacagctgctgcgccctggtgctggccgtgctgggcaccgagctgctgggcagcctatgcagcacggtgcgcagcccccgttttcgagggcgtattcagcaggagcgcaagaatatacgccctaacatcatcttggttctcacggatgaccaggatgtcgaactgggttcgctgcaagtgatgaacaaaacccgcaaaatcatggagcacggcggggctacgtttattaatgcattcgtcacgacacccatgtgttgcccatcgcgatccagcatgctgaccggaaaatacgtgcacaatcacaacgtgtacactaataacgagaactgcagtagcccaagctggcaggcaatgcacgagcccaggacattcgcagtttacttgaacaatacaggttacagaaccgcgttctttggtaagtaccttaatgagtacaacggcagttatattccacccggatggagagagtggctcggcctgatcaaaaacagtcgattctacaattatacagtttgccgtaatggtattaaggaaaaacacggcttcgattacgctaaggattacttcacggacctcatcaccaacgagagcataaactatttcaaaatgagcaaaagaatgtatccccaccgacctgtgatgatggtgatctcacatgctgccccccatggccccgaagacagtgcgcctcagttcagcaaactgtatccgaacgcttctcaacatatcacaccatcatacaattacgccccaaatatggataagcactggattatgcagtacacaggtcccatgctaccaatccatatggaattcaccaatatattgcagcggaagcggctgcagaccttgatgtccgtggatgactctgtagaacgtctatacaacatgcttgtggagacgggcgagctagagaatacttacatcatctatacagctgaccacggttaccacattgggcagtttggacttgtaaagggaaagtctatgccctacgacttcgacattcgagtgcccttcttcataagaggaccctcagtcgagccaggaagcatcgtccctcagattgtactcaacattgatctggcccccacaatcctcgatatcgctggtctagacacgccacctgacgtcgatggcaagtcagtcctaaaacttttggaccccgagaaaccagggaataggttccggacaaacaaaaaggccaagatctggcgcgatacatttcttgtggaacgcggcaagtttctgcggaagaaagaagagtcaagcaaaaatatccagcaaagcaaccatttgccaaagtatgagcgcgtgaaggagctttgccaacaggctcggtaccaaactgcttgtgagcaacctggccagaagtggcagtgtatcgaagacacgtccggcaagctgagaatccacaagtgcaagggacccagcgacctgctgacagtgcgccagtccaccaggaacctctatgcacgaggcttccatgataaggacaaagagtgctcttgtcgtgaatcaggctacagggccagccggagccagagaaaatctcagcgccagtttcttcggaaccaaggcacccctaagtataagccacgctttgtgcatacacgacagacccgcagcctttctgtggagtttgaaggcgaaatttacgatatcaatctggaggaggaggaggaactgcaggtccttcagccaagaaatattgccaaaaggcacgatgagggccacaaggggcctcgggacctgcaggcatcaagtgggggcaaccgtggacgcatgttggccgacagcagcaacgcagtggggccacccaccacagtgcgcgtgacccataagtgttttatccttcctaatgattcaattcactgcgagagagagctctatcagtctgcccgagcctggaaggaccataaagcttacatcgacaaagaaatcgaggcactgcaggataaaattaagaatctacgcgaggtgcgagggcacctcaaacggcggaagcctgaggagtgtagctgttccaaacagagctattataacaaggagaaaggagtgaaaaaacaggaaaagctgaagagtcacctgcaccccttcaaggaagcggctcaggaggtggactccaagctgcaactgttcaaagagaataacagaaggcgcaaaaaggaaaggaaggagaaaagaaggcagcggaaaggcgaggaatgtagtctgcccggcctcacttgctttacacatgacaacaatcactggcagaccgcccctttctggaatttgggctcattttgcgcttgcacttcctccaataacaacacttattggtgcctcagaacagtgaatgaaacacacaacttcctattctgcgagttcgccactgggtttctcgaatatttcgacatgaacaccgatccctaccagctgacaaacaccgttcacacagtagaacggggaatcctgaaccagctacatgtccagctgatggaactcagatcatgccagggttacaaacagtgtaacccccgtccaaaaaatctggacgtgggcaataaagatggcggctcatatgatctccatagaggacagctgtgggacggctgggagggatag

SEQ ID NO: 184903 - DNA, 2616 bp, Artificial Sequence
  derived and/or modified sequence
atgaagtactcttgttgtgcgctggtgctggcagtgctcggaacggaattgcttgggagcctctgctcaactgttcggtcgcccagattccgcggtcgtattcagcaggagcggaagaatatccggcctaatatcattttagtgttaacagacgatcaagatgttgaactgggaagcttacaggtgatgaacaagaccagaaagataatggagcacggaggggcaacatttataaacgcctttgtgacaacgccgatgtgttgtccaagtagaagtagtatgttgaccgggaagtacgtgcacaaccataacgtttataccaataatgagaactgcagcagtccaagctggcaggccatgcacgagcccaggacattcgcagtgtatttgaataatacaggctaccgcaccgcgttctttggcaagtatcttaacgagtacaacgggtcctatattcctccaggatggcgggagtggcttgggctgattaagaattcccggttctataactacaccgtgtgtcgaaacggaataaaagaaaagcacggttttgactacgctaaggattacttcacagacctgatcactaatgagtctattaactacttcaaaatgagcaagcggatgtaccctcaccggccagtgatgatggtcatcagtcatgctgcccctcacggccctgaggacagcgccccacagtttagtaagctgtatccaaatgcctcccagcacattacaccgtcgtataattacgcgcctaatatggacaaacactggattatgcagtataccggtccaatgctacccatccacatggagtttaccaatatcttgcagcgaaagcggttacaaactcttatgagtgtggacgactctgtggagcgtctctataacatgttagtggaaactggagagttagagaatacttacataatctacacagctgatcatgggtaccacatcggccagttcgggctggtgaagggcaagtccatgccctacgacttcgatatccgggtccccttctttatccggggacccagcgtcgaacccggtagcattgtgcctcagatcgtactcaatattgatctcgcacctactattctagatattgccggtctcgacacccccccagacgtggatgggaagtccgtgttaaagttgctggatcccgagaaaccaggaaaccgcttccggacaaataagaaggctaaaatttggcgggacacctttcttgtggaacgagggaagttccttcggaaaaaagaagagtcaagcaagaacattcagcagtctaatcacctgcctaagtacgaacgggtcaaagaattgtgccagcaggctagatatcagacggcctgtgaacagcccggacagaaatggcagtgtattgaggacacatcaggaaagttgcggatccataagtgtaaggggccatccgacctgttaaccgtccgccagtctacaaggaacctgtatgcacgcggatttcacgataaggacaaggagtgctcttgtagggagagtggttatagagctagccgcagccagaggaagtctcaaaggcaattcttgaggaaccagggaacccccaaatacaagcccaggttcgtccatacacgccaaaccagatctttgtcggttgaatttgaaggggagatttacgacatcaacctagaagaggaggaggagctccaggtgctgcagccaaggaatatcgcaaagcggcacgatgagggccataagggtcctagagacttacaggctagttcgggcggtaaccggggacggatgctcgccgattcatccaatgccgtaggaccaccgaccacagtgcgtgtgacccataaatgctttatcctaccaaacgacagtatccactgcgagcgggaactataccaatccgcacgcgcatggaaggaccacaaagcctacattgacaaagagatcgaggccctgcaagacaagattaagaaccttcgcgaggtcagaggtcatctgaaaagacggaagccggaagagtgctcttgctccaagcaatcgtactacaataaggaaaagggagtcaaaaagcaagagaagctaaaatcccacttgcacccctttaaagaagccgcacaggaggtcgacagtaaactgcagctgtttaaggagaacaacaggagaaggaagaaggagaggaaagagaagagacgccagcgcaagggggaagagtgttccctcccaggcctcacctgctttacacacgacaataaccactggcagacagctcctttctggaacctcggaagtttttgcgcctgcacttcatcgaacaacaatacatactggtgtctaagaaccgtgaatgaaactcacaacttcctattctgtgagtttgcaactgggttcttagagtacttcgacatgaacaccgatccctaccagctgacaaatacggtgcacacagtggagcggggtatcctaaaccagctccatgtacaacttatggaactgcgttcttgtcaggggtacaaacaatgcaaccctaggcctaaaaacctcgatgttggaaataaagatgggggaagctatgatttacacagggggcagctctgggatggatgggagggatag

SEQ ID NO: 184904 - DNA, 2616 bp, Artificial Sequence
  derived and/or modified sequence
atgaagtatagctgttgtgccctggtgcttgccgtgttaggtactgaacttcttgggtcactctgttccactgtacgatcaccacgcttccgtgggaggatccagcaggaaaggaaaaacatacggcctaatatcattttggtcttgactgacgaccaggacgtcgaactcgggagcctgcaagtgatgaacaagacacgcaagattatggaacatgggggagcaacctttattaacgcatttgttaccacccctatgtgttgtccctcccggtcatcaatgttgacagggaagtatgttcacaatcacaacgtctacacgaacaacgagaattgcagctccccgagctggcaagccatgcacgaacccagaaccttcgcagtatacctgaataataccggctacaggactgcattcttcgggaaatatcttaacgaatataatggctcatacattcccccagggtggagagagtggctggggttaattaagaactcccgtttctacaactataccgtctgcagaaacggcatcaaagagaaacacgggtttgattatgcgaaggattatttcaccgaccttatcacaaacgagtctattaattacttcaagatgagtaagcgcatgtatccccaccgccctgtcatgatggtaattagccacgccgcacctcacggaccagaagattcagcccctcagttctctaagctgtatccaaacgcttcgcagcacattacgccgtcctataactatgccccaaatatggataagcactggattatgcagtacacgggacccatgctgcctatccacatggagtttacaaatatcttacagcgaaaacggctacagactctgatgtctgtcgatgacagtgttgagcgcctttataacatgctggtagagaccggagagcttgaaaatacctacattatttacaccgcagatcacggttaccacatcggtcaatttggcctggtgaagggtaaatccatgccatacgatttcgatattagagtgccattcttcatcagaggcccttcggtagaacctggtagcattgtccctcagatcgtgctgaatattgacctggccccaacaatactggacatcgccggactcgacaccccgcctgacgtagatggtaaatctgtgctaaagctgttagatcctgagaagccgggaaatcgattccgaaccaacaagaaagccaaaatttggagggacacttttttggttgaaaggggcaagtttctccgcaagaaagaagagtcaagcaagaacattcaacagagtaatcacctgccaaagtatgagagagtcaaagagctgtgtcagcaagctcgataccaaactgcatgtgagcagcctgggcagaagtggcagtgtatagaggacacatccggtaagctccgaatccataagtgcaagggcccttcagatctcctgactgtacgccagtccacacgcaatctgtacgcaagaggcttccatgacaaggacaaggaatgtagctgtagggaatctggttacagggcctccagaagtcaaaggaagtcacagaggcagttccttagaaatcaaggtactccaaaatataagccacggttcgtgcacaccagacagactcgttccctttctgttgagttcgagggcgagatttatgatataaacttggaggaagaggaggaactgcaggtgttgcagcccaggaacatcgccaagcggcacgatgaaggtcataaaggaccgcgagatctgcaagcatcgtcaggcggaaatagggggagaatgctcgcggactccagcaatgctgtcggaccgcctactacggtacgcgtgacacataaatgctttatactgccaaacgactctatccattgcgagagggaactttaccagagcgcccgtgcttggaaggaccacaaggcctacattgacaaagaaattgaggctctgcaggacaagatcaaaaaccttagagaagtgcggggtcatctgaagaggcggaagccagaagaatgctcctgttctaaacagagttattacaacaaggaaaagggggtgaaaaaacaggagaagttaaaaagccatcttcaccccttcaaagaggctgcccaggaagtggatagcaaactacagttgtttaaggagaataaccgcagaagaaagaaggaaagaaaagaaaaacgtcgccagaggaaaggagaagagtgtagcttgcccggtctgacttgtttcactcatgacaacaatcactggcagacggctccattttggaatttgggcagcttttgcgcctgcacttcttccaacaacaatacgtactggtgcctcagaactgtgaacgaaactcacaatttcctgttttgtgagttcgcaacgggattcctcgagtactttgatatgaacactgacccatatcagctgactaatactgtccatacagtcgagagagggatcctaaaccagctgcacgtgcagcttatggaactcaggtcatgccagggatacaaacaatgcaatcctcgccctaaaaacctcgatgtgggcaataaggacggcggatcatacgatctgcacaggggccagctgtgggacgggtgggagggatag

SEQ ID NO: 184905 - DNA, 2616 bp, Artificial Sequence
  derived and/or modified sequence
atgaagtatagttgttgcgccctggtgctggctgtgctcgggactgaactcctcggaagcctgtgctcgactgtccggtcaccgcgattccggggacgcatacagcaggaacgaaagaacatacgtcccaatatcattctggtcctgaccgatgaccaggacgtggaactgggctccctccaagtgatgaataagacacggaagattatggaacatggtggtgcaacgttcataaacgctttcgtcacgactcccatgtgctgcccttcccggtcatccatgctgaccggaaaatatgtgcacaaccataatgtttacactaataatgaaaattgttcatcaccatcctggcaagccatgcacgaaccacgtacttttgcagtctacctgaacaacaccggttatcgcaccgccttcttcggaaagtaccttaatgaatacaatgggagctacattcctcccggatggagagaatggctgggattgatcaagaacagtcgattctataattacactgtctgcaggaacggcatcaaagaaaagcatggtttcgattacgccaaagactactttaccgatctcatcaccaacgaatcaattaattacttcaagatgtcaaaaagaatgtatcctcaccgccctgtcatgatggtgatatcccacgccgcaccacatggtcctgaagacagcgccccacaattttccaaattataccctaacgcctcccagcacatcacgccctcctataattatgcaccaaatatggacaagcactggataatgcagtacactggcccaatgctgcctatccacatggagttcaccaatattctccagagaaaacgacttcagaccctgatgtctgtggatgacagcgtggagagattatacaatatgctcgtcgaaacgggagaactggaaaatacatatatcatttacaccgccgatcacggttaccacattggccagttcggactagtcaaggggaagagtatgccatacgattttgatatccgggttccattcttcattcgcggaccttccgtcgaacctggaagcattgtcccacagattgtgctcaacatagatttagcccctacgatcctcgatatcgccggactcgatacccccccagatgtcgatgggaagtccgttctaaagctcttagatccagagaaacctggaaaccgcttccgaaccaataagaaagctaaaatctggagggacacttttctcgttgaaaggggcaagttcctgcgcaagaaggaggaatcctcaaaaaatatccagcagtccaatcatctgcccaagtatgaaagggtgaaggagctctgtcaacaggccaggtaccagaccgcctgcgaacaaccgggtcagaaatggcagtgtattgaagacaccagcgggaagctgcgtattcacaagtgtaaaggcccaagcgacctgcttacagttaggcagtctacccgcaacctgtatgcacgcggattccacgacaaggataaggaatgttcatgtcgcgagtctggttaccgggcatccaggagtcagaggaagtcccaacggcaatttctcaggaatcagggcacgccgaagtataagccacgatttgtgcatacaaggcagacccgaagtttgagtgtcgaattcgagggcgaaatctacgacatcaacctggaggaggaagaggaactgcaggtgctgcaacctagaaatatcgcaaaacggcatgatgaaggccataaggggcctcgcgatctccaggcttcaagcggcggtaatcgtggtagaatgctggcagattcaagcaatgccgtggggccacctaccactgttagggtgacccacaagtgtttcattctacctaatgactcaatccattgtgaaagggagctctatcaaagcgctcgcgcttggaaggatcataaggcctatatcgacaaagaaattgaggccctgcaggacaaaatcaagaatctccgcgaggtgcggggacacctaaagcgtaggaaacctgaggagtgcagctgtagtaagcagtcctattataacaaggaaaaaggggtgaaaaagcaggagaagctgaagagccacttgcacccatttaaagaggcggctcaagaggtcgatagcaaactacagctctttaaggaaaataaccggcgacgcaagaaagagagaaaagaaaagcgcaggcaaaggaagggcgaggaatgttccctgccaggtctgacatgcttcacacacgataacaaccactggcagacagcccctttttggaaccttggctctttctgtgcatgcacaagttccaacaacaatacatactggtgtttgcgtaccgtcaatgaaactcacaattttctgttctgcgagttcgccacaggcttcctggagtactttgatatgaacaccgacccatatcaactaacaaataccgttcataccgtagaacgtggaattctcaaccagctgcatgtgcaacttatggagctgaggtcctgccaggggtacaagcagtgcaacccccgtcccaagaatctagatgttggtaataaggacggtgggtcatacgatcttcataggggacagctctgggacgggtgggagggctag

SEQ ID NO: 184906 - DNA, 2616 bp, Artificial Sequence
  derived and/or modified sequence
atgaagtactcttgttgcgccctggtgctcgcagtcctgggtacagaattgttggggtctctgtgctctactgtccgttctcctaggtttcggggacggatccagcaggaacggaagaacatcaggccaaacataattctggtccttacggatgaccaggacgtcgaactcgggtctctacaggtgatgaataaaacccgcaagataatggaacatggaggagccacttttataaatgcattcgtgactacccccatgtgctgtccatcccgctcctccatgctgaccgggaagtatgtccacaatcacaacgtttacactaataatgagaactgttcatcaccctcatggcaggccatgcacgagccaaggacctttgctgtgtacttaaacaataccggctatcgcactgcgttttttgggaaatacttgaacgaatacaacggatcatacattcctccagggtggagagagtggttgggccttatcaagaactcacggttttacaactacaccgtgtgcaggaacggcatcaaagagaaacacggcttcgattacgctaaggactattttacggatctcattaccaatgagagcatcaactattttaaaatgtccaaacggatgtatccccacagaccggtaatgatggtgatttcccacgcagcccctcatggcccagaggatagtgcaccccagtttagcaagctgtatcctaatgccagtcagcacattacaccaagttacaattacgcgcctaacatggacaagcactggataatgcagtacaccgggcctatgctgcccattcacatggagttcaccaacatactgcagcggaaacgccttcagactctgatgagcgttgacgacagtgtggaaagactctataatatgcttgtcgagactggcgaactggagaacacatatatcatttacactgcagaccatggttaccacataggccagtttggcttggttaagggcaaaagtatgccttatgattttgacatccgggtaccatttttcattaggggtccctccgtggaacccggaagcattgtgccccaaatcgtccttaatattgatctcgcaccgacgattctggatatcgcgggtctcgatacgccccctgatgtggacggtaaatccgtgctgaaacttctcgacccagagaagcccggaaacaggtttcggacgaataagaaggcaaagatctggagggacaccttcctggtggagaggggaaagtttctgaggaaaaaagaggagtcttccaagaatatccagcagagcaaccatctgcctaaatatgagcgcgttaaggagctatgccagcaggcccgttatcagaccgcctgcgagcagccagggcaaaagtggcagtgtatagaggacacctccggcaaactcaggatccacaaatgcaaggggcctagcgacctactgaccgtcagacagtcaacacggaatctgtacgcacgtggctttcacgataaagacaaggagtgtagctgtcgcgagtcgggctaccgagcaagtcggtcccagaggaaatcccagcggcaattcctgcgcaaccaaggcacaccaaaatacaagccacgcttcgtccatacacggcagacccggtcactcagcgtggaattcgagggcgaaatctacgatattaatcttgaggaggaggaagagcttcaagtgctgcagcctaggaacatcgccaagcgacacgatgagggccacaaaggtcccagggatttgcaggcatcctcagggggaaatagggggagaatgttggctgatagcagtaatgccgttggccctcccacaacagtgcgcgttactcacaagtgttttattcttccaaatgactccatccactgcgaacgggaactttatcagagcgctcgagcctggaaggaccataaagcttacatcgacaaggaaattgaggccctgcaggacaaaattaaaaatcttcgcgaggtcagggggcatttaaagcgccgtaagcccgaagagtgcagttgttccaaacagtcctattataacaaggagaaaggagtgaaaaagcaagagaaactcaagtcccatctgcacccttttaaagaagctgcccaggaagtggattcaaaactgcagttgtttaaggagaataaccgtagacgcaagaaggaaaggaaggaaaagcgtcgacagcgaaaaggggaggaatgctcattgccgggactgacgtgcttcacccatgataacaaccactggcagacagcccctttttggaatctgggaagtttctgtgcatgtacatcgtctaacaacaatacctactggtgcttgcgcaccgtgaacgaaacccacaacttcctcttctgtgaatttgcaacaggattcctggaatattttgatatgaatacagacccttatcagttgacaaacaccgtccacaccgtggagcgcggaattctgaaccaactgcacgtccagctgatggagctcaggtcttgccagggctacaagcagtgtaaccccagacctaaaaatttggacgtcggcaacaaggacggaggttcctacgacctgcatcgtggccagctgtgggacggatgggaggggtag

SEQ ID NO: 184907 - DNA, 5710 bp, Artificial Sequence
  derived and/or modified sequence
aggttacttgactgggagttctcagacctccagtttcagccctgccctcagcctccaatccgtaagagacacccagccccagcaattggattgggcagcccgtcttgacacaccactgtgctgagtgcttgaggacgtgtttcaacagatggttggggttagtgtgtgtcatcacattcgagtggggattaagagaaggaaggctgccttgctggagctgtgtggtcttctccaagtgagagtcgcaggcaatagaactactttgcttttggaggaaaaggaggaattcattttcagcagacacaagaaaagcagtttttttttcagggattcttcacttctcttgaacaaggaactcactcagagactaacacaaaggaagtaatttcttacctggtcattatttagtctacaataagttcatccttcttcagtgtgaccagtaaattcttcccatactcttgaagagagcataattggaatggagaggtgctgacggccacccaccatcatctaaagaagataaacttggcaaatgacatgcaggttcttcaaggcagaataattgcagaaaatcttcaaaggaccctatctgcagatgttctgaatacctctgagaatagagattgattattcaaccaggatacctaattcaagaactccagaaatcaggagacggagacattttgtcagttttgcaacattggaccaaatacaatgaagtattcttgctgtgctctggttttggctgtcctgggcacagaattgctgggaagcctctgttcgactgtcagatccccgaggttcagaggacggatacagcaggaacgaaaaaacatccgacccaacattattcttgtgcttaccgatgatcaagatgtggagctggggtccctgcaagtcatgaacaaaacgagaaagattatggaacatgggggggccaccttcatcaatgcctttgtgactacacccatgtgctgcccgtcacggtcctccatgctcaccgggaagtatgtgcacaatcacaatgtctacaccaacaacgagaactgctcttccccctcgtggcaggccatgcatgagcctcggacttttgctgtatatcttaacaacactggctacagaacagccttttttggaaaatacctcaatgaatataatggcagctacatcccccctgggtggcgagaatggcttggattaatcaagaattctcgcttctataattacactgtttgtcgcaatggcatcaaagaaaagcatggatttgattatgcaaaggactacttcacagacttaatcactaacgagagcattaattacttcaaaatgtctaagagaatgtatccccataggcccgttatgatggtgatcagccacgctgcgccccacggccccgaggactcagccccacagttttctaaactgtaccccaatgcttcccaacacataactcctagttataactatgcaccaaatatggataaacactggattatgcagtacacaggaccaatgctgcccatccacatggaatttacaaacattctacagcgcaaaaggctccagactttgatgtcagtggatgattctgtggagaggctgtataacatgctcgtggagacgggggagctggagaatacttacatcatttacaccgccgaccatggttaccatattgggcagtttggactggtcaaggggaaatccatgccatatgactttgatattcgtgtgcctttttttattcgtggtccaagtgtagaaccaggatcaatagtcccacagatcgttctcaacattgacttggcccccacgatcctggatattgctgggctcgacacacctcctgatgtggacggcaagtctgtcctcaaacttctggacccagaaaagccaggtaacaggtttcgaacaaacaagaaggccaaaatttggcgtgatacattcctagtggaaagaggcaaatttctacgtaagaaggaagaatccagcaagaatatccaacagtcaaatcacttgcccaaatatgaacgggtcaaagaactatgccagcaggccaggtaccagacagcctgtgaacaaccggggcagaagtggcaatgcattgaggatacatctggcaagcttcgaattcacaagtgtaaaggacccagtgacctgctcacagtccggcagagcacgcggaacctctacgctcgcggcttccatgacaaagacaaagagtgcagttgtagggagtctggttaccgtgccagcagaagccaaagaaagagtcaacggcaattcttgagaaaccaggggactccaaagtacaagcccagatttgtccatactcggcagacacgttccttgtccgtcgaatttgaaggtgaaatatatgacataaatctggaagaagaagaagaattgcaagtgttgcaaccaagaaacattgctaagcgtcatgatgaaggccacaaggggccaagagatctccaggcttccagtggtggcaacaggggcaggatgctggcagatagcagcaacgccgtgggcccacctaccactgtccgagtgacacacaagtgttttattcttcccaatgactctatccattgtgagagagaactgtaccaatcggccagagcgtggaaggaccataaggcatacattgacaaagagattgaagctctgcaagataaaattaagaatttaagagaagtgagaggacatctgaagagaaggaagcctgaggaatgtagctgcagtaaacaaagctattacaataaagagaaaggtgtaaaaaagcaagagaaattaaagagccatcttcacccattcaaggaggctgctcaggaagtagatagcaaactgcaacttttcaaggagaacaaccgtaggaggaagaaggagaggaaggagaagagacggcagaggaagggggaagagtgcagcctgcctggcctcacttgcttcacgcatgacaacaaccactggcagacagccccgttctggaacctgggatctttctgtgcttgcacgagttctaacaataacacctactggtgtttgcgtacagttaatgagacgcataattttcttttctgtgagtttgctactggctttttggagtattttgatatgaatacagatccttatcagctcacaaatacagtgcacacggtagaacgaggcattttgaatcagctacacgtacaactaatggagctcagaagctgtcaaggatataagcagtgcaacccaagacctaagaatcttgatgttggaaataaagatggaggaagctatgacctacacagaggacagttatgggatggatgggaaggttaatcagccccgtctcactgcagacatcaactggcaaggcctagaggagctacacagtgtgaatgaaaacatctatgagtacagacaaaactacagacttagtctggtggactggactaattacttgaaggatttagatagagtatttgcactgctgaagagtcactatgagcaaaataaaacaaataagactcaaactgctcaaagtgacgggttcttggttgtctctgctgagcacgctgtgtcaatggagatggcctctgctgactcagatgaagacccaaggcataaggttgggaaaacacctcatttgaccttgccagctgaccttcaaaccctgcatttgaaccgaccaacattaagtccagagagtaaacttgaatggaataacgacattccagaagttaatcatttgaattctgaacactggagaaaaaccgaaaaatggacggggcatgaagagactaatcatctggaaaccgatttcagtggcgatggcatgacagagctagagctcgggcccagccccaggctgcagcccattcgcaggcacccgaaagaacttccccagtatggtggtcctggaaaggacatttttgaagatcaactatatcttcctgtgcattccgatggaatttcagttcatcagatgttcaccatggccaccgcagaacaccgaagtaattccagcatagcggggaagatgttgaccaaggtggagaagaatcacgaaaaggagaagtcacagcacctagaaggcagcgcctcctcttcactctcctctgattagatgaaactgttaccttaccctaaacacagtatttctttttaacttttttatttgtaaactaataaaggtaatcacagccaccaacattccaagctaccctgggtacctttgtgcagtagaagctagtgagcatgtgagcaagcggtgtgcacacggagactcatcgttataatttactatctgccaagagtagaaagaaaggctggggatatttgggttggcttggttttgattttttgcttgtttgtttgttttgtactaaaacagtattatcttttgaatatcgtagggacataagtatatacatgttatccaatcaagatggctagaatggtgcctttctgagtgtctaaaacttgacacccctggtaaatctttcaacacacttccactgcctgcgtaatgaagttttgattcatttttaaccactggaatttttcaatgccgtcattttcagttagatgattttgcactttgagattaaaatgccatgtctatttgattagtcttatttttttatttttacaggcttatcagtctcactgttggctgtcattgtgacaaagtcaaataaacccccaaggacgacacacagtatggatcacatattgtttgacattaagcttttgccagaaaatgttgcatgtgttttacctcgacttgctaaaatcgattagcagaaaggcatggctaataatgttggtggtgaaaataaataaataagtaaacaaaatgaagattgcctgctctctctgtgcctagcctcaaagcgttcatcatacatcatacctttaagattgctatattttgggttattttcttgacaggagaaaaagatctaaagatcttttattttcatcttttttggttttcttggcatgactaagaagcttaaatgttgataaaatatgactagttttgaatttacaccaagaacttctcaataaaagaaaatcatgaatgctccacaatttcaacataccacaagagaagttaatttcttaacattgtgttctatgattatttgtaagaccttcaccaagttctgatatcttttaaagacatagttcaaaattgcttttgaaaatctgtattcttgaaaatatccttgttgtgtattaggtttttaaataccagctaaaggattacctcactgagtcatcagtaccctcctattcagctccccaagatgatgtgtttttgcttaccctaagagaggttttcttcttatttttagataattcaagtgcttagataaattatgttttctttaagtgtttatggtaaactcttttaaagaaaatttaatatgttatagctgaatctttttggtaactttaaatctttatcatagactctgtacatatgttcaaattagctgcttgcctgatgtgtgtatcatcggtgggatgacagaacaaacatatttatgatcatgaataatgtgctttgtaaaaagatttcaagttattaggaagcatactctgttttttaatcatgtataatattccatgatacttttatagaacaattctggcttcaggaaagtctagaagcaatatttcttcaaataaaaggtgtttaaacttt

SEQ ID NO: 184908 - DNA, 4891 bp, Artificial Sequence
  derived and/or modified sequence
tttgtctggcagcgttggttctatgggggtgtgtgatgataataatacgcgggcttatataaccgtcttcatcttgcgagcacttcgcagaccgtcgctaatgaatcttggggccggtgtcgggccggggcggcttgatcggcaactaggaaaccccaggcgcagaggccaggagcgagggcagcgaggatcagaggccaggccttcccggctgccggcgctcctcggaggtcagggcagatgaggaacatgactctcccccttcggaggaggaaggaagtcccgctgccaccttatctctgctcctctgcctcctccctgttcccagagctttttctctagagaagattttgaaggcggcttttggattcttcacttctcttgaacaaggaactcactcagagactaacacaaaggaagtaatttcttacctggtcattatttagtctacaataagttcatccttcttcagtgtgaccagtaaattcttcccatactcttgaagagagcataattggaatggagaggtgctgacggccacccaccatcatctaaagaagataaacttggcaaatgacatgcaggttcttcaaggcagaataattgcagaaaatcttcaaaggaccctatctgcagatgttctgaatacctctgagaatagagattgattattcaaccaggatacctaattcaagaactccagaaatcaggagacggagacattttgtcagttttgcaacattggaccaaatacaatgaagtattcttgctgtgctctggttttggctgtcctgggcacagaattgctgggaagcctctgttcgactgtcagatccccgaggttcagaggacggatacagcaggaacgaaaaaacatccgacccaacattattcttgtgcttaccgatgatcaagatgtggagctggggtccctgcaagtcatgaacaaaacgagaaagattatggaacatgggggggccaccttcatcaatgcctttgtgactacacccatgtgctgcccgtcacggtcctccatgctcaccgggaagtatgtgcacaatcacaatgtctacaccaacaacgagaactgctcttccccctcgtggcaggccatgcatgagcctcggacttttgctgtatatcttaacaacactggctacagaacagccttttttggaaaatacctcaatgaatataatggcagctacatcccccctgggtggcgagaatggcttggattaatcaagaattctcgcttctataattacactgtttgtcgcaatggcatcaaagaaaagcatggatttgattatgcaaaggactacttcacagacttaatcactaacgagagcattaattacttcaaaatgtctaagagaatgtatccccataggcccgttatgatggtgatcagccacgctgcgccccacggccccgaggactcagccccacagttttctaaactgtaccccaatgcttcccaacacataactcctagttataactatgcaccaaatatggataaacactggattatgcagtacacaggaccaatgctgcccatccacatggaatttacaaacattctacagcgcaaaaggctccagactttgatgtcagtggatgattctgtggagaggctgtataacatgctcgtggagacgggggagctggagaatacttacatcatttacaccgccgaccatggttaccatattgggcagtttggactggtcaaggggaaatccatgccatatgactttgatattcgtgtgcctttttttattcgtggtccaagtgtagaaccaggatcaatagtcccacagatcgttctcaacattgacttggcccccacgatcctggatattgctgggctcgacacacctcctgatgtggacggcaagtctgtcctcaaacttctggacccagaaaagccaggtaacaggtttcgaacaaacaagaaggccaaaatttggcgtgatacattcctagtggaaagaggcaaatttctacgtaagaaggaagaatccagcaagaatatccaacagtcaaatcacttgcccaaatatgaacgggtcaaagaactatgccagcaggccaggtaccagacagcctgtgaacaaccggggcagaagtggcaatgcattgaggatacatctggcaagcttcgaattcacaagtgtaaaggacccagtgacctgctcacagtccggcagagcacgcggaacctctacgctcgcggcttccatgacaaagacaaagagtgcagttgtagggagtctggttaccgtgccagcagaagccaaagaaagagtcaacggcaattcttgagaaaccaggggactccaaagtacaagcccagatttgtccatactcggcagacacgttccttgtccgtcgaatttgaaggtgaaatatatgacataaatctggaagaagaagaagaattgcaagtgttgcaaccaagaaacattgctaagcgtcatgatgaaggccacaaggggccaagagatctccaggcttccagtggtggcaacaggggcaggatgctggcagatagcagcaacgccgtgggcccacctaccactgtccgagtgacacacaagtgttttattcttcccaatgactctatccattgtgagagagaactgtaccaatcggccagagcgtggaaggaccataaggcatacattgacaaagagattgaagctctgcaagataaaattaagaatttaagagaagtgagaggacatctgaagagaaggaagcctgaggaatgtagctgcagtaaacaaagctattacaataaagagaaaggtgtaaaaaagcaagagaaattaaagagccatcttcacccattcaaggaggctgctcaggaagtagatagcaaactgcaacttttcaaggagaacaaccgtaggaggaagaaggagaggaaggagaagagacggcagaggaagggggaagagtgcagcctgcctggcctcacttgcttcacgcatgacaacaaccactggcagacagccccgttctggaacctgggatctttctgtgcttgcacgagttctaacaataacacctactggtgtttgcgtacagttaatgagacgcataattttcttttctgtgagtttgctactggctttttggagtattttgatatgaatacagatccttatcagctcacaaatacagtgcacacggtagaacgaggcattttgaatcagctacacgtacaactaatggagctcagaagctgtcaaggatataagcagtgcaacccaagacctaagaatcttgatgttggaaataaagatggaggaagctatgacctacacagaggacagttatgggatggatgggaaggttaatcagccccgtctcactgcagacatcaactggcaaggcctagaggagctacacagtgtgaatgaaaacatctatgagtacagacaaaactacagacttagtctggtggactggactaattacttgaaggatttagatagagtatttgcactgctgaagagtcactatgagcaaaataaaacaaataagactcaaactgctcaaagtgacgggttcttggttgtctctgctgagcacgctgtgtcaatggagatggcctctgctgactcagatgaagacccaaggcataaggttgggaaaacacctcatttgaccttgccagctgaccttcaaaccctgcatttgaaccgaccaacattaagtccagagagtaaacttgaatggaataacgacattccagaagttaatcatttgaattctgaacactggagaaaaaccgaaaaatggacggggcatgaagagactaatcatctggaaaccgatttcagtggcgatggcatgacagagctagagctcgggcccagccccaggctgcagcccattcgcaggcacccgaaagaacttccccagtatggtggtcctggaaaggacatttttgaagatcaactatatcttcctgtgcattccgatggaatttcagttcatcagatgttcaccatggccaccgcagaacaccgaagtaattccagcatagcggggaagatgttgaccaaggtggagaagaatcacgaaaaggagaagtcacagcacctagaaggcagcgcctcctcttcactctcctctgattagatgaaactgttaccttaccctaaacacagtatttctttttaacttttttatttgtaaactaataaaggtaatcacagccaccaacattccaagctaccctgggtacctttgtgcagtagaagctagtgagcatgtgagcaagcggtgtgcacacggagactcatcgttataatttactatctgccaagagtagaaagaaaggctggggatatttgggttggcttggttttgattttttgcttgtttgtttgttttgtactaaaacagtattatcttttgaatatcgtagggacataagtatatacatgttatccaatcaagatggctagaatggtgcctttctgagtgtctaaaacttgacacccctggtaaatctttcaacacacttccactgcctgcgtaatgaagttttgattcatttttaaccactggaatttttcaatgccgtcattttcagttagatgattttgcactttgagattaaaatgccatgtctatttgattagtcttatttttttatttttacaggcttatcagtctcactgttggctgtcattgtgacaaagtcaaataaacccccaaggacgacacacagtatggatcacatattgtttgacattaagcttttgccagaaaatgttgcatgtgttttacctcgacttgctaaaatcgattagcagaaaggcatggctaataatgttggtggtgaaaataaataaataagtaaacaaaa

SEQ ID NO: 184909 - DNA, 4697 bp, Artificial Sequence
  derived and/or modified sequence
gtgatgataataatacgcgggcttatataaccgtcttcatcttgcgagcacttcgcagaccgtcgctaatgaatcttggggccggtgtcgggccggggcggcttgatcggcaactaggaaaccccaggcgcagaggccaggagcgagggcagcgaggatcagaggccaggccttcccggctgccggcgctcctcggaggtcagggcagatgaggaacatgactctcccccttcggaggaggaaggaagtcccgctgccaccttatctctgctcctctgcctcctccctgttcccagagctttttctctagagaagattttgaaggcggcttttgtgctgacggccacccaccatcatctaaagaagataaacttggcaaatgacatgcaggttcttcaaggcagaataattgcagaaaatcttcaaaggaccctatctgcagatgttctgaatacctctgagaatagagattgattattcaaccaggatacctaattcaagaactccagaaatcaggagacggagacattttgtcagttttgcaacattggaccaaatacaatgaagtattcttgctgtgctctggttttggctgtcctgggcacagaattgctgggaagcctctgttcgactgtcagatccccgaggttcagaggacggatacagcaggaacgaaaaaacatccgacccaacattattcttgtgcttaccgatgatcaagatgtggagctggggtccctgcaagtcatgaacaaaacgagaaagattatggaacatgggggggccaccttcatcaatgcctttgtgactacacccatgtgctgcccgtcacggtcctccatgctcaccgggaagtatgtgcacaatcacaatgtctacaccaacaacgagaactgctcttccccctcgtggcaggccatgcatgagcctcggacttttgctgtatatcttaacaacactggctacagaacagccttttttggaaaatacctcaatgaatataatggcagctacatcccccctgggtggcgagaatggcttggattaatcaagaattctcgcttctataattacactgtttgtcgcaatggcatcaaagaaaagcatggatttgattatgcaaaggactacttcacagacttaatcactaacgagagcattaattacttcaaaatgtctaagagaatgtatccccataggcccgttatgatggtgatcagccacgctgcgccccacggccccgaggactcagccccacagttttctaaactgtaccccaatgcttcccaacacataactcctagttataactatgcaccaaatatggataaacactggattatgcagtacacaggaccaatgctgcccatccacatggaatttacaaacattctacagcgcaaaaggctccagactttgatgtcagtggatgattctgtggagaggctgtataacatgctcgtggagacgggggagctggagaatacttacatcatttacaccgccgaccatggttaccatattgggcagtttggactggtcaaggggaaatccatgccatatgactttgatattcgtgtgcctttttttattcgtggtccaagtgtagaaccaggatcaatagtcccacagatcgttctcaacattgacttggcccccacgatcctggatattgctgggctcgacacacctcctgatgtggacggcaagtctgtcctcaaacttctggacccagaaaagccaggtaacaggtttcgaacaaacaagaaggccaaaatttggcgtgatacattcctagtggaaagaggcaaatttctacgtaagaaggaagaatccagcaagaatatccaacagtcaaatcacttgcccaaatatgaacgggtcaaagaactatgccagcaggccaggtaccagacagcctgtgaacaaccggggcagaagtggcaatgcattgaggatacatctggcaagcttcgaattcacaagtgtaaaggacccagtgacctgctcacagtccggcagagcacgcggaacctctacgctcgcggcttccatgacaaagacaaagagtgcagttgtagggagtctggttaccgtgccagcagaagccaaagaaagagtcaacggcaattcttgagaaaccaggggactccaaagtacaagcccagatttgtccatactcggcagacacgttccttgtccgtcgaatttgaaggtgaaatatatgacataaatctggaagaagaagaagaattgcaagtgttgcaaccaagaaacattgctaagcgtcatgatgaaggccacaaggggccaagagatctccaggcttccagtggtggcaacaggggcaggatgctggcagatagcagcaacgccgtgggcccacctaccactgtccgagtgacacacaagtgttttattcttcccaatgactctatccattgtgagagagaactgtaccaatcggccagagcgtggaaggaccataaggcatacattgacaaagagattgaagctctgcaagataaaattaagaatttaagagaagtgagaggacatctgaagagaaggaagcctgaggaatgtagctgcagtaaacaaagctattacaataaagagaaaggtgtaaaaaagcaagagaaattaaagagccatcttcacccattcaaggaggctgctcaggaagtagatagcaaactgcaacttttcaaggagaacaaccgtaggaggaagaaggagaggaaggagaagagacggcagaggaagggggaagagtgcagcctgcctggcctcacttgcttcacgcatgacaacaaccactggcagacagccccgttctggaacctgggatctttctgtgcttgcacgagttctaacaataacacctactggtgtttgcgtacagttaatgagacgcataattttcttttctgtgagtttgctactggctttttggagtattttgatatgaatacagatccttatcagctcacaaatacagtgcacacggtagaacgaggcattttgaatcagctacacgtacaactaatggagctcagaagctgtcaaggatataagcagtgcaacccaagacctaagaatcttgatgttggaaataaagatggaggaagctatgacctacacagaggacagttatgggatggatgggaaggttaatcagccccgtctcactgcagacatcaactggcaaggcctagaggagctacacagtgtgaatgaaaacatctatgagtacagacaaaactacagacttagtctggtggactggactaattacttgaaggatttagatagagtatttgcactgctgaagagtcactatgagcaaaataaaacaaataagactcaaactgctcaaagtgacgggttcttggttgtctctgctgagcacgctgtgtcaatggagatggcctctgctgactcagatgaagacccaaggcataaggttgggaaaacacctcatttgaccttgccagctgaccttcaaaccctgcatttgaaccgaccaacattaagtccagagagtaaacttgaatggaataacgacattccagaagttaatcatttgaattctgaacactggagaaaaaccgaaaaatggacggggcatgaagagactaatcatctggaaaccgatttcagtggcgatggcatgacagagctagagctcgggcccagccccaggctgcagcccattcgcaggcacccgaaagaacttccccagtatggtggtcctggaaaggacatttttgaagatcaactatatcttcctgtgcattccgatggaatttcagttcatcagatgttcaccatggccaccgcagaacaccgaagtaattccagcatagcggggaagatgttgaccaaggtggagaagaatcacgaaaaggagaagtcacagcacctagaaggcagcgcctcctcttcactctcctctgattagatgaaactgttaccttaccctaaacacagtatttctttttaacttttttatttgtaaactaataaaggtaatcacagccaccaacattccaagctaccctgggtacctttgtgcagtagaagctagtgagcatgtgagcaagcggtgtgcacacggagactcatcgttataatttactatctgccaagagtagaaagaaaggctggggatatttgggttggcttggttttgattttttgcttgtttgtttgttttgtactaaaacagtattatcttttgaatatcgtagggacataagtatatacatgttatccaatcaagatggctagaatggtgcctttctgagtgtctaaaacttgacacccctggtaaatctttcaacacacttccactgcctgcgtaatgaagttttgattcatttttaaccactggaatttttcaatgccgtcattttcagttagatgattttgcactttgagattaaaatgccatgtctatttgattagtcttatttttttatttttacaggcttatcagtctcactgttggctgtcattgtgacaaagtcaaataaacccccaaggacgacacacagtatggatcacatattgtttgacattaagcttttgccagaaaatgttgcatgtgttttacctcgacttgctaaaatcgattagcagaaaggcatggctaataatgttggtggtgaaaataaataaataagtaaacaaaa

SEQ ID NO: 184910 - DNA, 5551 bp, Artificial Sequence
  derived and/or modified sequence
aggttacttgactgggagttctcagacctccagtttcagccctgccctcagcctccaatccgtaagagacacccagccccagcaattggattgggcagcccgtcttgacacaccactgtgctgagtgcttgaggacgtgtttcaacagatggttggggttagtgtgtgtcatcacattcgagtggggattaagagaaggaaggctgccttgctggagctgtgtggtcttctccaagtgagagtcgcaggcaatagaactactttgcttttggaggaaaaggaggaattcattttcagcagacacaagaaaagcagtttttttttcaggtgctgacggccacccaccatcatctaaagaagataaacttggcaaatgacatgcaggttcttcaaggcagaataattgcagaaaatcttcaaaggaccctatctgcagatgttctgaatacctctgagaatagagattgattattcaaccaggatacctaattcaagaactccagaaatcaggagacggagacattttgtcagttttgcaacattggaccaaatacaatgaagtattcttgctgtgctctggttttggctgtcctgggcacagaattgctgggaagcctctgttcgactgtcagatccccgaggttcagaggacggatacagcaggaacgaaaaaacatccgacccaacattattcttgtgcttaccgatgatcaagatgtggagctggggtccctgcaagtcatgaacaaaacgagaaagattatggaacatgggggggccaccttcatcaatgcctttgtgactacacccatgtgctgcccgtcacggtcctccatgctcaccgggaagtatgtgcacaatcacaatgtctacaccaacaacgagaactgctcttccccctcgtggcaggccatgcatgagcctcggacttttgctgtatatcttaacaacactggctacagaacagccttttttggaaaatacctcaatgaatataatggcagctacatcccccctgggtggcgagaatggcttggattaatcaagaattctcgcttctataattacactgtttgtcgcaatggcatcaaagaaaagcatggatttgattatgcaaaggactacttcacagacttaatcactaacgagagcattaattacttcaaaatgtctaagagaatgtatccccataggcccgttatgatggtgatcagccacgctgcgccccacggccccgaggactcagccccacagttttctaaactgtaccccaatgcttcccaacacataactcctagttataactatgcaccaaatatggataaacactggattatgcagtacacaggaccaatgctgcccatccacatggaatttacaaacattctacagcgcaaaaggctccagactttgatgtcagtggatgattctgtggagaggctgtataacatgctcgtggagacgggggagctggagaatacttacatcatttacaccgccgaccatggttaccatattgggcagtttggactggtcaaggggaaatccatgccatatgactttgatattcgtgtgcctttttttattcgtggtccaagtgtagaaccaggatcaatagtcccacagatcgttctcaacattgacttggcccccacgatcctggatattgctgggctcgacacacctcctgatgtggacggcaagtctgtcctcaaacttctggacccagaaaagccaggtaacaggtttcgaacaaacaagaaggccaaaatttggcgtgatacattcctagtggaaagaggcaaatttctacgtaagaaggaagaatccagcaagaatatccaacagtcaaatcacttgcccaaatatgaacgggtcaaagaactatgccagcaggccaggtaccagacagcctgtgaacaaccggggcagaagtggcaatgcattgaggatacatctggcaagcttcgaattcacaagtgtaaaggacccagtgacctgctcacagtccggcagagcacgcggaacctctacgctcgcggcttccatgacaaagacaaagagtgcagttgtagggagtctggttaccgtgccagcagaagccaaagaaagagtcaacggcaattcttgagaaaccaggggactccaaagtacaagcccagatttgtccatactcggcagacacgttccttgtccgtcgaatttgaaggtgaaatatatgacataaatctggaagaagaagaagaattgcaagtgttgcaaccaagaaacattgctaagcgtcatgatgaaggccacaaggggccaagagatctccaggcttccagtggtggcaacaggggcaggatgctggcagatagcagcaacgccgtgggcccacctaccactgtccgagtgacacacaagtgttttattcttcccaatgactctatccattgtgagagagaactgtaccaatcggccagagcgtggaaggaccataaggcatacattgacaaagagattgaagctctgcaagataaaattaagaatttaagagaagtgagaggacatctgaagagaaggaagcctgaggaatgtagctgcagtaaacaaagctattacaataaagagaaaggtgtaaaaaagcaagagaaattaaagagccatcttcacccattcaaggaggctgctcaggaagtagatagcaaactgcaacttttcaaggagaacaaccgtaggaggaagaaggagaggaaggagaagagacggcagaggaagggggaagagtgcagcctgcctggcctcacttgcttcacgcatgacaacaaccactggcagacagccccgttctggaacctgggatctttctgtgcttgcacgagttctaacaataacacctactggtgtttgcgtacagttaatgagacgcataattttcttttctgtgagtttgctactggctttttggagtattttgatatgaatacagatccttatcagctcacaaatacagtgcacacggtagaacgaggcattttgaatcagctacacgtacaactaatggagctcagaagctgtcaaggatataagcagtgcaacccaagacctaagaatcttgatgttggaaataaagatggaggaagctatgacctacacagaggacagttatgggatggatgggaaggttaatcagccccgtctcactgcagacatcaactggcaaggcctagaggagctacacagtgtgaatgaaaacatctatgagtacagacaaaactacagacttagtctggtggactggactaattacttgaaggatttagatagagtatttgcactgctgaagagtcactatgagcaaaataaaacaaataagactcaaactgctcaaagtgacgggttcttggttgtctctgctgagcacgctgtgtcaatggagatggcctctgctgactcagatgaagacccaaggcataaggttgggaaaacacctcatttgaccttgccagctgaccttcaaaccctgcatttgaaccgaccaacattaagtccagagagtaaacttgaatggaataacgacattccagaagttaatcatttgaattctgaacactggagaaaaaccgaaaaatggacggggcatgaagagactaatcatctggaaaccgatttcagtggcgatggcatgacagagctagagctcgggcccagccccaggctgcagcccattcgcaggcacccgaaagaacttccccagtatggtggtcctggaaaggacatttttgaagatcaactatatcttcctgtgcattccgatggaatttcagttcatcagatgttcaccatggccaccgcagaacaccgaagtaattccagcatagcggggaagatgttgaccaaggtggagaagaatcacgaaaaggagaagtcacagcacctagaaggcagcgcctcctcttcactctcctctgattagatgaaactgttaccttaccctaaacacagtatttctttttaacttttttatttgtaaactaataaaggtaatcacagccaccaacattccaagctaccctgggtacctttgtgcagtagaagctagtgagcatgtgagcaagcggtgtgcacacggagactcatcgttataatttactatctgccaagagtagaaagaaaggctggggatatttgggttggcttggttttgattttttgcttgtttgtttgttttgtactaaaacagtattatcttttgaatatcgtagggacataagtatatacatgttatccaatcaagatggctagaatggtgcctttctgagtgtctaaaacttgacacccctggtaaatctttcaacacacttccactgcctgcgtaatgaagttttgattcatttttaaccactggaatttttcaatgccgtcattttcagttagatgattttgcactttgagattaaaatgccatgtctatttgattagtcttatttttttatttttacaggcttatcagtctcactgttggctgtcattgtgacaaagtcaaataaacccccaaggacgacacacagtatggatcacatattgtttgacattaagcttttgccagaaaatgttgcatgtgttttacctcgacttgctaaaatcgattagcagaaaggcatggctaataatgttggtggtgaaaataaataaataagtaaacaaaatgaagattgcctgctctctctgtgcctagcctcaaagcgttcatcatacatcatacctttaagattgctatattttgggttattttcttgacaggagaaaaagatctaaagatcttttattttcatcttttttggttttcttggcatgactaagaagcttaaatgttgataaaatatgactagttttgaatttacaccaagaacttctcaataaaagaaaatcatgaatgctccacaatttcaacataccacaagagaagttaatttcttaacattgtgttctatgattatttgtaagaccttcaccaagttctgatatcttttaaagacatagttcaaaattgcttttgaaaatctgtattcttgaaaatatccttgttgtgtattaggtttttaaataccagctaaaggattacctcactgagtcatcagtaccctcctattcagctccccaagatgatgtgtttttgcttaccctaagagaggttttcttcttatttttagataattcaagtgcttagataaattatgttttctttaagtgtttatggtaaactcttttaaagaaaatttaatatgttatagctgaatctttttggtaactttaaatctttatcatagactctgtacatatgttcaaattagctgcttgcctgatgtgtgtatcatcggtgggatgacagaacaaacatatttatgatcatgaataatgtgctttgtaaaaagatttcaagttattaggaagcatactctgttttttaatcatgtataatattccatgatacttttatagaacaattctggcttcaggaaagtctagaagcaatatttcttcaaataaaaggtgtttaaactttttt

SEQ ID NO: 184911 - protein, 1125 aa, Artificial Sequence
  derived and/or modified sequence
MASEEASLRALESLMTEFFHDCTTNERKREIEELLNNFAQQIGAWRFCLYFLSSTRNDYVMMYSLTVFENLINKMWLGVPSQDKMEIRSCLPKLLLAHHKTLPYFIRNKLCKVIVDIGRQDWPMFYHDFFTNILQLIQSPVTTPLGLIMLKTTSEELACPREDLSVARKEELRKLLLDQVQTVLGLLTGILETVWDKHSVTAATPPPSPTSGESGDLLSNLLQSPSSAKLLNQPIPILDVESEYICSLALECLAHLFSWIPLSASITPSLLTTIFHFARFGCDIRARKMASVNGSSQNCVSGQERGRLGVLAMSCINELMSKNCVPMEFEEYLLRMFQQTFYLLQKITKDNNAHTVKSRLEELDESYIEKFTDFLRLFVSVHLRRIESYSQFPVVEFLTLLFKYTFHQPTHEGYFSCLDIWTLFLDYLTSKIKSRLGDKEAVLNRYEDALVLLLTEVLNRIQFRYNQAQLEELDDETLDDDQQTEWQRYLRQSLEVVAKVMELLPTHAFSTLFPVLQDNLEVYLGLQQFIVTSGSGHRLNITAENDCRRLHCSLRDLSSLLQAVGRLAEYFIGDVFAARFNDALTVVERLVKVTLYGSQIKLYNIETAVPSVLKPDLIDVHAQSLAALQAYSHWLAQYCSEVHRQNTQQFVTLISTTMDAITPLISTKVQDKLLLSACHLLVSLATTVRPVFLISIPAVQKVFNRITDASALRLVDKAQVLVCRALSNILLLPWPNLPENEQQWPVRSINHASLISALSRDYRNLKPSAVAPQRKMPLDDTKLIIHQTLSVLEDIVENISGESTKSRQICYQSLQESVQVSLALFPAFIHQSDVTDEMLSFFLTLFRGLRVQMGVPFTEQIIQTFLNMFTREQLAESILHEGSTGCRVVEKFLKILQVVVQEPGQVFKPFLPSIIALCMEQVYPIIAERPSPDVKAELFELLFRTLHHNWRYFFKSTVLASVQRGIAEEQMENEPQFSAIMQAFGQSFLQPDIHLFKQNLFYLETLNTKQKLYHKKIFRTAMLFQFVNVLLQVLVHKSHDLLQEEIGIAIYNMASVDFDGFFAAFLPEFLTSCDGVDANQKSVLGRNFKMDRDLPSFTQNVHRLVNDLRYYRLCNDSLPPGTVKL

SEQ ID NO: 184912 - protein, 1111 aa, Artificial Sequence
  derived and/or modified sequence
MTEFFHDCTTNERKREIEELLNNFAQQIGAWRFCLYFLSSTRNDYVMMYSLTVFENLINKMWLGVPSQDKMEIRSCLPKLLLAHHKTLPYFIRNKLCKVIVDIGRQDWPMFYHDFFTNILQLIQSPVTTPLGLIMLKTTSEELACPREDLSVARKEELRKLLLDQVQTVLGLLTGILETVWDKHSVTAATPPPSPTSGESGDLLSNLLQSPSSAKLLNQPIPILDVESEYICSLALECLAHLFSWIPLSASITPSLLTTIFHFARFGCDIRARKMASVNGSSQNCVSGQERGRLGVLAMSCINELMSKNCVPMEFEEYLLRMFQQTFYLLQKITKDNNAHTVKSRLEELDESYIEKFTDFLRLFVSVHLRRIESYSQFPVVEFLTLLFKYTFHQPTHEGYFSCLDIWTLFLDYLTSKIKSRLGDKEAVLNRYEDALVLLLTEVLNRIQFRYNQAQLEELDDETLDDDQQTEWQRYLRQSLEVVAKVMELLPTHAFSTLFPVLQDNLEVYLGLQQFIVTSGSGHRLNITAENDCRRLHCSLRDLSSLLQAVGRLAEYFIGDVFAARFNDALTVVERLVKVTLYGSQIKLYNIETAVPSVLKPDLIDVHAQSLAALQAYSHWLAQYCSEVHRQNTQQFVTLISTTMDAITPLISTKVQDKLLLSACHLLVSLATTVRPVFLISIPAVQKVFNRITDASALRLVDKAQVLVCRALSNILLLPWPNLPENEQQWPVRSINHASLISALSRDYRNLKPSAVAPQRKMPLDDTKLIIHQTLSVLEDIVENISGESTKSRQICYQSLQESVQVSLALFPAFIHQSDVTDEMLSFFLTLFRGLRVQMGVPFTEQIIQTFLNMFTREQLAESILHEGSTGCRVVEKFLKILQVVVQEPGQVFKPFLPSIIALCMEQVYPIIAERPSPDVKAELFELLFRTLHHNWRYFFKSTVLASVQRGIAEEQMENEPQFSAIMQAFGQSFLQPDIHLFKQNLFYLETLNTKQKLYHKKIFRTAMLFQFVNVLLQVLVHKSHDLLQEEIGIAIYNMASVDFDGFFAAFLPEFLTSCDGVDANQKSVLGRNFKMDRDLPSFTQNVHRLVNDLRYYRLCNDSLPPGTVKL

SEQ ID NO: 184913 - DNA, 4422 bp, Artificial Sequence
  derived and/or modified sequence
ggcagtggccgtgtgggttgaggctgcgaggacagcgcgggcccccgggcctctcccctgagccggccgcctgggccgcgcggtcgaggcctgtcagcctccgcccgttcagcctcggggccggggccgccgccacctctgcccgcggaggccggggagcccctgcctgggcccgcagcctcccccgcgggggtcgggcccgggcgggggtcccgagcagctgccctcctcgccggcatccgagcctcatttcctgctttttcagtttccttggggaggggcgggtgggtctggatgaattgtctcggggtcccccgatgaggcgacccgggcggccctgccctttttagagggtcccctcggggcccggtggggaaggggttgtctttgcatgggtgggggacttcccgagtctgccgggaccatgacctgaactgtgcgagcgggacgtgtccgaagcccaagaaccagctcatctgagccgccccctccccggccagcatggcatctgaagaagcctctctcagggcattggaaagtctgatgacagaattttttcacgattgtacaaccaatgaaagaaaacgtgagatagaggagcttcttaataactttgcccagcaaataggagcctggagattctgcctgtactttctctccagcactaggaatgactatgtaatgatgtacagtttaacagtttttgagaatctgatcaataaaatgtggcttggggtcccatctcaggataagatggaaatccgtagctgtctgcccaaactccttttggctcaccataaaaccttaccttactttatccggaacaagctctgcaaagttattgttgatattggacgtcaggattggcccatgttctaccacgacttttttactaacattttacagttgatccagtcccctgtgacaaccccccttgggctgatcatgttgaagacaacttcagaagagctggcttgtccccgtgaggacctcagtgtggctcggaaggaggagttgcggaagctgctactggaccaggtgcagacagtgcttgggctactgacaggtatcttggagactgtctgggacaaacacagtgttactgctgccactccaccaccatccccgacctcaggagaaagtggtgacttactgagtaacctgttgcagagtcccagttcagccaaactgttgaatcagccaattcccatccttgatgtggagagtgagtatatctgttccctggctttggagtgcctggcccatctcttcagttggattcctctgtctgccagcatcaccccatccctccttaccaccatcttccactttgcacgatttggctgtgacatccgggccagaaagatggcgtcagttaacggcagcagccagaactgtgtctcgggtcaggagcgcggccggctgggggtcctggccatgtcctgcatcaatgaactcatgtccaagaactgtgtgcctatggaatttgaggagtatttactgcgtatgttccagcagactttctacctcctgcagaaaatcaccaaggataacaatgcccacacagtgaagagcaggctagaagagctcgatgagagctatatcgagaagtttactgactttcttcggctctttgtgagtgttcacctaagaagaatcgagtcttactcccagttccctgtggtggagtttttgacacttttgttcaagtacacatttcatcagcctactcatgaaggttacttctcttgtttggatatctggacgctgtttttggactatctgacaagtaaaattaaaagtcgtcttggagacaaggaagcagttctcaacaggtacgaagatgccctggtgctcctgctcacagaggtgttgaatcgaatccagttcagatacaaccaagcccagctggaggagttggatgatgagactctggatgacgatcagcagacggagtggcagcggtacttacggcagagcttggaggtggtggccaaagtgatggagctcctgcccacgcacgccttctccacactgttccctgttcttcaggacaatttagaagtttatttgggattacaacagtttatagtcacttcagggtcaggacacaggttgaacatcacggcggagaacgactgccggcggctgcactgctccctgagagacttgagctccctgctgcaggccgtgggccgcctggccgagtactttatcggggatgtgtttgctgcacggttcaatgatgccctcacagtcgtggaaaggttggtcaaagtcactctgtacggatctcagataaaattgtacaacattgaaactgctgtgccatcagtattgaaacctgacctcattgatgtgcatgctcagtccctggctgcgctgcaggcttactctcactggttagcacagtattgcagtgaagttcaccggcagaacacgcagcagttcgtgacactcatctctactaccatggatgcaatcacacctctaatcagcaccaaggtccaagacaagctgctgctatctgcgtgccacttactggtctcactggccaccaccgtgcggcccgtctttctgatcagcatccctgcagtgcagaaagtattcaacagaatcactgatgcctctgccctgcgacttgtcgataaggcccaggtgttggtgtgccgagccctctctaacatcttgctgcttccgtggccaaaccttccagagaatgagcagcagtggcccgtgcgctccatcaaccacgccagcctcatctctgcactctcccgggactatcgcaacctgaagcccagtgctgttgccccacagagaaagatgccactggatgacaccaaactgattatccaccagacactcagcgtcttagaagatattgtggagaatatctcgggggagtccaccaagtctcgacagatttgctaccagtcgctgcaggaatctgttcaggtctccctggccctctttccagcttttatccatcagtcagatgtgactgatgagatgctgagcttcttcctcactctgtttcgaggccttagagtacagatgggtgtgcctttcactgagcaaatcatacagactttcctcaacatgtttaccagagagcagttagccgagagcatcctccacgagggcagcacaggctgccgggtggtggagaagtttctgaagatcctgcaggtggtggtccaggagccaggccaggtgttcaagcccttcctccccagcatcatcgccctgtgcatggagcaagtgtatcccatcattgccgagcgtccctcccctgatgtgaaggccgagctgtttgagctccttttccggacgctccatcacaactggaggtacttcttcaagtccaccgtgctggccagtgtccagagggggatcgctgaggagcagatggagaatgagccccagttcagtgccatcatgcaggctttcggacagtcctttctccagcccgacatccacctttttaaacaaaatctcttctacttggagactctcaacaccaagcagaagctgtaccacaagaagatcttccggactgccatgctgttccagtttgtgaacgtgctgctccaggtcctggtccacaagtcccatgatcttctgcaggaggagattggcatcgccatctacaacatggcctcagtcgactttgatggcttctttgccgccttcctcccagagttcctgaccagctgtgatggtgtggatgccaaccagaaaagtgtgctggggcggaatttcaagatggatcgggacctgccctcattcacccagaatgtgcacaggctggtcaacgacctgcgctactacagactctgcaacgacagcctgccccctggcactgtgaagctctaggcctgctactgcctggggacacggacttctgctgctgccacctgcgccagccctaccttccaccacagatgtctcccagatgggccttggtcacactccttggcttctcccaccgcaagcaacgctgcctgcctctgccgctcctccacatcttgccgctgcccagcagagctggcttctgggtccacctgagcactggacggtgctcccagggcgttggagcaggcggaggggtgtgtggccaggtactaggaggcaccaggaaatcccgcggggtggcccatgcagaccaggcgcacgtggctcatggggcagaattgccaaggacagctcacgacagtgccaccttctcaccattccagccaaggagagatgtgacgttggaactgctctggcacttctgtcaagcctcccccgccccaattgccttgagatctctgctctttgtcagagatttgcaaagactcacgtttttgttgttttctcatcattccattgtgatactaagaaactaagaagcttaatgaaaagaaataaaatgcc

SEQ ID NO: 184914 - DNA, 4255 bp, Artificial Sequence
  derived and/or modified sequence
gaggcgacccgggcggccctgccctttttagagggtcccctcggggcccggtggggaaggggttgtctttgcatgggtgggggacttcccgagtctgccgggaccatgacctgaactgtgcgagcgggacgtgtccgaagcccaagaaccagctcatctgagccgccccctccccggccagcatggtagctcatgtaagtggagtcatgaagtatttggcctgttgtgactgccttatttcacatggcacagtgttctcaagcttcatccgtgtggtggcgtgtgtcagagcttccttccttttgaaagctgaattccattgcatctgaagaagcctctctcagggcattggaaagtctgatgacagaattttttcacgattgtacaaccaatgaaagaaaacgtgagatagaggagcttcttaataactttgcccagcaaataggagcctggagattctgcctgtactttctctccagcactaggaatgactatgtaatgatgtacagtttaacagtttttgagaatctgatcaataaaatgtggcttggggtcccatctcaggataagatggaaatccgtagctgtctgcccaaactccttttggctcaccataaaaccttaccttactttatccggaacaagctctgcaaagttattgttgatattggacgtcaggattggcccatgttctaccacgacttttttactaacattttacagttgatccagtcccctgtgacaaccccccttgggctgatcatgttgaagacaacttcagaagagctggcttgtccccgtgaggacctcagtgtggctcggaaggaggagttgcggaagctgctactggaccaggtgcagacagtgcttgggctactgacaggtatcttggagactgtctgggacaaacacagtgttactgctgccactccaccaccatccccgacctcaggagaaagtggtgacttactgagtaacctgttgcagagtcccagttcagccaaactgttgaatcagccaattcccatccttgatgtggagagtgagtatatctgttccctggctttggagtgcctggcccatctcttcagttggattcctctgtctgccagcatcaccccatccctccttaccaccatcttccactttgcacgatttggctgtgacatccgggccagaaagatggcgtcagttaacggcagcagccagaactgtgtctcgggtcaggagcgcggccggctgggggtcctggccatgtcctgcatcaatgaactcatgtccaagaactgtgtgcctatggaatttgaggagtatttactgcgtatgttccagcagactttctacctcctgcagaaaatcaccaaggataacaatgcccacacagtgaagagcaggctagaagagctcgatgagagctatatcgagaagtttactgactttcttcggctctttgtgagtgttcacctaagaagaatcgagtcttactcccagttccctgtggtggagtttttgacacttttgttcaagtacacatttcatcagcctactcatgaaggttacttctcttgtttggatatctggacgctgtttttggactatctgacaagtaaaattaaaagtcgtcttggagacaaggaagcagttctcaacaggtacgaagatgccctggtgctcctgctcacagaggtgttgaatcgaatccagttcagatacaaccaagcccagctggaggagttggatgatgagactctggatgacgatcagcagacggagtggcagcggtacttacggcagagcttggaggtggtggccaaagtgatggagctcctgcccacgcacgccttctccacactgttccctgttcttcaggacaatttagaagtttatttgggattacaacagtttatagtcacttcagggtcaggacacaggttgaacatcacggcggagaacgactgccggcggctgcactgctccctgagagacttgagctccctgctgcaggccgtgggccgcctggccgagtactttatcggggatgtgtttgctgcacggttcaatgatgccctcacagtcgtggaaaggttggtcaaagtcactctgtacggatctcagataaaattgtacaacattgaaactgctgtgccatcagtattgaaacctgacctcattgatgtgcatgctcagtccctggctgcgctgcaggcttactctcactggttagcacagtattgcagtgaagttcaccggcagaacacgcagcagttcgtgacactcatctctactaccatggatgcaatcacacctctaatcagcaccaaggtccaagacaagctgctgctatctgcgtgccacttactggtctcactggccaccaccgtgcggcccgtctttctgatcagcatccctgcagtgcagaaagtattcaacagaatcactgatgcctctgccctgcgacttgtcgataaggcccaggtgttggtgtgccgagccctctctaacatcttgctgcttccgtggccaaaccttccagagaatgagcagcagtggcccgtgcgctccatcaaccacgccagcctcatctctgcactctcccgggactatcgcaacctgaagcccagtgctgttgccccacagagaaagatgccactggatgacaccaaactgattatccaccagacactcagcgtcttagaagatattgtggagaatatctcgggggagtccaccaagtctcgacagatttgctaccagtcgctgcaggaatctgttcaggtctccctggccctctttccagcttttatccatcagtcagatgtgactgatgagatgctgagcttcttcctcactctgtttcgaggccttagagtacagatgggtgtgcctttcactgagcaaatcatacagactttcctcaacatgtttaccagagagcagttagccgagagcatcctccacgagggcagcacaggctgccgggtggtggagaagtttctgaagatcctgcaggtggtggtccaggagccaggccaggtgttcaagcccttcctccccagcatcatcgccctgtgcatggagcaagtgtatcccatcattgccgagcgtccctcccctgatgtgaaggccgagctgtttgagctccttttccggacgctccatcacaactggaggtacttcttcaagtccaccgtgctggccagtgtccagagggggatcgctgaggagcagatggagaatgagccccagttcagtgccatcatgcaggctttcggacagtcctttctccagcccgacatccacctttttaaacaaaatctcttctacttggagactctcaacaccaagcagaagctgtaccacaagaagatcttccggactgccatgctgttccagtttgtgaacgtgctgctccaggtcctggtccacaagtcccatgatcttctgcaggaggagattggcatcgccatctacaacatggcctcagtcgactttgatggcttctttgccgccttcctcccagagttcctgaccagctgtgatggtgtggatgccaaccagaaaagtgtgctggggcggaatttcaagatggatcgggacctgccctcattcacccagaatgtgcacaggctggtcaacgacctgcgctactacagactctgcaacgacagcctgccccctggcactgtgaagctctaggcctgctactgcctggggacacggacttctgctgctgccacctgcgccagccctaccttccaccacagatgtctcccagatgggccttggtcacactccttggcttctcccaccgcaagcaacgctgcctgcctctgccgctcctccacatcttgccgctgcccagcagagctggcttctgggtccacctgagcactggacggtgctcccagggcgttggagcaggcggaggggtgtgtggccaggtactaggaggcaccaggaaatcccgcggggtggcccatgcagaccaggcgcacgtggctcatggggcagaattgccaaggacagctcacgacagtgccaccttctcaccattccagccaaggagagatgtgacgttggaactgctctggcacttctgtcaagcctcccccgccccaattgccttgagatctctgctctttgtcagagatttgcaaagactcacgtttttgttgttttctcatcattccattgtgatactaagaaactaagaagcttaatgaaaagaaataaaatgcctatgttgttgttctag

SEQ ID NO: 184915 - DNA, 3378 bp, Artificial Sequence
  derived and/or modified sequence
atggctagtgaagaggctagtctcagagcccttgaatcgcttatgactgaatttttccacgactgcactacaaatgagaggaagcgcgagatagaggagctgctcaacaattttgctcagcagattggcgcatggcgtttttgtctatactttctaagctcgacaaggaatgactacgtcatgatgtacagcctgaccgtatttgaaaaccttataaacaagatgtggctgggagtaccttcccaagataagatggagatccgctcctgcctccccaaactgttactggctcatcacaaaacattaccgtacttcattcgtaacaagctgtgcaaagttatcgttgacatcgggcgccaggattggcctatgttctaccatgactttttcaccaacatacttcagctcatacaaagcccagtgactactcccctgggtctgatcatgctgaagaccacatcagaggagctcgcatgcccaagggaggaccttagtgtggctagaaaggaggagctaagaaagctgttgctggaccaggtccagactgttctaggtctgctgacaggaatcctggaaaccgtctgggataagcacagtgtgacagcagcgaccccccctcccagtcctacatccggcgagagcggggatctcctctcaaacctgctccagtctccaagcagcgccaagctgttgaaccagccaatcccgatcctggacgtggaatccgagtacatctgtagcttagctttggagtgtttggcccacttgtttagctggatacctctgtccgccagcatcacaccaagtctgcttacaactatttttcatttcgcgaggttcggttgcgatattagggccagaaaaatggcgtctgtcaatggctcgagtcagaactgcgtgagcggccaggagagggggaggctgggcgtcttggctatgagctgcatcaatgaattaatgtctaaaaactgcgtccctatggaatttgaagagtatctgttgcggatgtttcagcagacattctatctacttcagaagataacgaaggacaataacgctcataccgtgaagtcccgattggaagaactcgatgaatcatacatagagaagtttaccgactttttgcgcctgttcgtgtccgtgcacttgcggagaatcgagtcgtatagccagttcccggtggtggaattcctcacattactgttcaagtacacgtttcatcagcccacgcacgagggctacttctcctgccttgatatttggacattgttccttgactacctgacctctaaaattaagagtaggctgggcgataaggaggccgtactgaaccgatacgaagatgcattagtgttactgcttacagaggtcctgaatcgcatccagttcaggtacaatcaagcgcagctggaagagcttgatgatgagacactggatgacgaccaacagaccgagtggcagcggtacctaagacagtccctggaggtggttgctaaagtcatggaattgctacctacccatgctttcagtaccctattccccgttttacaggacaacctcgaggtgtatttaggtttgcagcagtttattgtcacatccgggtccgggcatagactaaacataacagcagagaacgactgtagacggctccactgttctctgcgcgatctttcttccctgttgcaagctgtaggccgcctggctgaatatttcattggtgatgtatttgccgccagattcaatgacgcactcaccgttgtggagcgactggtgaaggtgaccctctatggaagccagatcaaattgtacaacatcgaaacagccgttccgagcgtcctcaagccagaccttatcgatgtgcatgcacagtccctggctgctctccaggcctattctcactggttggcccaatactgcagtgaggtgcatcggcagaatactcagcagttcgtgaccctgatttcaacgactatggacgccatcacacccttaatctctacaaaagtgcaagacaagctcctgttaagcgcttgccatctgttagtaagtcttgccacgacagtgcggccagtgttccttatctctataccagccgtccagaaagtgttcaaccggatcacagatgctagtgcgctaagactcgtggataaagctcaggtgctggtgtgccgagccctgtccaatatccttctcttgccatggcccaacctcccagagaacgaacagcagtggcccgttagatcaatcaaccatgctagcctgatatctgcactgtctagagactacaggaatctcaagccctctgcagttgccccccagaggaagatgcctctggacgacaccaaactgattatacaccagaccctgtcagtcctcgaggacattgtcgaaaacatttccggagagtctacaaaaagcaggcagatctgttaccagtccctgcaagagtccgtgcaagtcagcttggccctgtttcccgcatttatacatcagtctgacgtgactgacgaaatgttatccttcttcttgacactcttcaggggcttgagggtgcagatgggcgtcccttttactgagcaaattattcagaccttcctgaacatgtttacaagagaacagctggccgagtccattttgcacgaaggctccactggctgtagagtagtggagaaattcctcaaaattctccaggttgtggtgcaagagccagggcaggtattcaagcccttcctgccttctataattgcgttgtgtatggagcaggtgtatcctattatcgcggagcgcccaagtcccgacgtgaaagctgagcttttcgagttgctgtttaggacactgcatcataattggaggtattttttcaaatcaactgtcctcgcatctgtgcagcgagggattgctgaggagcagatggagaacgagccacagttttctgccataatgcaagctttcggtcagagcttcctgcaacctgacatacacctgttcaagcagaatcttttttatttagagaccttgaacacaaagcagaaattatatcacaagaaaatcttccggacagcaatgctgtttcagttcgttaacgtcctgcttcaggtcttggtccacaagagtcacgacctcctccaagaggaaattggcattgctatctacaacatggcctctgttgactttgatgggttctttgccgcatttttgcccgaatttctaacttcgtgcgatggcgtcgacgccaatcagaaaagcgttctaggaagaaacttcaagatggacagggacctgccatcattcacacagaatgtgcaccgattggtgaatgatctaagatactaccgcctgtgcaacgacagcctgccacccggaacagtcaagctttag

SEQ ID NO: 184916 - DNA, 3378 bp, Artificial Sequence
  derived and/or modified sequence
atggccagcgaggaggccagcctgcgggccctggagagcctgatgacagagttcttccatgactgcaccaccaatgaaaggaagcgggagattgaggagctgctgaacaactttgcccagcagatcggggcctggaggttctgcctgtacttcctgagcagcaccagaaatgactatgtgatgatgtacagcctgactgtgtttgaaaatctcatcaacaagatgtggctgggcgtgcccagccaggacaagatggagatccgcagctgcctgcccaagctgctgctggcccaccacaagaccctgccctacttcatccggaacaagctgtgcaaggtgattgtggacatcggccggcaggactggcccatgttctaccatgacttcttcaccaacatcctgcagctgatccagagccctgtgaccacccccctgggcctcatcatgctgaagaccaccagcgaggagctggcctgcccccgggaggacctgtctgtggccaggaaggaggagctgaggaagctgctgctggaccaggtgcagacagtgctgggcctgctgaccggcatcctggagaccgtgtgggacaagcacagcgtgacagctgccaccccaccacccagccccaccagcggggagagcggggacctgctgagcaacctgctgcagagccccagcagcgccaagctgctgaaccagcccatccccatcctggatgtggagagcgagtacatctgcagcctggccctggagtgcctggcccacctgttctcctggatccccctgagcgccagcatcacccccagcctgctgaccaccatcttccactttgcccgcttcggctgtgacatccgggccaggaagatggcctctgtgaatggcagcagccagaactgtgtgtctggccaggagcggggccgcctgggcgtgctggccatgagctgcatcaatgagctgatgagcaagaactgtgtgcccatggagtttgaggagtacctgctgaggatgttccagcagaccttctacctgctgcagaagatcaccaaggacaacaatgcccacacagtgaagagccggctggaggagctggatgagagctacatcgagaagttcacagacttcctgcggctgtttgtgtctgtgcacctgcggcgcatcgagagctacagccagtttcctgtggtggagttcctgaccctgctcttcaagtacaccttccaccagcccacccatgagggctacttcagctgcctggacatctggaccctcttcctggactacctgaccagcaagatcaagagccggctgggggacaaggaggccgtgctgaacagatatgaagatgccctggtgctgctgctgacagaggtgctgaaccgcatccagttccgctacaaccaggcccagctggaggagctggatgatgagaccctggatgatgaccagcagacagagtggcagcgctacctgcggcagagcctggaggtggtggccaaggtgatggagctgctgcccacccacgccttcagcaccctcttccctgtgctgcaggacaacctggaggtgtacctgggcctgcagcagttcatcgtgaccagcggcagcggccaccggctgaacatcacagcagaaaatgactgccggcggctgcactgcagcctgcgggacctgagcagcctgctgcaggccgtgggccgcctggccgagtacttcatcggagatgtgtttgctgcccgcttcaatgatgccctgactgtggtggagcggctggtgaaggtgaccctgtatggcagccagatcaagctgtacaacattgaaacagctgtgcccagcgtgctgaagccagacctgattgatgtgcacgcccagagcctggccgccctgcaggcctacagccactggctggcccagtactgcagcgaggtgcaccggcagaacacccagcagtttgtgaccctcatcagcaccaccatggatgccatcacccccctcatcagcaccaaggtgcaggacaagctgctgctgagcgcctgccacctgctggtgtccctggccaccaccgtgcggcctgtgttcctgatcagcatcccagctgtgcagaaggtgttcaaccgcatcacagatgccagcgccctgcggctggtggacaaggcccaggtgctggtgtgccgggccctgagcaacatcctgctgctgccctggcccaacctgcctgaaaatgagcagcagtggcctgtgcgcagcatcaaccacgccagcctcatcagcgccctgagccgggactacagaaacctgaagcccagcgctgtggccccccagaggaagatgcccctggatgacaccaagctgatcatccaccagaccctgtctgtgctggaggacatcgtggagaacatcagcggggagagcaccaagagccggcagatctgctaccagagcctgcaggagagcgtgcaggtgtccctggccctcttccctgccttcatccaccagagtgatgtgacagatgagatgctgtccttcttcctgaccctcttccggggcctgcgggtgcagatgggcgtgcccttcacagagcagatcatccagaccttcctgaacatgttcacccgggagcagctggccgagagcatcctgcacgagggcagcacaggctgccgggtggtggagaagttcctgaagatcctgcaggtggtggtgcaggagcccggccaggtgttcaagcccttcctgcccagcatcatcgccctgtgcatggagcaggtgtaccccatcatcgccgagcggcccagcccagatgtgaaggccgagctgtttgagctgctcttccgcaccctgcaccacaactggagatacttcttcaagagcacagtgctggcctctgtgcagaggggcattgctgaggagcagatggagaatgagccccagttcagcgccatcatgcaggccttcggccagagcttcctgcagcctgacatccacctgttcaagcagaacctcttctacctggagaccctgaacaccaagcagaagctgtaccacaagaagatcttcagaacagccatgctgttccagtttgtgaatgtgctgctgcaggtgctggtgcacaagagccatgacctgctgcaggaggagatcggcatcgccatctacaacatggcctctgtggactttgatggcttctttgctgccttcctgcctgagttcctgaccagctgtgatggagtggatgccaaccagaagtctgtgctgggcaggaacttcaagatggaccgggacctgcccagcttcacccagaatgtgcaccggctggtgaatgacctgcgctactaccgcctgtgcaatgacagcctgcccccaggcaccgtgaagctgtag

SEQ ID NO: 184917 - DNA, 3378 bp, Artificial Sequence
  derived and/or modified sequence
atggccagcgaggaggccagcctgcgggccctggagagcctgatgaccgagtttttccacgattgtacaacaaacgaacggaaacgcgagatagaggagttattgaataatttcgctcagcagatcggcgcctggaggttttgcctgtatttcctgagctcaacgcgtaatgactacgtaatgatgtattctttgactgtgttcgagaacctcatcaataagatgtggctcggggttccctctcaggataagatggaaattagatcctgcctacccaagctcttgcttgcgcaccacaaaactctgccttactttataagaaataaactatgcaaggttatagtggacatcgggaggcaagattggcctatgttttaccacgatttcttcaccaatattttgcagcttattcagtcacccgtaaccacacctctcggactgatcatgcttaagaccacctccgaagaattggcttgtccgcgggaagacctgtctgtcgcgcggaaggaggagctacgtaaactgctgcttgaccaggttcaaacagtcctggggctgctcactggcattctagagactgtctgggataagcatagcgtgacggctgctaccccacctccatctccaaccagcggggagtccggcgatctcttgagcaacctcttacagtccccctcttcagccaagctgttgaaccagccgattccaatactggatgtggaaagtgagtatatttgctccctggccctggagtgtctggcacacctgttcagctggattccactgagcgcgtctattactccctctcttctaacaaccatctttcacttcgcccggttcggctgtgacatcagggctcgcaagatggcttctgtgaacggcagctcacaaaactgcgtgagcggacaagaacggggccggcttggggttctggccatgagttgtatcaatgagttaatgagtaaaaattgcgtgcccatggaattcgaagagtacctccttcggatgttccaacagacattttacctcttgcaaaaaatcactaaggataacaacgctcacaccgttaaatcacgcctggaagaactggatgagtcttacattgaaaaatttaccgactttttacggttgtttgtgtccgttcatctgaggagaatcgaatcgtatagtcaatttcctgtggtcgagtttctcacactgttgttcaaatatacatttcatcagccgacccatgaggggtacttttcatgtctagacatatggacactgtttctggactacctgacttcaaaaattaaatcccgcctgggggataaagaagccgtgttgaacagatacgaagacgccctggtattactcttgaccgaggtgcttaatcgtatacagttccgttacaaccaagcccaactcgaggaattggacgacgagactctggacgacgatcagcagacagagtggcaaaggtacctgaggcagagcctcgaggtggtggccaaagtgatggagctcttgcccactcacgccttctccacccttttccctgtgctccaagacaacctcgaagtgtacctgggcttacagcagttcatcgtcacgagtgggagtggccacagacttaatattaccgctgagaacgactgcagaagactgcattgtagccttagggacctctcatcgctccttcaggccgtgggccgactggcagagtactttatcggcgacgtctttgccgccaggttcaatgacgcgctgacagtagtcgagcgcctagtcaaagtgaccttgtacggcagccaaattaagctgtacaacattgaaaccgctgtgcctagcgtcctgaagcctgacctgattgacgtgcacgcacagtccttagccgctctgcaagcatactcacactggttggcacagtactgctcagaggtacacagacagaatacccagcagtttgtcaccctgattagtactacaatggatgccatcacccccctcattagtactaaggttcaggacaagttgctgctgagcgcctgccaccttctcgtgtcgctggcaactacggtgcggccggtgtttctcatttcaatcccagcggtgcagaaagtatttaaccggataactgacgcctccgcactgcgcctcgtcgataaggcccaggtgctggtgtgccgcgctctgtccaatattctactcctcccatggcctaacctgcctgagaatgagcaacaatggccagttcgctcgattaaccacgcaagtctcatatcagctctgtcgcgggattatagaaatctaaaacccagcgcagttgcccctcagcgaaagatgccgctcgacgacacaaaacttataatccaccagaccctgtcagtgctagaagacatcgttgagaatatctccggggagtctaccaaatctagacagatctgctaccaatcattgcaggagtccgtgcaagtcagtctagctctcttcccagcctttattcaccagagtgacgtaactgacgagatgctcagcttttttctgactctgttccggggcctgcgcgtgcaaatgggcgtgccgttcacagagcagattatccagacctttttgaacatgtttactcgggagcagctggccgaatccattctgcacgagggatctaccggttgtagagtggtggaaaagttcttgaagattctgcaggttgtcgtacaggaaccaggccaggtgttcaagccgtttctgccttccatcatcgccctgtgtatggagcaagtctatcctatcatcgccgagcgaccatccccagatgtgaaagccgaactttttgagctgctctttcgtactttgcaccataattggaggtacttcttcaagagtacggtgttggctagtgtgcaaagagggattgctgaggaacagatggagaacgagccccagtttagcgccattatgcaagctttcggacagtcttttcttcaacctgatatccacttatttaaacaaaacttgttctacctggagaccctgaataccaagcagaagctctatcacaagaagatcttccgaaccgcaatgctatttcagtttgtgaacgtcctcctccaggttctcgtgcacaagagccacgatctactccaggaggaaatcggaattgctatctataatatggcctccgtagacttcgatggtttcttcgctgcctttctgcctgagtttctcacgagctgcgacggtgtggacgctaatcaaaagagcgtgctcggacggaattttaagatggacagagatctcccttcttttactcagaatgtccacagattagtgaacgacctgcgatactaccgcctttgcaacgattccctgccacctggaacagttaaactatag

SEQ ID NO: 184918 - DNA, 3378 bp, Artificial Sequence
  derived and/or modified sequence
atggcgagcgaagaagcctccttacgggctctggaaagcctcatgacagagttttttcatgactgtacaacaaatgagcggaagcgtgagatcgaagaattactgaataatttcgcacagcagattggcgcttggcggttttgtctatatttcttgtcttccaccaggaacgactatgttatgatgtattcgcttacagtctttgaaaatctgattaacaaaatgtggctgggggtgcctagccaggataagatggaaattagatcctgccttcctaagctcctgcttgcccatcataaaacattgccttactttattagaaataaactctgtaaggtaatagttgatatcgggaggcaggattggcccatgttttaccatgactttttcactaacattctgcaattgattcagtctcccgtcaccaccccgctgggactaatcatgttaaagacaacgagcgaggagctagcttgcccgagggaagacctctccgtggccagaaaggaggagctccgaaagctgctcttggaccaggtgcagaccgtcctgggactccttaccggcatattggaaacagtttgggacaaacatagtgtcaccgccgcaacccccccaccatcaccaacgagcggagaaagtggcgacttgttaagcaacttactgcaaagcccatcgagtgcgaagttgcttaatcaacccatccccatactggacgtggagtccgagtatatttgttctctggctctcgagtgcttagcccacttgttctcgtggatcccattgagtgcatcgatcactccttctctcttgactacaatctttcactttgccaggtttgggtgcgacatacgtgccaggaaaatggcttcagtgaacggaagcagccagaattgtgttagtggtcaagaacgtggcagacttggagtgttagccatgtcttgcattaacgaacttatgtcgaaaaattgcgttcccatggaatttgaagaatacctgctgcgtatgtttcagcagaccttctacctgttgcagaagatcactaaggataacaatgctcataccgtgaagagtcgcctggaggaactcgacgaatcttacattgaaaagtttaccgacttcctgagattatttgtgtctgtgcaccttaggcgtattgaaagctacagccaattcccagtcgtagagtttcttacattgcttttcaaatacacatttcatcagccaacgcacgagggatacttctcctgcttggacatatggacactgttccttgattatctcacttccaaaatcaagtccaggctcggtgacaaagaggcagtgcttaatcggtatgaggatgcgctcgtgttattattgacagaggtgctgaacaggattcagtttagatacaatcaggctcagctagaagagctagacgacgagacgctggacgatgatcagcagacagagtggcaaagatatctccgtcagtctctggaggttgtcgctaaagtaatggaactcctaccaacacacgcgttttcaacactgttcccagtcctgcaggataacctggaagtatacttaggcctccagcaatttatcgtgacttcagggagtggacacagactcaacatcaccgctgaaaatgactgccgcaggctgcattgctcactccgtgatctcagcagtctgctgcaggcagtgggacgccttgccgagtactttattggcgatgtgttcgccgctaggttcaatgatgcactgaccgtcgtcgaaaggctggtgaaagtgactctatacggttcgcagatcaagctctacaatatcgaaactgcagtgccaagtgtgttgaagccagatctgatcgatgtgcatgcccagagcctggccgcactgcaggcctatagccactggttggctcaatactgctccgaggtgcatcggcaaaacactcagcagtttgtcactttaatttcaactaccatggacgccattactccactgatctcaacaaaagttcaagacaagttgcttttgtccgcttgtcatttgctggtgtctctagccacaaccgttagacctgtatttctgatttcgatccctgccgttcagaaagtcttcaacagaataacagacgcctcggctctgaggttagtagacaaggcacaggttctagtctgtagggccctgtccaacatcttgctcctgccatggccaaacctaccagaaaatgagcagcagtggccagttcgctcgatcaatcatgcatcgctcatcagcgccctcagtcgggactatagaaacctgaagccgtccgcggtggctcctcaaagaaagatgcctctggatgatactaaacttataattcaccaaaccctgtccgtactggaagacatcgtagaaaatatctccggggagagtacgaaatccagacagatctgctaccagagcctccaggaatctgtgcaagtctcgctcgccctgttccctgcttttatccatcaaagtgatgtgactgacgagatgcttagtttttttttgactctgttccggggattaagagttcagatgggtgtcccttttacagagcagatcattcagacattccttaacatgtttacaagagagcaactggcggagtcgattctccatgaggggagtaccggctgccgggtggtggaaaagttcctaaagatcctgcaggtcgtggtccaagaacccggacaggtgttcaaaccatttctcccttcgatcatcgccctgtgcatggagcaggtgtacccgataattgctgagagacccagcccggatgttaaagcagaactgttcgagctgctcttccggacccttcatcataactggagatatttttttaagtctaccgtcctggcatccgtccagagaggtatagctgaagagcaaatggaaaatgaaccccaattctccgccatcatgcaggccttcggacagagctttctgcagccagacatccatctcttcaaacagaacttattctatctggaaacccttaacacgaagcagaaactctaccacaagaagatattccggactgccatgctgttccagttcgtcaacgttctcttgcaggtcctggtccacaagtcccatgacctgttacaagaagagataggcatcgccatctataatatggcctccgttgacttcgacggcttcttcgctgcatttttgcccgagtttctcacgagctgcgacggggtggacgccaatcagaaatcagtgctggggaggaacttcaaaatggatcgcgatcttccatcttttacacagaacgtgcaccggttggttaatgatctgcgttattaccgactctgcaatgatagcctgcccccaggcactgtaaagctttag

SEQ ID NO: 184919 - DNA, 3378 bp, Artificial Sequence
  derived and/or modified sequence
atggccagcgaggaggccagcctgagagccctggagagcctgatgaccgagttcttccacgactgcaccaccaacgagagaaagagagagatcgaggagctgctgaacaacttcgcccagcagatcggcgcctggagattctgcctgtacttcctgagcagcaccagaaacgactacgtgatgatgtacagcctgaccgtgttcgagaacctgatcaacaagatgtggctgggcgtgcccagccaggacaagatggagatcagaagctgcctgcccaagctgctgctggcccaccacaagaccctgccctacttcatcagaaacaagctgtgcaaggtgatcgtggacatcggcagacaggactggcccatgttctaccacgacttcttcaccaacatcctgcagctgatccagagccccgtgaccacccccctgggcctgatcatgctgaagaccaccagcgaggagctggcctgccccagagaggacctgagcgtggccagaaaggaggagctgagaaagctgctgctggaccaggtgcagaccgtgctgggcctgctgaccggcatcctggagaccgtgtgggacaagcacagcgtgaccgccgccacccccccccccagccccaccagcggcgagagcggcgacctgctgagcaacctgctgcagagccccagcagcgccaagctgctgaaccagcccatccccatcctggacgtggagagcgagtacatctgcagcctggccctggagtgcctggcccacctgttcagctggatccccctgagcgccagcatcacccccagcctgctgaccaccatcttccacttcgccagattcggctgcgacatcagagccagaaagatggccagcgtgaacggcagcagccagaactgcgtgagcggccaggagagaggcagactgggcgtgctggccatgagctgcatcaacgagctgatgagcaagaactgcgtgcccatggagttcgaggagtacctgctgagaatgttccagcagaccttctacctgctgcagaagatcaccaaggacaacaacgcccacaccgtgaagagcagactggaggagctggacgagagctacatcgagaagttcaccgacttcctgagactgttcgtgagcgtgcacctgagaagaatcgagagctacagccagttccccgtggtggagttcctgaccctgctgttcaagtacaccttccaccagcccacccacgagggctacttcagctgcctggacatctggaccctgttcctggactacctgaccagcaagatcaagagcagactgggcgacaaggaggccgtgctgaacagatacgaggacgccctggtgctgctgctgaccgaggtgctgaacagaatccagttcagatacaaccaggcccagctggaggagctggacgacgagaccctggacgacgaccagcagaccgagtggcagagatacctgagacagagcctggaggtggtggccaaggtgatggagctgctgcccacccacgccttcagcaccctgttccccgtgctgcaggacaacctggaggtgtacctgggcctgcagcagttcatcgtgaccagcggcagcggccacagactgaacatcaccgccgagaacgactgcagaagactgcactgcagcctgagagacctgagcagcctgctgcaggccgtgggcagactggccgagtacttcatcggcgacgtgttcgccgccagattcaacgacgccctgaccgtggtggagagactggtgaaggtgaccctgtacggcagccagatcaagctgtacaacatcgagaccgccgtgcccagcgtgctgaagcccgacctgatcgacgtgcacgcccagagcctggccgccctgcaggcctacagccactggctggcccagtactgcagcgaggtgcacagacagaacacccagcagttcgtgaccctgatcagcaccaccatggacgccatcacccccctgatcagcaccaaggtgcaggacaagctgctgctgagcgcctgccacctgctggtgagcctggccaccaccgtgagacccgtgttcctgatcagcatccccgccgtgcagaaggtgttcaacagaatcaccgacgccagcgccctgagactggtggacaaggcccaggtgctggtgtgcagagccctgagcaacatcctgctgctgccctggcccaacctgcccgagaacgagcagcagtggcccgtgagaagcatcaaccacgccagcctgatcagcgccctgagcagagactacagaaacctgaagcccagcgccgtggccccccagagaaagatgcccctggacgacaccaagctgatcatccaccagaccctgagcgtgctggaggacatcgtggagaacatcagcggcgagagcaccaagagcagacagatctgctaccagagcctgcaggagagcgtgcaggtgagcctggccctgttccccgccttcatccaccagagcgacgtgaccgacgagatgctgagcttcttcctgaccctgttcagaggcctgagagtgcagatgggcgtgcccttcaccgagcagatcatccagaccttcctgaacatgttcaccagagagcagctggccgagagcatcctgcacgagggcagcaccggctgcagagtggtggagaagttcctgaagatcctgcaggtggtggtgcaggagcccggccaggtgttcaagcccttcctgcccagcatcatcgccctgtgcatggagcaggtgtaccccatcatcgccgagagacccagccccgacgtgaaggccgagctgttcgagctgctgttcagaaccctgcaccacaactggagatacttcttcaagagcaccgtgctggccagcgtgcagagaggcatcgccgaggagcagatggagaacgagccccagttcagcgccatcatgcaggccttcggccagagcttcctgcagcccgacatccacctgttcaagcagaacctgttctacctggagaccctgaacaccaagcagaagctgtaccacaagaagatcttcagaaccgccatgctgttccagttcgtgaacgtgctgctgcaggtgctggtgcacaagagccacgacctgctgcaggaggagatcggcatcgccatctacaacatggccagcgtggacttcgacggcttcttcgccgccttcctgcccgagttcctgaccagctgcgacggcgtggacgccaaccagaagagcgtgctgggcagaaacttcaagatggacagagacctgcccagcttcacccagaacgtgcacagactggtgaacgacctgagatactacagactgtgcaacgacagcctgccccccggcaccgtgaagctgtag

SEQ ID NO: 184920 - protein, 2817 aa, Artificial Sequence
  derived and/or modified sequence
MSEKSGQSTKAKDGKKYATLSLFNTYKGKSLETQKTTARHGLQSLGKVGISRRMPPPANLPSLKAENKGNDPNVNIVPKDGTGWASKQEQHEEEKTPEVPPAQPKPGVAAPPEVAPAPKSWASNKQGGQGDGIQVNSQFQQEFPSLQAAGDQEKKEKETNDDNYGPGPSLRPPNVACWRDGGKAAGSPSSSDQDEKLPGQDESTAGTSEQNDILKVVEKRIACGPPQAKLNGQQAALASQYRAMMPPYMFQQYPRMTYPPLHGPMRFPPSLSETNKGLRGRGPPPSWASEPERPSILSASELKELDKFDNLDAEADEGWAGAQMEVDYTEQLNFSDDDEQGSNSPKENNSEDQGSKASENNENKKETDEVSNTKSSSQIPAQPSVAKVPYGKGPSFNQERGTSSHLPPPPKLLAQQHPPPDRQAVPGRPGPFPSKQQVADEDEIWKQRRRQQSEISAAVERARKRREEEERRMEEQRKAACAEKLKRLDEKLGILEKQPSPEEIREREREKEREREKELEKEQEQEREKEREKDRERQQEKEKELEKEQEKQREMEKERKQEKEKELERQKEKEKELQKMKEQEKECELEKEREKLEEKIEPREPNLEPMVEKQESENSCNKEEEPVFTRQDSNRSEKEATPVVHETEPESGSQPRPAVLSGYFKQFQKSLPPRFQRQQEQMKQQQWQQQQQQGVLPQTVPSQPSSSTVPPPPHRPLYQPMQPHPQHLASMGFDPRWLMMQSYMDPRMMSGRPAMDIPPIHPGMIPPKPLMRRDQMEGSPNSSESFEHIARSARDHAISLSEPRMLWGSDPYPHAEPQQATTPKATEEPEDVRSEAALDQEQITAAYSVEHNQLEAHPKADFIRESSEAQVQKFLSRSVEDVRPHHTDANNQSACFEAPDQKTLSAPQEERISAVESQPSRKRSVSHGSNHTQKPDEQRSEPSAGIPKVTSRCIDSKEPIERPEEKPKKEGFIRSSEGPKPEKVYKSKSETRWGPRPSSNRREEVNDRPVRRSGPIKKPVLRDMKEEREQRKEKEGEKAEKVTEKVVVKPEKTEKKDLPPPPPPPQPPAPIQPQSVPPPIQPEAEKFPSTETATLAQKPSQDTEKPLEPVSTVQVEPAVKTVNQQTMAAPVVKEEKQPEKVISKDLVIERPRPDSRPAVKKESTLPPRTYWKEARERDWFPDQGYRGRGRGEYYSRGRSYRGSYGGRGRGGRGHTRDYPQYRDNKPRAEHIPSGPLRQREESETRSESSDFEVVPKRRRQRGSETDTDSEIHESASDKDSLSKGKLPKREERPENKKPVKPHSSFKPDNHVRIDNRLLEKPYVRDDDKAKPGFLPKGEPTRRGRGGTFRRGGRDPGGRPSRPSTLRRPAYRDNQWNPRQSEVPKPEDGEPPRRHEQFIPIAADKRPPKFERKFDPARERPRRQRPTRPPRQDKPPRFRRLREREAASKSNEVVAVPTNGTVNNVAQEPVNTLGDISGNKTPDLSNQNSSDQANEEWETASESSDFNERRERDEKKNADLNAQTVVKVGENVLPPKREIAKRSFSSQRPVDRQNRRGNNGPPKSGRNFSGPRNERRSGPPSKSGKRGPFDDQPAGTTGVDLINGSSAHHQEGVPNGTGQKNSKDSTGKKREDPKPGPKKPKEKVDALSQFDLNNYASVVIIDDHPEVTVIEDPQSNLNDDGFTEVVSKKQQKRLQDEERRKKEEQVIQVWNKKNANEKGRSQTSKLPPRFAKKQATGIQQAQSSASVPPLASAPLPPSTSASVPASTSAPLPATLTPVPASTSAPVPASTLAPVLASTSAPVPASPLAPVSASASVSASVPASTSAAAITSSSAPASAPAPTPILASVSTPASVTILASASIPILASALASTSAPTPAPAASSPAAPVITAPTIPASAPTASVPLAPASASAPAPAPTPVSAPNPAPPAPAQTQAQTHKPVQNPLQTTSQSSKQPPPSIRLPSAQTPNGTDYVASGKSIQTPQSHGTLTAELWDNKVAPPAVLNDISKKLGPISPPQPPSVSAWNKPLTSFGSAPSSEGAKNGQESGLEIGTDTIQFGAPASNGNENEVVPVLSEKSADKIPEPKEQRQKQPRAGPIKAQKLPDLSPVENKEHKPGPIGKERSLKNRKVKDAQQVEPEGQEKPSPATVRSTDPVTTKETKAVSEMSTEIGTMISVSSAEYGTNAKESVTDYTTPSSSLPNTVATNNTKMEDTLVNNVPLPNTLPLPKRETIQQSSSLTSVPPTTFSLTFKMESARKAWENSPNVREKGSPVTSTAPPIATGVSSSASGPSTANYNSFSSASMPQIPVASVTPTASLSGAGTYTTSSLSTKSTTTSDPPNICKVKPQQLQTSSLPSASHFSQLSCMPSLIAQQQQNPQVYVSQSAAAQIPAFYMDTSHLFNTQHARLAPPSLAQQQGFQPGLSQPTSVQQIPIPIYAPLQGQHQAQLSLGAGPAVSQAQELFSSSLQPYRSQPAFMQSSLSQPSVVLSGTAIHNFPTVQHQELAKAQSGLAFQQTSNTQPIPILYEHQLGQASGLGGSQLIDTHLLQARANLTQASNLYSGQVQQPGQTNFYNTAQSPSALQQVTVPLPASQLSLPNFGSTGQPLIALPQTLQPPLQHTTPQAQAQSLSRPAQVSQPFRGLIPAGTQHSMIATTGKMSEMELKAFGSGIDIKPGTPPIAGRSTTPTSSPFRATSTSPNSQSSKMNSIVYQKQFQSAPATVRMTQPFPTQFAPQAKQRAEVLQSTQRFFSEQQQSKQIGGGKAQKVDSDSSKPPETLTDPPGVCQEKVEEKPPPAPSIATKPVRTGPIKPQAIKTEETKS

SEQ ID NO: 184921 - protein, 270 aa, Artificial Sequence [sequence omitted]

SEQ ID NO: 184922 - DNA, 8454 bp, Artificial Sequence
  derived and/or modified sequence
atgagcgagaagagcggccagagcaccaaggccaaggacggcaagaagtacgccaccctgagcctgttcaacacctacaagggcaagagcctggagacccagaagaccaccgccagacacggcctgcagagcctgggcaaggtgggcatcagcagaagaatgcccccccccgccaacctgcccagcctgaaggccgagaacaagggcaacgaccccaacgtgaacatcgtgcccaaggacggcaccggctgggccagcaagcaggagcagcacgaggaggagaagacccccgaggtgccccccgcccagcccaagcccggcgtggccgccccccccgaggtggcccccgcccccaagagctgggccagcaacaagcagggcggccagggcgacggcatccaggtgaacagccagttccagcaggagttccccagcctgcaggccgccggcgaccaggagaagaaggagaaggagaccaacgacgacaactacggccccggccccagcctgagaccccccaacgtggcctgctggagagacggcggcaaggccgccggcagccccagcagcagcgaccaggacgagaagctgcccggccaggacgagagcaccgccggcaccagcgagcagaacgacatcctgaaggtggtggagaagagaatcgcctgcggccccccccaggccaagctgaacggccagcaggccgccctggccagccagtacagagccatgatgcccccctacatgttccagcagtaccccagaatgacctacccccccctgcacggccccatgagattcccccccagcctgagcgagaccaacaagggcctgagaggcagaggccccccccccagctgggccagcgagcccgagagacccagcatcctgagcgccagcgagctgaaggagctggacaagttcgacaacctggacgccgaggccgacgagggctgggccggcgcccagatggaggtggactacaccgagcagctgaacttcagcgacgacgacgagcagggcagcaacagccccaaggagaacaacagcgaggaccagggcagcaaggccagcgagaacaacgagaacaagaaggagaccgacgaggtgagcaacaccaagagcagcagccagatccccgcccagcccagcgtggccaaggtgccctacggcaagggccccagcttcaaccaggagagaggcaccagcagccacctgccccccccccccaagctgctggcccagcagcaccccccccccgacagacaggccgtgcccggcagacccggccccttccccagcaagcagcaggtggccgacgaggacgagatctggaagcagagaagaagacagcagagcgagatcagcgccgccgtggagagagccagaaagagaagagaggaggaggagagaagaatggaggagcagagaaaggccgcctgcgccgagaagctgaagagactggacgagaagctgggcatcctggagaagcagcccagccccgaggagatcagagagagagagagagagaaggagagagagagagagaaggagctggagaaggagcaggagcaggagagagagaaggagagagagaaggacagagagagacagcaggagaaggagaaggagctggagaaggagcaggagaagcagagagagatggagaaggagagaaagcaggagaaggagaaggagctggagagacagaaggagaaggagaaggagctgcagaagatgaaggagcaggagaaggagtgcgagctggagaaggagagagagaagctggaggagaagatcgagcccagagagcccaacctggagcccatggtggagaagcaggagagcgagaacagctgcaacaaggaggaggagcccgtgttcaccagacaggacagcaacagaagcgagaaggaggccacccccgtggtgcacgagaccgagcccgagagcggcagccagcccagacccgccgtgctgagcggctacttcaagcagttccagaagagcctgccccccagattccagagacagcaggagcagatgaagcagcagcagtggcagcagcagcagcagcagggcgtgctgccccagaccgtgcccagccagcccagcagcagcaccgtgcccccccccccccacagacccctgtaccagcccatgcagccccacccccagcacctggccagcatgggcttcgaccccagatggctgatgatgcagagctacatggaccccagaatgatgagcggcagacccgccatggacatcccccccatccaccccggcatgatcccccccaagcccctgatgagaagagaccagatggagggcagccccaacagcagcgagagcttcgagcacatcgccagaagcgccagagaccacgccatcagcctgagcgagcccagaatgctgtggggcagcgacccctacccccacgccgagccccagcaggccaccacccccaaggccaccgaggagcccgaggacgtgagaagcgaggccgccctggaccaggagcagatcaccgccgcctacagcgtggagcacaaccagctggaggcccaccccaaggccgacttcatcagagagagcagcgaggcccaggtgcagaagttcctgagcagaagcgtggaggacgtgagaccccaccacaccgacgccaacaaccagagcgcctgcttcgaggcccccgaccagaagaccctgagcgccccccaggaggagagaatcagcgccgtggagagccagcccagcagaaagagaagcgtgagccacggcagcaaccacacccagaagcccgacgagcagagaagcgagcccagcgccggcatccccaaggtgaccagcagatgcatcgacagcaaggagcccatcgagagacccgaggagaagcccaagaaggagggcttcatcagaagcagcgagggccccaagcccgagaaggtgtacaagagcaagagcgagaccagatggggccccagacccagcagcaacagaagagaggaggtgaacgacagacccgtgagaagaagcggccccatcaagaagcccgtgctgagagacatgaaggaggagagagagcagagaaaggagaaggagggcgagaaggccgagaaggtgaccgagaaggtggtggtgaagcccgagaagaccgagaagaaggacctgccccccccccccccccccccccagccccccgcccccatccagccccagagcgtgcccccccccatccagcccgaggccgagaagttccccagcaccgagaccgccaccctggcccagaagcccagccaggacaccgagaagcccctggagcccgtgagcaccgtgcaggtggagcccgccgtgaagaccgtgaaccagcagaccatggccgcccccgtggtgaaggaggagaagcagcccgagaaggtgatcagcaaggacctggtgatcgagagacccagacccgacagcagacccgccgtgaagaaggagagcaccctgccccccagaacctactggaaggaggccagagagagagactggttccccgaccagggctacagaggcagaggcagaggcgagtactacagcagaggcagaagctacagaggcagctacggcggcagaggcagaggcggcagaggccacaccagagactacccccagtacagagacaacaagcccagagccgagcacatccccagcggccccctgagacagagagaggagagcgagaccagaagcgagagcagcgacttcgaggtggtgcccaagagaagaagacagagaggcagcgagaccgacaccgacagcgagatccacgagagcgccagcgacaaggacagcctgagcaagggcaagctgcccaagagagaggagagacccgagaacaagaagcccgtgaagccccacagcagcttcaagcccgacaaccacgtgagaatcgacaacagactgctggagaagccctacgtgagagacgacgacaaggccaagcccggcttcctgcccaagggcgagcccaccagaagaggcagaggcggcaccttcagaagaggcggcagagaccccggcggcagacccagcagacccagcaccctgagaagacccgcctacagagacaaccagtggaaccccagacagagcgaggtgcccaagcccgaggacggcgagccccccagaagacacgagcagttcatccccatcgccgccgacaagagaccccccaagttcgagagaaagttcgaccccgccagagagagacccagaagacagagacccaccagaccccccagacaggacaagccccccagattcagaagactgagagagagagaggccgccagcaagagcaacgaggtggtggccgtgcccaccaacggcaccgtgaacaacgtggcccaggagcccgtgaacaccctgggcgacatcagcggcaacaagacccccgacctgagcaaccagaacagcagcgaccaggccaacgaggagtgggagaccgccagcgagagcagcgacttcaacgagagaagagagagagacgagaagaagaacgccgacctgaacgcccagaccgtggtgaaggtgggcgagaacgtgctgccccccaagagagagatcgccaagagaagcttcagcagccagagacccgtggacagacagaacagaagaggcaacaacggcccccccaagagcggcagaaacttcagcggccccagaaacgagagaagaagcggcccccccagcaagagcggcaagagaggccccttcgacgaccagcccgccggcaccaccggcgtggacctgatcaacggcagcagcgcccaccaccaggagggcgtgcccaacggcaccggccagaagaacagcaaggacagcaccggcaagaagagagaggaccccaagcccggccccaagaagcccaaggagaaggtggacgccctgagccagttcgacctgaacaactacgccagcgtggtgatcatcgacgaccaccccgaggtgaccgtgatcgaggacccccagagcaacctgaacgacgacggcttcaccgaggtggtgagcaagaagcagcagaagagactgcaggacgaggagagaagaaagaaggaggagcaggtgatccaggtgtggaacaagaagaacgccaacgagaagggcagaagccagaccagcaagctgccccccagattcgccaagaagcaggccaccggcatccagcaggcccagagcagcgccagcgtgccccccctggccagcgcccccctgccccccagcaccagcgccagcgtgcccgccagcaccagcgcccccctgcccgccaccctgacccccgtgcccgccagcaccagcgcccccgtgcccgccagcaccctggcccccgtgctggccagcaccagcgcccccgtgcccgccagccccctggcccccgtgagcgccagcgccagcgtgagcgccagcgtgcccgccagcaccagcgccgccgccatcaccagcagcagcgcccccgccagcgcccccgcccccacccccatcctggccagcgtgagcacccccgccagcgtgaccatcctggccagcgccagcatccccatcctggccagcgccctggccagcaccagcgcccccacccccgcccccgccgccagcagccccgccgcccccgtgatcaccgcccccaccatccccgccagcgcccccaccgccagcgtgcccctggcccccgccagcgccagcgcccccgcccccgcccccacccccgtgagcgcccccaaccccgccccccccgcccccgcccagacccaggcccagacccacaagcccgtgcagaaccccctgcagaccaccagccagagcagcaagcagcccccccccagcatcagactgcccagcgcccagacccccaacggcaccgactacgtggccagcggcaagagcatccagaccccccagagccacggcaccctgaccgccgagctgtgggacaacaaggtggccccccccgccgtgctgaacgacatcagcaagaagctgggccccatcagccccccccagccccccagcgtgagcgcctggaacaagcccctgaccagcttcggcagcgcccccagcagcgagggcgccaagaacggccaggagagcggcctggagatcggcaccgacaccatccagttcggcgcccccgccagcaacggcaacgagaacgaggtggtgcccgtgctgagcgagaagagcgccgacaagatccccgagcccaaggagcagagacagaagcagcccagagccggccccatcaaggcccagaagctgcccgacctgagccccgtggagaacaaggagcacaagcccggccccatcggcaaggagagaagcctgaagaacagaaaggtgaaggacgcccagcaggtggagcccgagggccaggagaagcccagccccgccaccgtgagaagcaccgaccccgtgaccaccaaggagaccaaggccgtgagcgagatgagcaccgagatcggcaccatgatcagcgtgagcagcgccgagtacggcaccaacgccaaggagagcgtgaccgactacaccacccccagcagcagcctgcccaacaccgtggccaccaacaacaccaagatggaggacaccctggtgaacaacgtgcccctgcccaacaccctgcccctgcccaagagagagaccatccagcagagcagcagcctgaccagcgtgccccccaccaccttcagcctgaccttcaagatggagagcgccagaaaggcctgggagaacagccccaacgtgagagagaagggcagccccgtgaccagcaccgccccccccatcgccaccggcgtgagcagcagcgccagcggccccagcaccgccaactacaacagcttcagcagcgccagcatgccccagatccccgtggccagcgtgacccccaccgccagcctgagcggcgccggcacctacaccaccagcagcctgagcaccaagagcaccaccaccagcgacccccccaacatctgcaaggtgaagccccagcagctgcagaccagcagcctgcccagcgccagccacttcagccagctgagctgcatgcccagcctgatcgcccagcagcagcagaacccccaggtgtacgtgagccagagcgccgccgcccagatccccgccttctacatggacaccagccacctgttcaacacccagcacgccagactggccccccccagcctggcccagcagcagggcttccagcccggcctgagccagcccaccagcgtgcagcagatccccatccccatctacgcccccctgcagggccagcaccaggcccagctgagcctgggcgccggccccgccgtgagccaggcccaggagctgttcagcagcagcctgcagccctacagaagccagcccgccttcatgcagagcagcctgagccagcccagcgtggtgctgagcggcaccgccatccacaacttccccaccgtgcagcaccaggagctggccaaggcccagagcggcctggccttccagcagaccagcaacacccagcccatccccatcctgtacgagcaccagctgggccaggccagcggcctgggcggcagccagctgatcgacacccacctgctgcaggccagagccaacctgacccaggccagcaacctgtacagcggccaggtgcagcagcccggccagaccaacttctacaacaccgcccagagccccagcgccctgcagcaggtgaccgtgcccctgcccgccagccagctgagcctgcccaacttcggcagcaccggccagcccctgatcgccctgccccagaccctgcagccccccctgcagcacaccaccccccaggcccaggcccagagcctgagcagacccgcccaggtgagccagcccttcagaggcctgatccccgccggcacccagcacagcatgatcgccaccaccggcaagatgagcgagatggagctgaaggccttcggcagcggcatcgacatcaagcccggcaccccccccatcgccggcagaagcaccacccccaccagcagccccttcagagccaccagcaccagccccaacagccagagcagcaagatgaacagcatcgtgtaccagaagcagttccagagcgcccccgccaccgtgagaatgacccagcccttccccacccagttcgccccccaggccaagcagagagccgaggtgctgcagagcacccagagattcttcagcgagcagcagcagagcaagcagatcggcggcggcaaggcccagaaggtggacagcgacagcagcaagccccccgagaccctgaccgacccccccggcgtgtgccaggagaaggtggaggagaagcccccccccgcccccagcatcgccaccaagcccgtgagaaccggccccatcaagccccaggccatcaagaccgaggagaccaagagctag

SEQ ID NO: 184923 - DNA, 8697 bp, Artificial Sequence
  derived and/or modified sequence
atgagcgagaagagcggccagagcaccaaggccaaggacggcaagaagtacgccaccctgagcctgttcaacacctacaagggcaagagcctggagacccagaagaccaccgtggccgccagacacggcctgcagagcctgggcaaggtgggcatcagcagaagaatgcccccccccgccaacctgcccagcctgaaggccgagaacaagggcaacgaccccaacgtgaacatcgtgcccaaggacggcaccggctgggccagcaagcaggagcagcacgaggaggagaagacccccgaggtgccccccgcccagcccaagcccggcgtggccgccccccccgaggtggcccccgcccccaagagctgggccagcaacaagcagggcggccagggcgacggcatccaggtgaacagccagttccagcaggagttccccagcctgcaggccgccggcgaccaggagaagaaggagaaggagaccaacgacgacaactacggccccggccccagcctgagaccccccaacgtggcctgctggagagacggcggcaaggccgccggcagccccagcagcagcgaccaggacgagaagctgcccggccaggacgagagcaccgccggcaccagcgagcagaacgacatcctgaaggtggtggagaagagaatcgcctgcggccccccccaggccaagctgaacggccagcaggccgccctggccagccagtacagagccatgatgcccccctacatgttccagcagtaccccagaatgacctacccccccctgcacggccccatgagattcccccccagcctgagcgagaccaacaagggcctgagaggcagaggccccccccccagctgggccagcgagcccgagagacccagcatcctgagcgccagcgagctgaaggagctggacaagttcgacaacctggacgccgaggccgacgagggctgggccggcgcccagatggaggtggactacaccgagcagctgaacttcagcgacgacgacgagcagggcagcaacagccccaaggagaacaacagcgaggaccagggcagcaaggccagcgagaacaacgagaacaagaaggagaccgacgaggtgagcaacaccaagagcagcagccagatccccgcccagcccagcgtggccaaggtgccctacggcaagggccccagcttcaaccaggagagaggcaccagcagccacctgccccccccccccaagctgctggcccagcagcaccccccccccgacagacaggccgtgcccggcagacccggccccttccccagcaagcagcaggtggccgacgaggacgagatctggaagcagagaagaagacagcagagcgagatcagcgccgccgtggagagagccagaaagagaagagaggaggaggagagaagaatggaggagcagagaaaggccgcctgcgccgagaagctgaagagactggacgagaagctgggcatcctggagaagcagcccagccccgaggagatcagagagagagagagagagaaggagagagagagagagaaggagctggagaaggagcaggagcaggagagagagaaggagagagagaaggacagagagagacagcaggagaaggagaaggagctggagaaggagcaggagaagcagagagagatggagaaggagagaaagcaggagaaggagaaggagctggagagacagaaggagaaggagaaggagctgcagaagatgaaggagcaggagaaggagtgcgagctggagaaggagagagagaagctggaggagaagatcgagcccagagagcccaacctggagcccatggtggagaagcaggagagcgagaacagctgcaacaaggaggaggagcccgtgttcaccagacaggacagcaacagaagcgagaaggaggccacccccgtggtgcacgagaccgagcccgagagcggcagccagcccagacccgccgtgctgagcggctacttcaagcagttccagaagagcctgccccccagattccagagacagcaggagcagatgaagcagcagcagtggcagcagcagcagcagcagggcgtgctgccccagaccgtgcccagccagcccagcagcagcaccgtgcccccccccccccacagacccctgtaccagcccatgcagccccacccccagcacctggccagcatgggcttcgaccccagatggctgatgatgcagagctacatggaccccagaatgatgagcggcagacccgccatggacatcccccccatccaccccggcatgatcccccccaagcccctgatgagaagagaccagatggagggcagccccaacagcagcgagagcttcgagcacatcgccagaagcgccagagaccacgccatcagcctgagcgagcccagaatgctgtggggcagcgacccctacccccacgccgagccccagcaggccaccacccccaaggccaccgaggagcccgaggacgtgagaagcgaggccgccctggaccaggagcagatcaccgccgcctacagcgtggagcacaaccagctggaggcccaccccaaggccgacttcatcagagagagcagcgaggcccaggtgcagaagttcctgagcagaagcgtggaggacgtgagaccccaccacaccgacgccaacaaccagagcgcctgcttcgaggcccccgaccagaagaccctgagcgccccccaggaggagagaatcagcgccgtggagagccagcccagcagaaagagaagcgtgagccacggcagcaaccacacccagaagcccgacgagcagagaagcgagcccagcgccggcatccccaaggtgaccagcagatgcatcgacagcaaggagcccatcgagagacccgaggagaagcccaagaaggagggcttcatcagaagcagcgagggccccaagcccgagaaggtgtacaagagcaagagcgagaccagatggggccccagacccagcagcaacagaagagaggaggtgaacgacagacccgtgagaagaagcggccccatcaagaagcccgtgctgagagacatgaaggaggagagagagcagagaaaggagaaggagggcgagaaggccgagaaggtgaccgagaaggtggtggtgaagcccgagaagaccgagaagaaggacctgccccccccccccccccccccccagccccccgcccccatccagccccagagcgtgcccccccccatccagcccgaggccgagaagttccccagcaccgagaccgccaccctggcccagaagcccagccaggacaccgagaagcccctggagcccgtgagcaccgtgcaggtggagcccgccgtgaagaccgtgaaccagcagaccatggccgcccccgtggtgaaggaggagaagcagcccgagaaggtgatcagcaaggacctggtgatcgagagacccagacccgacagcagacccgccgtgaagaaggagagcaccctgccccccagaacctactggaaggaggccagagagagagactggttccccgaccagggctacagaggcagaggcagaggcgagtactacagcagaggcagaagctacagaggcagctacggcggcagaggcagaggcggcagaggccacaccagagactacccccagtacagagacaacaagcccagagccgagcacatccccagcggccccctgagacagagagaggagagcgagaccagaagcgagagcagcgacttcgaggtggtgcccaagagaagaagacagagaggcagcgagaccgacaccgacagcgagatccacgagagcgccagcgacaaggacagcctgagcaagggcaagctgcccaagagagaggagagacccgagaacaagaagcccgtgaagccccacagcagcttcaagcccgacaaccacgtgagaatcgacaacagactgctggagaagccctacgtgagagacgacgacaaggccaagcccggcttcctgcccaagggcgagcccaccagaagaggcagaggcggcaccttcagaagaggcggcagagaccccggcggcagacccagcagacccagcaccctgagaagacccgcctacagagacaaccagtggaaccccagacagagcgaggtgcccaagcccgaggacggcgagccccccagaagacacgagcagttcatccccatcgccgccgacaagagaccccccaagttcgagagaaagttcgaccccgccagagagagacccagaagacagagacccaccagaccccccagacaggacaagccccccagattcagaagactgagagagagagaggccgccagcaagagcaacgaggtggtggccgtgcccaccaacggcaccgtgaacaacgtggcccaggagcccgtgaacaccctgggcgacatcagcggcaacaagacccccgacctgagcaaccagaacagcagcgaccaggccaacgaggagtgggagaccgccagcgagagcagcgacttcaacgagagaagagagagagacgagaagaagaacgccgacctgaacgcccagaccgtggtgaaggtgggcgagaacgtgctgccccccaagagagagatcgccaagagaagcttcagcagccagagacccgtggacagacagaacagaagaggcaacaacggcccccccaagagcggcagaaacttcagcggccccagaaacgagagaagaagcggcccccccagcaagagcggcaagagaggccccttcgacgaccagcccgccggcaccaccggcgtggacctgatcaacggcagcagcgcccaccaccaggagggcgtgcccaacggcaccggccagaagaacagcaaggacagcaccggcaagaagagagaggaccccaagcccggccccaagaagcccaaggagaaggtggacgccctgagccagttcgacctgaacaactacgccagcgtggtgatcatcgacgaccaccccgaggtgaccgtgatcgaggacccccagagcaacctgaacgacgacggcttcaccgaggtggtgagcaagaagcagcagaagagactgcaggacgaggagagaagaaagaaggaggagcaggtgatccaggtgtggaacaagaagaacgccaacgagaagggcagaagccagaccagcaagctgccccccagattcgccaagaagcaggccaccggcatccagcaggcccagagcagcgccagcgtgccccccctggccagcgcccccctgccccccagcaccagcgccagcgtgcccgccagcaccagcgcccccctgcccgccaccctgacccccgtgcccgccagcaccagcgcccccgtgcccgccagcaccctggcccccgtgctggccagcaccagcgcccccgtgcccgccagccccctggcccccgtgagcgccagcgccagcgtgagcgccagcgtgcccgccagcaccagcgccgccgccatcaccagcagcagcgcccccgccagcgcccccgcccccacccccatcctggccagcgtgagcacccccgccagcgtgaccatcctggccagcgccagcatccccatcctggccagcgccctggccagcaccagcgcccccacccccgcccccgccgccagcagccccgccgcccccgtgatcaccgcccccaccatccccgccagcgcccccaccgccagcgtgcccctggcccccgccagcgccagcgcccccgcccccgcccccacccccgtgagcgcccccaaccccgccccccccgcccccgcccagacccaggcccagacccacaagcccgtgcagaaccccctgcagaccaccagccagagcagcaagcagcccccccccagcatcagactgcccagcgcccagacccccaacggcaccgactacgtggccagcggcaagagcatccagaccccccagagccacggcaccctgaccgccgagctgtgggacaacaaggtggccccccccgccgtgctgaacgacatcagcaagaagctgggccccatcagccccccccagccccccagcgtgagcgcctggaacaagcccctgaccagcttcggcagcgcccccagcagcgagggcgccaagaacggccaggagagcggcctggagatcggcaccgacaccatccagttcggcgcccccgccagcaacggcaacgagaacgaggtggtgcccgtgctgagcgagaagagcgccgacaagatccccgagcccaaggagcagagacagaagcagcccagagccggccccatcaaggcccagaagctgcccgacctgagccccgtggagaacaaggagcacaagcccggccccatcggcaaggagagaagcctgaagaacagaaaggtgaaggacgcccagcaggtggagcccgagggccaggagaagcccagccccgccaccgtgagaagcaccgaccccgtgaccaccaaggagaccaaggccgtgagcgagatgagcaccgagatcggcaccatgatcagcgtgagcagcgccgagtacggcaccaacgccaaggagagcgtgaccgactacaccacccccagcagcagcctgcccaacaccgtggccaccaacaacaccaagatggaggacaccctggtgaacaacgtgcccctgcccaacaccctgcccctgcccaagagagagaccatccagcagagcagcagcctgaccagcgtgccccccaccaccttcagcctgaccttcaagatggagagcgccagaaaggcctgggagaacagccccaacgtgagagagaagggcagccccgtgaccagcaccgccccccccatcgccaccggcgtgagcagcagcgccagcggccccagcaccgccaactacaacagcttcagcagcgccagcatgccccagatccccgtggccagcgtgacccccaccgccagcctgagcggcgccggcacctacaccaccagcagcctgagcaccaagagcaccaccaccagcgacccccccaacatctgcaaggtgaagccccagcagctgcagaccagcagcctgcccagcgccagccacttcagccagctgagctgcatgcccagcctgatcgcccagcagcagcagaacccccaggtgtacgtgagccagagcgccgccgcccagatccccgccttctacatggacaccagccacctgttcaacacccagcacgccagactggccccccccagcctggcccagcagcagggcttccagcccggcctgagccagcccaccagcgtgcagcagatccccatccccatctacgcccccctgcagggccagcaccaggcccagctgagcctgggcgccggccccgccgtgagccaggcccaggagctgttcagcagcagcctgcagccctacagaagccagcccgccttcatgcagagcagcctgagccagcccagcgtggtgctgagcggcaccgccatccacaacttccccaccgtgcagcaccaggagctggccaaggcccagagcggcctggccttccagcagaccagcaacacccagcccatccccatcctgtacgagcaccagctgggccaggccagcggcctgggcggcagccagctgatcgacacccacctgctgcaggccagagccaacctgacccaggccagcaacctgtacagcggccaggtgcagcagcccggccagaccaacttctacaacaccgcccagagccccagcgccctgcagcaggtgaccgtgcccctgcccgccagccagctgagcctgcccaacttcggcagcaccggccagcccctgatcgccctgccccagaccctgcagccccccctgcagcacaccaccccccaggcccaggcccagagcctgagcagacccgcccaggtgagccagcccttcagaggcctgatccccgccggcacccagcacagcatgatcgccaccaccggcaagatgagcgagatggagctgaaggccttcggcagcggcatcgacatcaagcccggcaccccccccatcgccggcagaagcaccacccccaccagcagccccttcagagccaccagcaccagccccaacagccagagcagcaagatgaacagcatcgtgtaccagaagcagttccagagcgcccccgccaccgtgagaatgacccagcccttccccacccagttcgccccccagatcctgagccagcccaacctggtgccccccctggtgagagccccccacaccaacaccttccccgcccccgtgcagagaccccccatggccctggccagccagatgcccccccccctgaccaccggcctgatgagccacgccagactgccccacgtggccagaggcccctgcggcagcctgagcggcgtgagaggcaaccaggcccaggccgccctgaaggccgagcaggacatgaaggccaagcagagagccgaggtgctgcagagcacccagagattcttcagcgagcagcagcagagcaagcagatcggcggcggcaaggcccagaaggtggacagcgacagcagcaagccccccgagaccctgaccgacccccccggcgtgtgccaggagaaggtggaggagaagcccccccccgcccccagcatcgccaccaagcccgtgagaaccggccccatcaagccccaggccatcaagaccgaggagaccaagagctag

SEQ ID NO: 184924 - DNA, 7962 bp, Artificial Sequence
  derived and/or modified sequence
gtgcccaaccagatgttccagcagtaccccagaatgacctacccccccctgcacggccccatgagattcccccccagcctgagcgagaccaacaagggcctgagaggcagaggccccccccccagctgggccagcgagcccgagagacccagcatcctgagcgccagcgagctgaaggagctggacaagttcgacaacctggacgccgaggccgacgagggctgggccggcgcccagatggaggtggactacaccgagcagctgaacttcagcgacgacgacgagcagggcagcaacagccccaaggagaacaacagcgaggaccagggcagcaaggccagcgagaacaacgagaacaagaaggagaccgacgaggtgagcaacaccaagagcagcagccagatccccgcccagcccagcgtggccaaggtgccctacggcaagggccccagcttcaaccaggagagaggcaccagcagccacctgccccccccccccaagctgctggcccagcagcaccccccccccgacagacaggccgtgcccggcagacccggccccttccccagcaagcagcaggtggccgacgaggacgagatctggaagcagagaagaagacagcagagcgagatcagcgccgccgtggagagagccagaaagagaagagaggaggaggagagaagaatggaggagcagagaaaggccgcctgcgccgagaagctgaagagactggacgagaagctgggcatcctggagaagcagcccagccccgaggagatcagagagagagagagagagaaggagagagagagagagaaggagctggagaaggagcaggagcaggagagagagaaggagagagagaaggacagagagagacagcaggagaaggagaaggagctggagaaggagcaggagaagcagagagagatggagaaggagagaaagcaggagaaggagaaggagctggagagacagaaggagaaggagaaggagctgcagaagatgaaggagcaggagaaggagtgcgagctggagaaggagagagagaagctggaggagaagatcgagcccagagagcccaacctggagcccatggtggagaagcaggagagcgagaacagctgcaacaaggccgaggaggagcccgtgttcaccagacaggacagcaacagaagcgagaaggaggccacccccgtggtgcacgagaccgagcccgagagcggcagccagcccagacccgccgtgctgagcggctacttcaagcagttccagaagagcctgccccccagattccagagacagcaggagcagatgaagcagcagcagtggcagcagcagcagcagcagggcgtgctgccccagaccgtgcccagccagcccagcagcagcaccgtgcccccccccccccacagacccctgtaccagcccatgcagccccacccccagcacctggccagcatgggcttcgaccccagatggctgatgatgcagagctacatggaccccagaatgatgagcggcagacccgccatggacatcccccccatccaccccggcatgatcccccccaagcccctgatgagaagagaccagatggagggcagccccaacagcagcgagagcttcgagcacatcgccagaagcgccagagaccacgccatcagcctgagcgagcccagaatgctgtggggcagcgacccctacccccacgccgagccccagcaggccaccacccccaaggccaccgaggagcccgaggacgtgagaagcgaggccgccctggaccaggagcagatcaccgccgcctacagcgtggagcacaaccagctggaggcccaccccaaggccgacttcatcagagagagcagcgaggcccaggtgcagaagttcctgagcagaagcgtggaggacgtgagaccccaccacaccgacgccaacaaccagagcgcctgcttcgaggcccccgaccagaagaccctgagcgccccccaggaggagagaatcagcgccgtggagagccagcccagcagaaagagaagcgtgagccacggcagcaaccacacccagaagcccgacgagcagagaagcgagcccagcgccggcatccccaaggtgaccagcagatgcatcgacagcaaggagcccatcgagagacccgaggagaagcccaagaaggagggcttcatcagaagcagcgagggccccaagcccgagaaggtgtacaagagcaagagcgagaccagatggggccccagacccagcagcaacagaagagaggaggtgaacgacagacccgtgagaagaagcggccccatcaagaagcccgtgctgagagacatgaaggaggagagagagcagagaaaggagaaggagggcgagaaggccgagaaggtgaccgagaaggtggtggtgaagcccgagaagaccgagaagaaggacctgccccccccccccccccccccccagccccccgcccccatccagccccagagcgtgcccccccccatccagcccgaggccgagaagttccccagcaccgagaccgccaccctggcccagaagcccagccaggacaccgagaagcccctggagcccgtgagcaccgtgcaggtggagcccgccgtgaagaccgtgaaccagcagaccatggccgcccccgtggtgaaggaggagaagcagcccgagaaggtgatcagcaaggacctggtgatcgagagacccagacccgacagcagacccgccgtgaagaaggagagcaccctgccccccagaacctactggaaggaggccagagagagagactggttccccgaccagggctacagaggcagaggcagaggcgagtactacagcagaggcagaagctacagaggcagctacggcggcagaggcagaggcggcagaggccacaccagagactacccccagtacagagacaacaagcccagagccgagcacatccccagcggccccctgagacagagagaggagagcgagaccagaagcgagagcagcgacttcgaggtggtgcccaagagaagaagacagagaggcagcgagaccgacaccgacagcgagatccacgagagcgccagcgacaaggacagcctgagcaagggcaagctgcccaagagagaggagagacccgagaacaagaagcccgtgaagccccacagcagcttcaagcccgacaaccacgtgagaatcgacaacagactgctggagaagccctacgtgagagacgacgacaaggccaagcccggcttcctgcccaagggcgagcccaccagaagaggcagaggcggcaccttcagaagaggcggcagagaccccggcggcagacccagcagacccagcaccctgagaagacccgcctacagagacaaccagtggaaccccagacagagcgaggtgcccaagcccgaggacggcgagccccccagaagacacgagcagttcatccccatcgccgccgacaagagaccccccaagttcgagagaaagttcgaccccgccagagagagacccagaagacagagacccaccagaccccccagacaggacaagccccccagattcagaagactgagagagagagaggccgccagcaagagcaacgaggtggtggccgtgcccaccaacggcaccgtgaacaacgtggcccaggagcccgtgaacaccctgggcgacatcagcggcaacaagacccccgacctgagcaaccagaacagcagcgaccaggccaacgaggagtgggagaccgccagcgagagcagcgacttcaacgagagaagagagagagacgagaagaagaacgccgacctgaacgcccagaccgtggtgaaggtgggcgagaacgtgctgccccccaagagagagatcgccaagagaagcttcagcagccagagacccgtggacagacagaacagaagaggcaacaacggcccccccaagagcggcagaaacttcagcggccccagaaacgagagaagaagcggcccccccagcaagagcggcaagagaggccccttcgacgaccagcccgccggcaccaccggcgtggacctgatcaacggcagcagcgcccaccaccaggagggcgtgcccaacggcaccggccagaagaacagcaaggacagcaccggcaagaagagagaggaccccaagcccggccccaagaagcccaaggagaaggtggacgccctgagccagttcgacctgaacaactacgccagcgtggtgatcatcgacgaccaccccgaggtgaccgtgatcgaggacccccagagcaacctgaacgacgacggcttcaccgaggtggtgagcaagaagcagcagaagagactgcaggacgaggagagaagaaagaaggaggagcaggtgatccaggtgtggaacaagaagaacgccaacgagaagggcagaagccagaccagcaagctgccccccagattcgccaagaagcaggccaccggcatccagcaggcccagagcagcgccagcgtgccccccctggccagcgcccccctgccccccagcaccagcgccagcgtgcccgccagcaccagcgcccccctgcccgccaccctgacccccgtgcccgccagcaccagcgcccccgtgcccgccagcaccctggcccccgtgctggccagcaccagcgcccccgtgcccgccagccccctggcccccgtgagcgccagcgccagcgtgagcgccagcgtgcccgccagcaccagcgccgccgccatcaccagcagcagcgcccccgccagcgcccccgcccccacccccatcctggccagcgtgagcacccccgccagcgtgaccatcctggccagcgccagcatccccatcctggccagcgccctggccagcaccagcgcccccacccccgcccccgccgccagcagccccgccgcccccgtgatcaccgcccccaccatccccgccagcgcccccaccgccagcgtgcccctggcccccgccagcgccagcgcccccgcccccgcccccacccccgtgagcgcccccaaccccgccccccccgcccccgcccagacccaggcccagacccacaagcccgtgcagaaccccctgcagaccaccagccagagcagcaagcagcccccccccagcatcagactgcccagcgcccagacccccaacggcaccgactacgtggccagcggcaagagcatccagaccccccagagccacggcaccctgaccgccgagctgtgggacaacaaggtggccccccccgccgtgctgaacgacatcagcaagaagctgggccccatcagccccccccagccccccagcgtgagcgcctggaacaagcccctgaccagcttcggcagcgcccccagcagcgagggcgccaagaacggccaggagagcggcctggagatcggcaccgacaccatccagttcggcgcccccgccagcaacggcaacgagaacgaggtggtgcccgtgctgagcgagaagagcgccgacaagatccccgagcccaaggagcagagacagaagcagcccagagccggccccatcaaggcccagaagctgcccgacctgagccccgtggagaacaaggagcacaagcccggccccatcggcaaggagagaagcctgaagaacagaaaggtgaaggacgcccagcaggtggagcccgagggccaggagaagcccagccccgccaccgtgagaagcaccgaccccgtgaccaccaaggagaccaaggccgtgagcgagatgagcaccgagatcggcaccatgatcagcgtgagcagcgccgagtacggcaccaacgccaaggagagcgtgaccgactacaccacccccagcagcagcctgcccaacaccgtggccaccaacaacaccaagatggaggacaccctggtgaacaacgtgcccctgcccaacaccctgcccctgcccaagagagagaccatccagcagagcagcagcctgaccagcgtgccccccaccaccttcagcctgaccttcaagatggagagcgccagaaaggcctgggagaacagccccaacgtgagagagaagggcagccccgtgaccagcaccgccccccccatcgccaccggcgtgagcagcagcgccagcggccccagcaccgccaactacaacagcttcagcagcgccagcatgccccagatccccgtggccagcgtgacccccaccgccagcctgagcggcgccggcacctacaccaccagcagcctgagcaccaagagcaccaccaccagcgacccccccaacatctgcaaggtgaagccccagcagctgcagaccagcagcctgcccagcgccagccacttcagccagctgagctgcatgcccagcctgatcgcccagcagcagcagaacccccaggtgtacgtgagccagagcgccgccgcccagatccccgccttctacatggacaccagccacctgttcaacacccagcacgccagactggccccccccagcctggcccagcagcagggcttccagcccggcctgagccagcccaccagcgtgcagcagatccccatccccatctacgcccccctgcagggccagcaccaggcccagctgagcctgggcgccggccccgccgtgagccaggcccaggagctgttcagcagcagcctgcagccctacagaagccagcccgccttcatgcagagcagcctgagccagcccagcgtggtgctgagcggcaccgccatccacaacttccccaccgtgcagcaccaggagctggccaaggcccagagcggcctggccttccagcagaccagcaacacccagcccatccccatcctgtacgagcaccagctgggccaggccagcggcctgggcggcagccagctgatcgacacccacctgctgcaggccagagccaacctgacccaggccagcaacctgtacagcggccaggtgcagcagcccggccagaccaacttctacaacaccgcccagagccccagcgccctgcagcaggtgaccgtgcccctgcccgccagccagctgagcctgcccaacttcggcagcaccggccagcccctgatcgccctgccccagaccctgcagccccccctgcagcacaccaccccccaggcccaggcccagagcctgagcagacccgcccaggtgagccagcccttcagaggcctgatccccgccggcacccagcacagcatgatcgccaccaccggcaagatgagcgagatggagctgaaggccttcggcagcggcatcgacatcaagcccggcaccccccccatcgccggcagaagcaccacccccaccagcagccccttcagagccaccagcaccagccccaacagccagagcagcaagatgaacagcatcgtgtaccagaagcagttccagagcgcccccgccaccgtgagaatgacccagcccttccccacccagttcgccccccagatcctgagccagcccaacctggtgccccccctggtgagagccccccacaccaacaccttccccgcccccgtgcagagaccccccatggccctggccagccagatgcccccccccctgaccaccggcctgatgagccacgccagactgccccacgtggccagaggcccctgcggcagcctgagcggcgtgagaggcaaccaggcccaggccgccctgaaggccgagcaggacatgaaggccaagcagagagccgaggtgctgcagagcacccagagattcttcagcgagcagcagcagagcaagcagatcggcggcggcaaggcccagaaggtggacagcgacagcagcaagccccccgagaccctgaccgacccccccggcgtgtgccaggagaaggtggaggagaagcccccccccgcccccagcatcgccaccaagcccgtgagaaccggccccatcaagccccaggccatcaagaccgaggagaccaagagctag

SEQ ID NO: 184925 - DNA, 8259 bp, Artificial Sequence
  derived and/or modified sequence
atgagcgagaagagcggccagagcaccaaggccaaggacggcaagaagtacgccaccctgagcctgttcaacacctacaagggcaagagcctggagacccagaagaccaccgccagacacggcctgcagagcctgggcaaggtgggcatcagcagaagaatgcccccccccgccaacctgcccagcctgaaggccgagaacaagggcaacgaccccaacgtgaacatcgtgcccaaggacggcaccggctgggccagcaagcaggagcagcacgaggaggagaagacccccgaggtgccccccgcccagcccaagcccggcgtggccgccccccccgaggtggcccccgcccccaagagctgggccagcaacaagcagggcggccagggcgacggcatccaggtgaacagccagttccagcaggagttccccagcctgcaggccgccggcgaccaggagaagaaggagaaggagaccaacgacgacaactacggccccggccccagcctgagaccccccaacgtggcctgctggagagacggcggcaaggccgccggcagccccagcagcagcgaccaggacgagaagctgcccggccaggacgagagcaccgccggcaccagcgagcagaacgacatcctgaaggtggtggagaagagaatcgcctgcggccccccccaggccaagctgaacggccagcaggccgccctggccagccagtacagagccatgatgcccccctacatgttccagcagtaccccagaatgacctacccccccctgcacggccccatgagattcccccccagcctgagcgagaccaacaagggcctgagaggcagaggccccccccccagctgggccagcgagcccgagagacccagcatcctgagcgccagcgagctgaaggagctggacaagttcgacaacctggacgccgaggccgacgagggctgggccggcgcccagatggaggtggactacaccgagcagctgaacttcagcgacgacgacgagcagggcagcaacagccccaaggagaacaacagcgaggaccagggcagcaaggccagcgagaacaacgagaacaagaaggagaccgacgaggtgagcaacaccaagagcagcagccagatccccgcccagcccagcgtggccaaggtgccctacggcaagggccccagcttcaaccaggagagaggcaccagcagccacctgccccccccccccaagctgctggcccagcagcaccccccccccgacagacaggccgtgcccggcagacccggccccttccccagcaagcagcaggtggccgacgaggacgagatctggaagcagagaagaagacagcagagcgagatcagcgccgccgtggagagagccagaaagagaagagaggaggaggagagaagaatggaggagcagagaaaggccgcctgcgccgagaagctgaagagactggacgagaagctgggcatcctggagaagcagcccagccccgaggagatcagagagagagagagagagaaggagagagagagagagaaggagctggagaaggagcaggagcaggagagagagaaggagagagagaaggacagagagagacagcaggagaaggagaaggagctggagaaggagcaggagaagcagagagagatggagaaggagagaaagcaggagaaggagaaggagctggagagacagaaggagaaggagaaggagctgcagaagatgaaggagcaggagaaggagtgcgagctggagaaggagagagagaagctggaggagaagatcgagcccagagagcccaacctggagcccatggtggagaagcaggagagcgagaacagctgcaacaaggaggaggagcccgtgttcaccagacaggacagcaacagaagcgagaaggaggccacccccgtggtgcacgagaccgagcccgagagcggcagccagcccagacccgccgtgctgagcggctacttcaagcagttccagaagagcctgccccccagattccagagacagcaggagcagatgaagcagcagcagtggcagcagcagcagcagcagggcgtgctgccccagaccgtgcccagccagcccagcagcagcaccgtgcccccccccccccacagacccctgtaccagcccatgcagccccacccccagcacctggccagcatgggcttcgaccccagatggctgatgatgcagagctacatggaccccagaatgatgagcggcagacccgccatggacatcccccccatccaccccggcatgatcccccccaagcccctgatgagaagagaccagatggagggcagccccaacagcagcgagagcttcgagcacatcgccagaagcgccagagaccacgccatcagcctgagcgagcccagaatgctgtggggcagcgacccctacccccacgccgagccccagcaggccaccacccccaaggccaccgaggagcccgaggacgtgagaagcgaggccgccctggaccaggagcagatcaccgccgcctacagcgtggagcacaaccagctggaggcccaccccaaggccgacttcatcagagagagcagcgaggcccaggtgcagaagttcctgagcagaagcgtggaggacgtgagaccccaccacaccgacgccaacaaccagagcgcctgcttcgaggcccccgaccagaagaccctgagcgccccccaggaggagagaatcagcgccgtggagagccagcccagcagaaagagaagcgtgagccacggcagcaaccacacccagaagcccgacgagcagagaagcgagcccagcgccggcatccccaaggtgaccagcagatgcatcgacagcaaggagcccatcgagagacccgaggagaagcccaagaaggagggcttcatcagaagcagcgagggccccaagcccgagaaggtgtacaagagcaagagcgagaccagatggggccccagacccagcagcaacagaagagaggaggtgaacgacagacccgtgagaagaagcggccccatcaagaagcccgtgctgagagacatgaaggaggagagagagcagagaaaggagaaggagggcgagaaggccgagaaggtgaccgagaaggtggtggtgaagcccgagaagaccgagaagaaggacctgccccccccccccccccccccccagccccccgcccccatccagccccagagcgtgcccccccccatccagcccgaggccgagaagttccccagcaccgagaccgccaccctggcccagaagcccagccaggacaccgagaagcccctggagcccgtgagcaccgtgcaggtggagcccgccgtgaagaccgtgaaccagcagaccatggccgcccccgtggtgaaggaggagaagcagcccgagaaggtgatcagcaaggacctggtgatcgagagacccagacccgacagcagacccgccgtgaagaaggagagcaccctgccccccagaacctactggaaggaggccagagagagagactggttccccgaccagggctacagaggcagaggcagaggcgagtactacagcagaggcagaagctacagaggcagctacggcggcagaggcagaggcggcagaggccacaccagagactacccccagtacagagacaacaagcccagagccgagcacatccccagcggccccctgagacagagagaggagagcgagaccagaagcgagagcagcgacttcgaggtggtgcccaagagaagaagacagagaggcagcgagaccgacaccgacagcgagatccacgagagcgccagcgacaaggacagcctgagcaagggcaagctgcccaagagagaggagagacccgagaacaagaagcccgtgaagccccacagcagcttcaagcccgacaaccacgtgagaatcgacaacagactgctggagaagccctacgtgagagacgacgacaaggccaagcccggcttcctgcccaagggcgagcccaccagaagaggcagaggcggcaccttcagaagaggcggcagagaccccggcggcagacccagcagacccagcaccctgagaagacccgcctacagagacaaccagtggaaccccagacagagcgaggtgcccaagcccgaggacggcgagccccccagaagacacgagcagttcatccccatcgccgccgacaagagaccccccaagttcgagagaaagttcgaccccgccagagagagacccagaagacagagacccaccagaccccccagacaggacaagccccccagattcagaagactgagagagagagaggccgccagcaagagcaacgaggtggtggccgtgcccaccaacggcaccgtgaacaacgtggcccaggagcccgtgaacaccctgggcgacatcagcggcaacaagacccccgacctgagcaaccagaacagcagcgaccaggccaacgaggagtgggagaccgccagcgagagcagcgacttcaacgagagaagagagagagacgagaagaagaacgccgacctgaacgcccagaccgtggtgaaggtgggcgagaacgtgctgccccccaagagagagatcgccaagagaagcttcagcagccagagacccgtggacagacagaacagaagaggcaacaacggcccccccaagagcggcagaaacttcagcggccccagaaacgagagaagaagcggcccccccagcaagagcggcaagagaggccccttcgacgaccagcccgccggcaccaccggcgtggacctgatcaacggcagcagcgcccaccaccaggagggcgtgcccaacggcaccggccagaagaacagcaaggacagcaccggcaagaagagagaggaccccaagcccggccccaagaagcccaaggagaaggtggacgccctgagccagttcgacctgaacaactacgccagcgtggtgatcatcgacgaccaccccgaggtgaccgtgatcgaggacccccagagcaacctgaacgacgacggcttcaccgaggtggtgagcaagaagcagcagaagagactgcaggacgaggagagaagaaagaaggaggagcaggtgatccaggtgtggaacaagaagaacgccaacgagaagggcagaagccagaccagcaagctgccccccagattcgccaagaagcaggccaccggcatccagcaggcccagagcagcgccagcgtgccccccctggccagcgcccccctgccccccagcaccagcgccagcgtgcccgccagcaccagcgcccccctgcccgccaccctgacccccgtgcccgccagcaccagcgcccccgtgcccgccagcaccctggcccccgtgctggccagcaccagcgcccccgtgcccgccagccccctggcccccgtgagcgccagcgccagcgtgagcgccagcgtgcccgccagcaccagcgccgccgccatcaccagcagcagcgcccccgccagcgcccccgcccccacccccatcctggccagcgtgagcacccccgccagcgtgaccatcctggccagcgccagcatccccatcctggccagcgccctggccagcaccagcgcccccacccccgcccccgccgccagcagccccgccgcccccgtgatcaccgcccccaccatccccgccagcgcccccaccgccagcgtgcccctggcccccgccagcgccagcgcccccgcccccgcccccacccccgtgagcgcccccaaccccgccccccccgcccccgcccagacccaggcccagacccacaagcccgtgcagaaccccctgcagaccaccagccagagcagcaagcagcccccccccagcatcagactgcccagcgcccagacccccaacggcaccgactacgtggccagcggcaagagcatccagaccccccagagccacggcaccctgaccgccgagctgtgggacaacaaggtggccccccccgccgtgctgaacgacatcagcaagaagctgggccccatcagccccccccagccccccagcgtgagcgcctggaacaagcccctgaccagcttcggcagcgcccccagcagcgagggcgccaagaacggccaggagagcggcctggagatcggcaccgacaccatccagttcggcgcccccgccagcaacggcaacgagaacgaggtggtgcccgtgctgagcgagaagagcgccgacaagatccccgagcccaaggagcagagacagaagcagcccagagccggccccatcaaggcccagaagctgcccgacctgagccccgtggagaacaaggagcacaagcccggccccatcggcaaggagagaagcctgaagaacagaaaggtgaaggacgcccagcaggtggagcccgagggccaggagaagcccagccccgccaccgtgagaagcaccgaccccgtgaccaccaaggagaccaaggccgtgagcgagatgagcaccgagatcggcaccatgatcagcgtgagcagcgccgagtacggcaccaacgccaagatggagagcgccagaaaggcctgggagaacagccccaacgtgagagagaagggcagccccgtgaccagcaccgccccccccatcgccaccggcgtgagcagcagcgccagcggccccagcaccgccaactacaacagcttcagcagcgccagcatgccccagatccccgtggccagcgtgacccccaccgccagcctgagcggcgccggcacctacaccaccagcagcctgagcaccaagagcaccaccaccagcgacccccccaacatctgcaaggtgaagccccagcagctgcagaccagcagcctgcccagcgccagccacttcagccagctgagctgcatgcccagcctgatcgcccagcagcagcagaacccccaggtgtacgtgagccagagcgccgccgcccagatccccgccttctacatggacaccagccacctgttcaacacccagcacgccagactggccccccccagcctggcccagcagcagggcttccagcccggcctgagccagcccaccagcgtgcagcagatccccatccccatctacgcccccctgcagggccagcaccaggcccagctgagcctgggcgccggccccgccgtgagccaggcccaggagctgttcagcagcagcctgcagccctacagaagccagcccgccttcatgcagagcagcctgagccagcccagcgtggtgctgagcggcaccgccatccacaacttccccaccgtgcagcaccaggagctggccaaggcccagagcggcctggccttccagcagaccagcaacacccagcccatccccatcctgtacgagcaccagctgggccaggccagcggcctgggcggcagccagctgatcgacacccacctgctgcaggccagagccaacctgacccaggccagcaacctgtacagcggccaggtgcagcagcccggccagaccaacttctacaacaccgcccagagccccagcgccctgcagcaggtgaccgtgcccctgcccgccagccagctgagcctgcccaacttcggcagcaccggccagcccctgatcgccctgccccagaccctgcagccccccctgcagcacaccaccccccaggcccaggcccagagcctgagcagacccgcccaggtgagccagcccttcagaggcctgatccccgccggcacccagcacagcatgatcgccaccaccggcaagatgagcgagatggagctgaaggccttcggcagcggcatcgacatcaagcccggcaccccccccatcgccggcagaagcaccacccccaccagcagccccttcagagccaccagcaccagccccaacagccagagcagcaagatgaacagcatcgtgtaccagaagcagttccagagcgcccccgccaccgtgagaatgacccagcccttccccacccagttcgccccccaggccaagcagagagccgaggtgctgcagagcacccagagattcttcagcgagcagcagcagagcaagcagatcggcggcggcaaggcccagaaggtggacagcgacagcagcaagccccccgagaccctgaccgacccccccggcgtgtgccaggagaaggtggaggagaagcccccccccgcccccagcatcgccaccaagcccgtgagaaccggccccatcaagccccaggccatcaagaccgaggagaccaagagctag

SEQ ID NO: 184926 - DNA, 8553 bp, Artificial Sequence
  derived and/or modified sequence
atgagcgagaagagcggccagagcaccaaggccaaggacggcaagaagtacgccaccctgagcctgttcaacacctacaagggcaagagcctggagacccagaagaccaccgccagacacggcctgcagagcctgggcaaggtgggcatcagcagaagaatgcccccccccgccaacctgcccagcctgaaggccgagaacaagggcaacgaccccaacgtgaacatcgtgcccaaggacggcaccggctgggccagcaagcaggagcagcacgaggaggagaagacccccgaggtgccccccgcccagcccaagcccggcgtggccgccccccccgaggtggcccccgcccccaagagctgggccagcaacaagcagggcggccagggcgacggcatccaggtgaacagccagttccagcaggagttccccagcctgcaggccgccggcgaccaggagaagaaggagaaggagaccaacgacgacaactacggccccggccccagcctgagaccccccaacgtggcctgctggagagacggcggcaaggccgccggcagccccagcagcagcgaccaggacgagaagctgcccggccaggacgagagcaccgccggcaccagcgagcagaacgacatcctgaaggtggtggagaagagaatcgcctgcggccccccccaggccaagctgaacggccagcaggccgccctggccagccagtacagagccatgatgcccccctacatgttccagcagtaccccagaatgacctacccccccctgcacggccccatgagattcccccccagcctgagcgagaccaacaagggcctgagaggcagaggccccccccccagctgggccagcgagcccgagagacccagcatcctgagcgccagcgagctgaaggagctggacaagttcgacaacctggacgccgaggccgacgagggctgggccggcgcccagatggaggtggactacaccgagcagctgaacttcagcgacgacgacgagcagggcagcaacagccccaaggagaacaacagcgaggaccagggcagcaaggccagcgagaacaacgagaacaagaaggagaccgacgaggtgagcaacaccaagagcagcagccagatccccgcccagcccagcgtggccaaggtgccctacggcaagggccccagcttcaaccaggagagaggcaccagcagccacctgccccccccccccaagctgctggcccagcagcaccccccccccgacagacaggccgtgcccggcagacccggccccttccccagcaagcagcaggtggccgacgaggacgagatctggaagcagagaagaagacagcagagcgagatcagcgccgccgtggagagagccagaaagagaagagaggaggaggagagaagaatggaggagcagagaaaggccgcctgcgccgagaagctgaagagactggacgagaagctgggcatcctggagaagcagcccagccccgaggagatcagagagagagagagagagaaggagagagagagagagaaggagctggagaaggagcaggagcaggagagagagaaggagagagagaaggacagagagagacagcaggagaaggagaaggagctggagaaggagcaggagaagcagagagagatggagaaggagagaaagcaggagaaggagaaggagctggagagacagaaggagaaggagaaggagctgcagaagatgaaggagcaggagaaggagtgcgagctggagaaggagagagagaagctggaggagaagatcgagcccagagagcccaacctggagcccatggtggagaagcaggagagcgagaacagctgcaacaaggccgaggaggagcccgtgttcaccagacaggacagcaacagaagcgagaaggaggccacccccgtggtgcacgagaccgagcccgagagcggcagccagcccagacccgccgtgctgagcggctacttcaagcagttccagaagagcctgccccccagattccagagacagcaggagcagatgaagcagcagcagtggcagcagcagcagcagcagggcgtgctgccccagaccgtgcccagccagcccagcagcagcaccgtgcccccccccccccacagacccctgtaccagcccatgcagccccacccccagcacctggccagcatgggcttcgaccccagatggctgatgatgcagagctacatggaccccagaatgatgagcggcagacccgccatggacatcccccccatccaccccggcatgatcccccccaagcccctgatgagaagagaccagatggagggcagccccaacagcagcgagagcttcgagcacatcgccagaagcgccagagaccacgccatcagcctgagcgagcccagaatgctgtggggcagcgacccctacccccacgccgagccccagcaggccaccacccccaaggccaccgaggagcccgaggacgtgagaagcgaggccgccctggaccaggagcagatcaccgccgcctacagcgtggagcacaaccagctggaggcccaccccaaggccgacttcatcagagagagcagcgaggcccaggtgcagaagttcctgagcagaagcgtggaggacgtgagaccccaccacaccgacgccaacaaccagagcgcctgcttcgaggcccccgaccagaagaccctgagcgccccccaggaggagagaatcagcgccgtggagagccagcccagcagaaagagaagcgtgagccacggcagcaaccacacccagaagcccgacgagcagagaagcgagcccagcgccggcatccccaaggtgaccagcagatgcatcgacagcaaggagcccatcgagagacccgaggagaagcccaagaaggagggcttcatcagaagcagcgagggccccaagcccgagaaggtgtacaagagcaagagcgagaccagatggggccccagacccagcagcaacagaagagaggaggtgaacgacagacccgtgagaagaagcggccccatcaagaagcccgtgctgagagacatgaaggaggagagagagcagagaaaggagaaggagggcgagaaggccgagaaggtgaccgagaaggtggtggtgaagcccgagaagaccgagaagaaggacctgccccccccccccccccccccccagccccccgcccccatccagccccagagcgtgcccccccccatccagcccgaggccgagaagttccccagcaccgagaccgccaccctggcccagaagcccagccaggacaccgagaagcccctggagcccgtgagcaccgtgcaggtggagcccgccgtgaagaccgtgaaccagcagaccatggccgcccccgtggtgaaggaggagaagcagcccgagaaggtgatcagcaaggacctggtgatcgagagacccagacccgacagcagacccgccgtgaagaaggagagcaccctgccccccagaacctactggaaggaggccagagagagagactggttccccgaccagggctacagaggcagaggcagaggcgagtactacagcagaggcagaagctacagaggcagctacggcggcagaggcagaggcggcagaggccacaccagagactacccccagtacagagacaacaagcccagagccgagcacatccccagcggccccctgagacagagagaggagagcgagaccagaagcgagagcagcgacttcgaggtggtgcccaagagaagaagacagagaggcagcgagaccgacaccgacagcgagatccacgagagcgccagcgacaaggacagcctgagcaagggcaagctgcccaagagagaggagagacccgagaacaagaagcccgtgaagccccacagcagcttcaagcccgacaaccacgtgagaatcgacaacagactgctggagaagccctacgtgagagacgacgacaaggccaagcccggcttcctgcccaagggcgagcccaccagaagaggcagaggcggcaccttcagaagaggcggcagagaccccggcggcagacccagcagacccagcaccctgagaagacccgcctacagagacaaccagtggaaccccagacagagcgaggtgcccaagcccgaggacggcgagccccccagaagacacgagcagttcatccccatcgccgccgacaagagaccccccaagttcgagagaaagttcgaccccgccagagagagacccagaagacagagacccaccagaccccccagacaggacaagccccccagattcagaagactgagagagagagaggccgccagcaagagcaacgaggtggtggccgtgcccaccaacggcaccgtgaacaacgtggcccaggagcccgtgaacaccctgggcgacatcagcggcaacaagacccccgacctgagcaaccagaacagcagcgaccaggccaacgaggagtgggagaccgccagcgagagcagcgacttcaacgagagaagagagagagacgagaagaagaacgccgacctgaacgcccagaccgtggtgaaggtgggcgagaacgtgctgccccccaagagagagatcgccaagagaagcttcagcagccagagacccgtggacagacagaacagaagaggcaacaacggcccccccaagagcggcagaaacttcagcggccccagaaacgagagaagaagcggcccccccagcaagagcggcaagagaggccccttcgacgaccagcccgccggcaccaccggcgtggacctgatcaacggcagcagcgcccaccaccaggagggcgtgcccaacggcaccggccagaagaacagcaaggacagcaccggcaagaagagagaggaccccaagcccggccccaagaagcccaaggagaaggtggacgccctgagccagttcgacctgaacaactacgccagcgtggtgatcatcgacgaccaccccgaggtgaccgtgatcgaggacccccagagcaacctgaacgacgacggcttcaccgaggtggtgagcaagaagcagcagaagagactgcaggacgaggagagaagaaagaaggaggagcaggtgatccaggtgtggaacaagaagaacgccaacgagaagggcagaagccagaccagcaagctgccccccagattcgccaagaagcaggccaccggcatccagcaggcccagagcagcgccagcgtgccccccctggccagcgcccccctgccccccagcaccctggcccccgtgagcgccagcgccagcgtgagcgccagcgtgcccgccagcaccagcgccgccgccatcaccagcagcagcgcccccgccagcgcccccgcccccacccccatcctggccagcgtgagcacccccgccagcgtgaccatcctggccagcgccagcatccccatcctggccagcgccctggccagcaccagcgcccccacccccgcccccgccgccagcagccccgccgcccccgtgatcaccgcccccaccatccccgccagcgcccccaccgccagcgtgcccctggcccccgccagcgccagcgcccccgcccccgcccccacccccgtgagcgcccccaaccccgccccccccgcccccgcccagacccaggcccagacccacaagcccgtgcagaaccccctgcagaccaccagccagagcagcaagcagcccccccccagcatcagactgcccagcgcccagacccccaacggcaccgactacgtggccagcggcaagagcatccagaccccccagagccacggcaccctgaccgccgagctgtgggacaacaaggtggccccccccgccgtgctgaacgacatcagcaagaagctgggccccatcagccccccccagccccccagcgtgagcgcctggaacaagcccctgaccagcttcggcagcgcccccagcagcgagggcgccaagaacggccaggagagcggcctggagatcggcaccgacaccatccagttcggcgcccccgccagcaacggcaacgagaacgaggtggtgcccgtgctgagcgagaagagcgccgacaagatccccgagcccaaggagcagagacagaagcagcccagagccggccccatcaaggcccagaagctgcccgacctgagccccgtggagaacaaggagcacaagcccggccccatcggcaaggagagaagcctgaagaacagaaaggtgaaggacgcccagcaggtggagcccgagggccaggagaagcccagccccgccaccgtgagaagcaccgaccccgtgaccaccaaggagaccaaggccgtgagcgagatgagcaccgagatcggcaccatgatcagcgtgagcagcgccgagtacggcaccaacgccaaggagagcgtgaccgactacaccacccccagcagcagcctgcccaacaccgtggccaccaacaacaccaagatggaggacaccctggtgaacaacgtgcccctgcccaacaccctgcccctgcccaagagagagaccatccagcagagcagcagcctgaccagcgtgccccccaccaccttcagcctgaccttcaagatggagagcgccagaaaggcctgggagaacagccccaacgtgagagagaagggcagccccgtgaccagcaccgccccccccatcgccaccggcgtgagcagcagcgccagcggccccagcaccgccaactacaacagcttcagcagcgccagcatgccccagatccccgtggccagcgtgacccccaccgccagcctgagcggcgccggcacctacaccaccagcagcctgagcaccaagagcaccaccaccagcgacccccccaacatctgcaaggtgaagccccagcagctgcagaccagcagcctgcccagcgccagccacttcagccagctgagctgcatgcccagcctgatcgcccagcagcagcagaacccccaggtgtacgtgagccagagcgccgccgcccagatccccgccttctacatggacaccagccacctgttcaacacccagcacgccagactggccccccccagcctggcccagcagcagggcttccagcccggcctgagccagcccaccagcgtgcagcagatccccatccccatctacgcccccctgcagggccagcaccaggcccagctgagcctgggcgccggccccgccgtgagccaggcccaggagctgttcagcagcagcctgcagccctacagaagccagcccgccttcatgcagagcagcctgagccagcccagcgtggtgctgagcggcaccgccatccacaacttccccaccgtgcagcaccaggagctggccaaggcccagagcggcctggccttccagcagaccagcaacacccagcccatccccatcctgtacgagcaccagctgggccaggccagcggcctgggcggcagccagctgatcgacacccacctgctgcaggccagagccaacctgacccaggccagcaacctgtacagcggccaggtgcagcagcccggccagaccaacttctacaacaccgcccagagccccagcgccctgcagcaggtgaccgtgcccctgcccgccagccagctgagcctgcccaacttcggcagcaccggccagcccctgatcgccctgccccagaccctgcagccccccctgcagcacaccaccccccaggcccaggcccagagcctgagcagacccgcccaggtgagccagcccttcagaggcctgatccccgccggcacccagcacagcatgatcgccaccaccggcaagatgagcgagatggagctgaaggccttcggcagcggcatcgacatcaagcccggcaccccccccatcgccggcagaagcaccacccccaccagcagccccttcagagccaccagcaccagccccaacagccagagcagcaagatgaacagcatcgtgtaccagaagcagttccagagcgcccccgccaccgtgagaatgacccagcccttccccacccagttcgccccccagatcctgagccagcccaacctggtgccccccctggtgagagccccccacaccaacaccttccccgcccccgtgcagagaccccccatggccctggccagccagatgcccccccccctgaccaccggcctgatgagccacgccagactgccccacgtggccagaggcccctgcggcagcctgagcggcgtgagaggcaaccaggcccaggccgccctgaaggccgagcaggacatgaaggccaagcagagagccgaggtgctgcagagcacccagagattcttcagcgagcagcagcagagcaagcagatcggcggcggcaaggcccagaaggtggacagcgacagcagcaagccccccgagaccctgaccgacccccccggcgtgtgccaggagaaggtggaggagaagcccccccccgcccccagcatcgccaccaagcccgtgagaaccggccccatcaagccccaggccatcaagaccgaggagaccaagagctag

SEQ ID NO: 184927 - DNA, 8454 bp, Artificial Sequence
  derived and/or modified sequence
atgagcgaaaagagtgggcagagtaccaaagcgaaagacggcaaaaaatacgccaccctttcacttttcaacacatacaaggggaagagcctcgagacacagaagacaacagctcgccacggactccagtccttgggtaaggtggggatcagtcgtcgcatgcccccccctgccaacttgccctcactgaaggcagagaacaagggtaacgatccaaacgttaacattgtgcctaaggacgggacggggtgggcatccaaacaggaacaacatgaggaagagaaaacaccggaagtgccaccggcacaaccaaaacctggagtggccgctccccctgaggtggccccagccccgaagtcgtgggccagtaataaacaaggtggacagggcgacggcattcaggtgaattctcagtttcagcaggagtttccaagcctgcaggccgccggcgatcaggagaagaaggaaaaagagaccaacgacgacaactacggaccgggaccatccctgaggcccccaaacgtggcctgctggagggacggtggaaaggccgcggggagcccaagtagctccgatcaagatgaaaaactcccaggacaggacgagtcgactgctggcacctcagagcagaacgatattctgaaggtggtagaaaaaagaatcgcctgcggaccaccccaggcaaagctaaacggccagcaagcggccctggcctctcagtaccgggcaatgatgcctccttacatgttccaacagtatccccgtatgacgtaccctccattgcatggtccaatgaggtttccaccgtccctgagcgagactaacaaaggattgaggggacggggaccacccccatcttgggcctccgagccagaaaggccttcgatcttgtcagccagcgagcttaaggagttggacaaattcgacaacctggatgccgaggcagatgaaggctgggcgggggcccagatggaggtagactatacggagcagctcaacttttcggatgacgacgagcagggatccaacagccccaaggagaataactccgaggatcaggggtccaaggcatcagaaaacaatgaaaacaagaaggaaacagatgaggtctccaataccaaatccagctcacagatcccagcccaaccgagcgtcgccaaggtcccgtacggcaaaggaccttcgtttaaccaagagaggggaactagctcgcacctcccacccccccccaaactgctggcccaacagcaccctccccctgatcgccaagctgtcccaggaaggcctggaccatttcctagtaagcagcaggtggccgacgaggacgagatttggaagcaaaggcgccggcagcagtccgagatttctgcagctgtggagcgagctcgtaagcggagggaagaagaggagcggcgcatggaggagcagcgaaaagccgcttgtgccgaaaagctgaaacgtttagatgagaaactcggcatcctggagaagcagcctagccccgaggaaatcagggagagggaacgcgaaaaggagagggagagagagaaggagctcgagaaggagcaggagcaagagagagagaaagaaagggagaaagatcgagagcgccagcaggaaaaggagaaggagctagagaaagaacaggagaagcaacgcgagatggagaaagagcgcaaacaggagaaggagaaggaactcgaaaggcaaaaagaaaaggagaaggaactgcagaaaatgaaggagcaagagaaggaatgtgagctggaaaaggaacgagagaaactcgaggaaaaaatagagcccagagaaccgaacctggaacctatggttgaaaaacaggaaagtgaaaacagctgcaataaggaagaagaacccgtcttcacccggcaggattccaaccgctcagaaaaggaggcaactcctgttgtccatgagactgaacccgaatccggctcacagcctcggccggccgtgttgagcggatactttaagcagttccagaagtctttaccaccccggtttcagcgtcagcaggagcaaatgaagcaacagcaatggcaacagcaacaacagcaaggggtactaccacagaccgtgccctcccagcctagctcatctactgtgccgccacctccccataggccactctaccagccaatgcagcctcaccctcagcacttagcgtccatggggttcgaccccagatggttgatgatgcagtcatacatggaccccagaatgatgagtggcagaccagctatggatattccccccattcaccccggaatgattcctcctaagccgttgatgaggagagatcaaatggagggcagccccaactcatcggagagcttcgagcatatagctcggtctgcaagagaccacgccatctccctgagcgagccccgcatgctctgggggtccgacccctatccccatgcagagccacagcaggccacaactcccaaagccacggaagagcctgaggacgttagatcagaggcagctctggaccaagaacagatcacagccgcatattccgtggaacataatcagctagaggcccacccaaaggcagactttatccgggagagcagtgaagcgcaagtgcaaaagtttctcagtagaagcgtcgaggacgtccgcccacatcacactgacgccaacaatcagtcggcttgtttcgaggcccccgaccagaagacactaagcgccccccaggaggagcgaatttccgccgtggagtctcagccatcacggaaacgaagtgtgtcgcacggcagcaaccacactcaaaagcccgatgagcagcggtctgaacctagtgcggggatccctaaggtgacgtccaggtgtattgattcaaaggaaccaattgagcgccccgaggagaagcctaagaaggaaggctttatcagatcatccgagggtcccaagcccgagaaagtttacaagtccaagtccgaaacacgttggggccccagacctagttcaaaccgacgcgaggaagtgaatgatagacctgtgcggcgctccgggccaataaagaagcctgtgttacgagatatgaaagaggaacgggagcaacggaaagagaaggagggggaaaaagctgagaaagttacagaaaaagtagtggtgaaaccagaaaagaccgaaaagaaggacctgccgcccccccctccacccccccagccacccgctcctattcagccccagtcagtgcccccacccatacagccagaggcagaaaagtttcccagcactgagaccgctacattggcccagaaaccaagtcaggacactgaaaagcccttagagccagtatccactgtacaggtagaacctgcggtgaagactgttaatcagcagacaatggcagcacctgtggtcaaagaggagaagcaacctgagaaggtgataagcaaggatctggtcatcgagcgccccagacccgacagcaggccagcagtaaaaaaagaatctactttgccaccacggacatactggaaggaagcccgcgagagagattggtttcctgatcaaggttatcgcgggagaggaaggggcgagtattatagtagaggcagatcatatagaggatcatacggaggccgagggcgaggcggcagggggcacactcgcgattatccccagtatcgagataacaagcctcgggctgagcacatcccaagtggaccactcaggcagcgcgaagagtctgagaccagatcagagagcagtgattttgaagtggtgcccaagcgtcggcggcaacgcggaagtgagaccgatacagatagcgagattcacgagtctgcctcagataaggatagcttgagtaagggtaagctgcctaagagggaggagaggcctgaaaataagaagccagtgaagccacattcttcatttaagcccgataaccatgtcaggattgacaatcgattattggaaaagccatacgtccgtgacgatgataaagctaagcccggatttctgcccaagggtgaaccgacaagacggggacgcggcgggacatttagaaggggcggaagagatccgggcggacgccccagtaggccaagcaccctcagacgccccgcatacagagacaaccagtggaacccgcgccaaagtgaggttcccaaacccgaggatggagagcctcccagacggcatgagcagtttattccaatcgccgctgacaaacgccctccaaagttcgaaagaaaatttgaccctgcccgggaacgcccccggaggcaacggcccacacgacctccccgacaggacaaacctccacgatttagacgcctgagggagcgggaggccgccagcaaaagcaatgaagttgttgcagtcccaacaaatggcaccgtgaacaatgtggctcaagaacctgtgaacacactgggtgatattagtggcaataagacccctgatctctccaatcagaatagttccgaccaggccaatgaggagtgggaaaccgcctcggaatcctccgatttcaatgagcgtcgtgagcgtgacgagaaaaagaatgctgatttgaacgcccagaccgtggtgaaggtgggagagaatgttctgcccccaaaaagagaaattgccaaacgatcctttagtagtcaacgacccgtggaccgccagaacaggagggggaataacggccctcctaagagcggaaggaatttctctgggcccaggaatgaaaggcgctcaggccccccttcgaagtctggcaagagaggcccgtttgatgaccaacccgccggcactaccggcgtggatctgatcaacggctcctccgcccaccatcaagaaggagtgcctaacggaactggtcagaagaattcaaaagactctacggggaaaaagcgtgaggacccgaaacccggccccaaaaagcccaaagaaaaagtagacgccttatcgcagtttgatctcaataactatgcctcggtggtgataattgacgatcaccccgaggtgacagtcattgaagacccacagtctaatctgaatgatgacggattcaccgaagtggtgagtaaaaaacagcagaagcgtctgcaggatgaggagcgtaggaagaaggaagagcaggtcatacaggtatggaacaaaaaaaacgccaatgagaaagggcggtcacagacatctaagctgcctcctcgattcgcaaaaaagcaggctacggggatccagcaggcccaaagttccgcatctgtgccgcccctggcatccgctccgttgcctcctagcacatctgcctccgtccctgcttccaccagcgcccctctccccgccactctgactccagtgccagcatcgacgtcggctcccgtgcctgccagcactctcgctcctgtcttggcatcgactagcgctccagtcccggcctctcctctcgcaccagttagcgccagtgccagcgtgtcagcctccgtccccgcatccacttcagctgccgccattacatctagcagtgctcctgcctctgcccctgcgcctacacctattctggcgtcggtgtcaactcctgcttctgttaccattctcgcgtctgcttccatccccatactggcctccgcactagcctcaacatccgcccctaccccggctccggctgccagctcgcccgctgctccagtgatcaccgcgcccactataccagcgagtgcacccaccgccagtgtccctctcgctcctgccagtgcctccgcgcccgccccagcccccacccctgtgtccgcccctaatccagcaccacctgctcccgctcaaactcaagcccagactcacaagccagtgcagaacccactccaaaccacatctcaatcttccaaacagccaccacccagtataagactcccaagtgcccagaccccaaacggcactgactacgtggcatctggtaaaagcatccagaccccccagtcacacggaactctcactgccgagctgtgggacaataaggtggctccccctgcagtgctgaatgacatcagcaagaagctaggacctatctctcccccccagcccccttcagttagcgcgtggaacaaaccactgactagtttcggctcagctccttcctccgagggagccaagaacggccaagaatcaggcttggagattgggaccgacaccattcaatttggcgccccagccagcaacggcaacgagaacgaggtggtacccgttcttagcgagaagtccgcagacaagattcctgagccaaaggagcagcgccagaagcaaccaagggcagggccaattaaagcgcaaaagctgccagatctctccccggtcgaaaacaaggaacataaacctggacccattggaaaggagagatccctgaaaaatcggaaggtcaaggatgctcagcaggtagagcccgaaggacaggaaaaaccctccccggcgacggtccgctctaccgaccccgttacaacaaaggagacgaaggcagtctctgagatgtcaacagaaattggcacaatgatctcggtgtcttccgcagagtatggaaccaatgcaaaagaatccgtgacagactacacaaccccatcttccagcctgcctaacactgttgctactaacaacacaaaaatggaagacaccttggtgaacaacgtacccctgccaaacaccctgcctttaccaaagagggagaccattcagcagagctcatcccttactagtgtgcctcctacaacattttccctaacctttaagatggaatcagctagaaaggcttgggaaaatagtccaaacgtccgtgaaaagggttctcccgtgacgagtacagccccacctatcgccactggggtttcgagttctgccagcggaccttcgacagccaattataatagcttctctagtgcaagcatgccacaaatcccagtggctagtgtaacgccaacggcgtccttatcaggcgccggcacatatactacatcatctctgtcaacaaagtccaccacaacgtccgacccccctaacatctgcaaggttaagccgcagcaactccaaacctcatcactgccctcagcttctcatttttcccagttatcctgtatgccatcgctgatcgcccagcagcagcaaaatcctcaggtttacgtgtcccaaagcgctgccgcccagatccccgcattctatatggatactagccacttgttcaatacccagcatgcccgcctggctccaccatcactagcacaacaacaaggcttccagcccggactgagccagccaactagtgtgcagcaaattccaataccaatctatgcccctcttcaaggacagcaccaggcccagctctccttgggagccggaccggcagtcagtcaggcccaggagctatttagctcgtccctgcaaccttaccgcagtcagccagcattcatgcagtccagcctgtctcagccgtcagtcgtgctgtctggtacggccattcacaacttccccaccgtgcaacatcaggagttagccaaggcccagtcaggtttggcgttccagcagacctctaacacccagccaattcccatcctgtacgaacatcaacttggccaggcaagcggcctgggagggtcccagttgatcgacactcacctcctccaggctcgagcaaatctgacccaggcctccaacctttattccggccaggtacagcagcccggacagaccaatttttataacacggcccaatctcctagcgccctgcaacaggtgactgtgccgttgccagcttcccagctctcactgccgaacttcgggagcacaggacagcccctcattgccctgccacaaactctgcagcctccattgcagcacactactcctcaggcgcaagcacagtctctaagtcgacccgcgcaagtgtctcagcctttccgcggacttatcccggctggcacacagcattccatgatcgctaccaccggcaaaatgagcgaaatggagttaaaggcttttgggagcggcattgatatcaagcccggcacgccacccattgctggacgatcaacaaccccaacgtcaagccccttccgtgcgacgagcacctcacctaattctcaaagcagtaagatgaattctatcgtataccagaaacagtttcagtctgcacccgccactgtgcgcatgactcagcctttccccactcagttcgctccgcaagctaagcagcgggccgaagttctccaatccacccagcgctttttcagtgagcagcagcaaagcaaacagattggcggcgggaaggcgcagaaggtggactctgactctagcaagcctccagagacgttgactgaccccccaggtgtgtgtcaggaaaaggtggaggagaagcccccgcccgccccatcaatagcaacaaaacccgtgcggaccggacccatcaagcctcaggccataaagaccgaagaaacaaagtcatag

SEQ ID NO: 184928 - DNA, 8697 bp, Artificial Sequence
  derived and/or modified sequence
atgtccgaaaagagcggccaaagcaccaaggccaaggatggtaaaaagtacgccacgctgagcctattcaacacttacaaaggcaagtccctagagacgcagaaaaccacagtggctgcccggcatggcctgcagagcctcggtaaagtgggaatcagtaggcgaatgccaccacctgccaacctcccatcactgaaggcagagaacaaaggcaatgacccaaatgtgaacatcgttccaaaggacggtacgggatgggcttcaaagcaagagcagcacgaagaggaaaagaccccagaggtgccccccgctcagcccaaacccggcgtggccgcacctcccgaagttgcccctgcaccaaagagctgggcgtcaaataagcagggtgggcagggggatggtatccaggtgaatagccagttccagcaagagtttcctagccttcaggcagcaggagatcaagaaaagaaagaaaaagaaactaacgacgacaattacggacccgggcccagcctgagaccccctaatgtcgcctgctggcgcgacggaggcaaggccgctggtagtcctagcagctccgaccaggacgaaaaactaccggggcaagacgagagtactgccggcactagtgaacagaatgatatactcaaggtggttgaaaaaagaatcgcatgtgggcctcctcaggctaaactcaatggccaacaggcagccttggcgtcacagtaccgcgccatgatgccaccttatatgtttcagcagtacccgcgcatgacttatccgccactgcacggacccatgaggtttccaccatcactgtctgagacaaataagggtctgaggggacggggccccccgcccagttgggccagtgaacccgagaggcctagtatcctgagcgccagcgagctgaaggagctggacaaattcgacaatctcgatgctgaggcagatgagggatgggccggggcccagatggaggttgattacacagagcagctgaactttagcgacgacgacgagcagggttcaaattcgcccaaagagaataattctgaagaccaaggaagtaaagcctctgaaaacaacgaaaataagaaagagacagatgaggtttcgaacaccaaaagcagttcgcagatccccgcccaacctagcgtggcaaaggttccctacgggaaaggcccctccttcaaccaagagagggggacttccagccacctgccaccaccgccaaaacttttagcccaacagcatcccccccccgaccgccaagcggtgcctggcagaccaggcccattccctagtaaacagcaggtggctgatgaggatgagatctggaaacagcgacgacgacagcagagtgagatctcagccgcagtcgagcgcgcaaggaagaggagggaggaggaggaaagaagaatggaagagcagcgcaaggcggcgtgtgctgagaaactcaagcggttagatgaaaaactgggaatccttgagaagcagccatctcccgaggaaattcgcgagagggagcgagagaaggaacgcgagcgggagaaggagctcgagaaagaacaggaacaagaaagagaaaaggaacgtgagaaggaccgcgagcgccaacaggaaaaagagaaggagctcgaaaaggagcaagaaaagcagcgggagatggagaaggaacgaaaacaggagaaggagaaagaattggagcgccagaaggaaaaagagaaggagctccagaaaatgaaggaacaggagaaggagtgtgagcttgaaaaggagagagagaagctcgaggagaagatcgagccacgagagcccaacctcgagcctatggtcgagaagcaggaatccgagaactcgtgtaataaggaagaagagccagtgtttactcgacaggactctaatcgctcagagaaggaggcaacgccagtcgttcatgagactgagcctgaaagtggaagtcaaccaagaccggcagtgctgagcggatacttcaagcaattccaaaagagtttgcctccgagattccagagacagcaggagcaaatgaagcagcagcaatggcaacaacagcaacagcagggggtactgccacaaacagtgccgagtcaacccagcagctctacagtgcctcctcccccacaccggccgttgtatcagcccatgcagccacacccacagcaccttgcttccatgggcttcgatcccaggtggttgatgatgcagagctacatggaccctcggatgatgtccggcagacctgctatggatatcccccctattcatccgggcatgatcccgcctaagccactaatgcgcagagaccagatggagggcagtccaaacagcagtgagtcattcgaacatattgcacgcagcgcaagagatcatgctatcagcctcagcgaacccaggatgctttggggatctgatccatacccccatgccgaacctcagcaggccacaacacccaaagcaaccgaggagcccgaggacgttaggtcggaagctgctctagatcaggaacaaatcacagctgcatatagtgtagagcacaaccaactcgaggctcaccccaaggccgattttattcgggaatcctcagaggcccaggtgcaaaagtttctctcccgctctgtggaagatgtcaggcctcaccataccgacgctaataatcagtccgcctgcttcgaggcaccggatcagaagacattgtccgctccacaggaggaaaggataagcgccgttgagagtcagccatcacgtaagaggagcgtgtctcatggctcaaaccacacacagaaacccgacgagcagcggtcagaacccagcgcaggcatacccaaggttacttccaggtgtattgacagcaaggaacctattgagcgtccggaagaaaagcctaaaaaagagggatttatccgttccagcgagggtcccaaacctgaaaaggtgtacaagtcgaaatctgaaacaaggtggggccctaggccgagctctaatcggcgggaagaggtgaatgatcgcccagtgcgccgcagcggccctattaaaaagcctgtactgcgtgacatgaaagaagagcgtgaacagcgaaaggagaaggagggagaaaaggccgaaaaggtgacagaaaaggtcgtggtgaagccggaaaaaaccgagaaaaaagacctacccccgcctcccccccctcctcagccccccgcacctatccaaccgcagtccgtccctccaccaattcagcctgaagccgaaaaatttccatctactgagactgcgacccttgcccagaagccatcccaagacactgagaagcctttagagccagtttccaccgtgcaggtagaacccgcagtcaaaaccgtgaatcagcagacgatggcggcacccgtggtgaaagaggagaagcagcccgaaaaggtgatctccaaagatcttgtgatcgaacgccccaggcctgactctcggcccgccgtaaagaaagagtccactctcccaccccgcacctactggaaagaggctagggagcgggattggtttcccgatcaggggtaccggggtaggggccgcggagagtactatagtaggggcagaagctatcgcgggagttatggcggtcggggacgtggcggtcgcggacacacacgagactacccccagtaccgtgataacaagcccagagccgaacatattccctccggacctctccgacagagagaggagtcagagaccagatctgaaagttctgattttgaagtcgttccaaaaaggcgaagacaacgtgggagtgagacagatactgactctgagatacatgagtctgcttcagacaaagattccttgagtaagggtaaacttcccaagagagaggagcgtccagaaaataaaaaacccgtgaaaccacactctagctttaaacccgacaaccacgtccggatcgataaccgactgctagagaagccttatgtccgggacgacgacaaggcaaagcctggctttttacctaagggtgagccgaccagaagggggcgaggcggtacatttaggcgcggtggtcgggatcccggcgggaggccatcccggccttcaacactacggcggccagcatatagagacaaccaatggaacccacgtcaaagtgaggtccctaaacctgaggacggcgagcctcctagacgccatgaacagtttataccaatcgcggcagacaaacgccccccaaagtttgagagaaagttcgacccagcgcgggaacggcctaggagacaacgtccgacacggcccccccgccaggataagccacctcggtttagacgtcttagggaaagggaggctgccagtaagtccaacgaggttgtagcagtcccaaccaatggaactgtcaacaacgtggcccaggaacccgtgaacaccctcggcgatattagtggtaataaaacccctgacctcagtaaccagaactctagcgaccaagccaatgaagaatgggaaaccgccagtgagagctcggatttcaatgaaagacgggagcgcgatgagaaaaagaatgctgaccttaatgctcaaacagtggtaaaagtgggggagaacgtacttccccccaagcgcgagatcgcgaagagatctttttctagccagagaccagttgacagacaaaacaggcgcggaaataacggcccccctaagtccggccggaatttctcgggacctcgcaatgaaaggcgtagtggaccgccaagcaagtcggggaagcgcggccctttcgatgatcagcctgctgggacaaccggggtagatttgattaacggaagctctgcacatcaccaggagggagtccccaacgggacaggccaaaagaattcaaaagatagcacgggaaaaaaaagggaggatcctaagccaggacctaaaaagcctaaagagaaagtggacgccttatctcagtttgatctgaataattatgcctcagttgtaattatagatgaccaccccgaggtgaccgtcattgaggatcctcagtctaacctgaatgacgatggattcacagaggttgtgtcaaaaaagcagcagaagcgcttgcaggacgaggaaaggcgtaagaaagaagagcaggtgattcaggtctggaataagaaaaacgccaatgaaaagggcagatcacagacttctaagcttcccccaaggttcgctaaaaagcaggccacaggtatccagcaagcccaatcttccgcgtccgtgccacctctcgctagtgcaccgttacccccaagcacttccgccagtgtcccagctagtacctctgcacctctgcctgccacactcaccccagtccctgcttctacatctgcgccagttccagcgtcaacgcttgcacccgtgcttgcatctacatccgcgcccgtgccggcttctcctcttgctccagtgtcagctagtgcatccgtgagcgcctccgtgccagccagtacttccgctgccgccatcactagttcctcggctccagccagcgctcctgcccccacacctatccttgcatcagtctccacccctgcatcagttactattttggcctcggctagcattcctatcctagcctctgcactggcaagtacatccgcgcccactcctgcacccgcagcctcatctccggccgctccggtgataacagcgccaacaattcccgcaagtgcccctacagcaagcgtccccttggcgcccgcctctgcctctgcccctgctcctgccccgacccctgtcagcgcacctaatccagctccccctgcaccagcgcagacgcaggcacaaacccataaaccagtccagaacccgcttcaaacaacctcgcagtcttctaagcagcctcccccaagcattcgactgcccagcgcgcaaactccgaacggcaccgactatgtggcgtctggcaagtcaattcaaaccccccagagtcacggaacactgactgcggaactatgggacaacaaagtggctccccctgccgtgcttaatgatatctccaaaaagctcggaccgatcagccccccccagccccccagtgttagcgcctggaacaagcccctgacgtcattcgggagcgcgccaagctctgaaggagcaaagaacggccaggagtcagggctcgagatcggcaccgataccatccagttcggcgccccagcatcgaatggaaatgagaatgaagtggtcccagtactaagcgaaaaaagtgctgataagattcctgagcccaaggagcagcgtcagaagcaaccaagagctggccccatcaaggctcagaagctccccgacttaagcccggttgagaacaaggagcacaagcctgggcctattgggaaagaaaggtcacttaaaaaccgaaaagtgaaggatgcacagcaggttgaacctgaaggacaggagaagcccagccctgccaccgtgcggagcacagaccccgtaaccactaaagagaccaaggctgttagcgagatgtctaccgagatcggcactatgatatcggtctccagtgctgagtacgggaccaacgccaaggaatcagtaaccgactatacaaccccctcgagcagcctgcccaacaccgtggccactaacaacaccaaaatggaggatactctggtgaacaatgttccactcccaaacacattgcctctgccgaagcgagaaaccatccagcagtccagctctcttaccagcgtgcctcccactacattctcactgacattcaagatggagtccgcccgaaaggcctgggagaactcccccaacgtcagggaaaagggtagcccagtcaccagtaccgcaccaccaatcgccacaggtgtgtccagcagcgctagcgggccctcgactgccaattacaattccttcagctccgcctctatgccccagattccggttgcgtctgtgacacccaccgcgagccttagcggtgccggcacttacactaccagttctctttcgaccaagagtactaccacatctgatcctcccaatatctgtaaggtgaaaccgcaacaactgcagacttcatcactccctagtgcatcccacttcagccaactatcttgtatgccgtccctcatagcgcagcagcagcagaacccacaagtttatgtgtcgcagagcgccgctgcccagatcccagctttttatatggacacttcgcatctattcaacacccagcatgctagactggcacctccctctcttgcccagcagcagggattccaacccgggcttagccaaccgacgtctgtacagcaaatcccaattcccatttatgccccactccaggggcagcaccaggcacagcttagcctgggcgccggaccagcagtgtctcaagcgcaagaactattcagttcatccctccagccgtatcgctcccagccagcgttcatgcaatcctctctgagccagcctagcgtggtcctgagcggcaccgccatacacaatttcccaacagtacaacaccaagaacttgcgaaggcccagagcggtcttgcattccagcagacctctaacacccagcccatacctatcctgtacgaacaccagttaggtcaggcaagtggattagggggatcccagcttattgatacccaccttctgcaggcccgcgcaaacctcactcaggcttctaacctgtattcggggcaagtacagcaaccgggtcagaccaatttctacaacactgcacaaagcccatccgcactccagcaagtgactgttccgctgcccgcttctcagcttagtctcccaaacttcggttcaaccggacagcccctgatagctttgccccagacactccagccacctttgcaacatacaactccccaggctcaggctcagtctctgtcacggccggctcaggtttcacagcctttcagaggtttgatccccgcgggcacacagcactcaatgatagctacaaccggcaaaatgtcagaaatggagctgaaggcctttggctccggcatcgatatcaagcccggaactccccctattgccgggcgttcaacaacccctacaagttctccattcagggcaacaagtacctctcccaattctcagtcctcgaagatgaactctatcgtttatcagaaacagtttcagagcgctccagcgacggtccggatgacccagccatttcctactcaatttgcacctcaaatactaagtcaaccgaatctggttccgccgctagtccgggctccccatacaaacacgtttcctgctcccgtgcagagacccccaatggcactcgcatcgcagatgccacccccattgactacaggcctgatgagtcacgcacggctgccacacgtagcccgcggcccatgcgggagcctgtccggagtccgaggaaaccaggcccaggcggccctcaaggccgaacaggatatgaaggctaaacagagggctgaagtgttacagtccacacagaggtttttcagtgaacagcagcaaagcaaacagattggcggaggtaaggcacagaaagtcgactcagactccagtaaacctcctgagacgctgacagacccccctggtgtctgtcaagaaaaggttgaggaaaaacccccaccggcgccttcaatcgctacgaagcccgtgaggaccggtcctatcaagccccaggctatcaaaacagaagaaacaaagtcatag

SEQ ID NO: 184929 - DNA, 7962 bp, Artificial Sequence
  derived and/or modified sequence
gttcctaaccagatgtttcaacagtaccctcggatgacttatccccctcttcacggaccaatgcgattccccccctccctgagcgagaccaataaggggttgcgcggccgcggtcctcccccatcctgggccagcgagcccgaaaggccaagcatcttgagtgcttccgaacttaaggagttggacaagtttgacaaccttgacgcggaagcagatgaggggtgggcaggcgcgcagatggaggtcgattacaccgaacagctgaacttctccgacgacgacgagcagggatcgaacagcccgaaggagaacaattctgaggaccaaggttcaaaagcttctgaaaacaacgagaacaagaaggagaccgacgaagtgtctaataccaagtcaagcagtcagatccctgcacaacctagcgtggctaaagtcccctacggtaagggacctagctttaatcaggagcggggcacaagttcccacctgcccccacctccaaagttactggctcagcagcatccacctccagacaggcaagcagttcctggcagacctggcccctttccaagcaaacagcaagtggcggacgaggacgagatatggaagcaaaggcgaaggcagcagagcgagatctctgccgccgtcgaacgggcaaggaagcgacgcgaggaggaagaaaggcgtatggaggagcagcgtaaagccgcttgtgctgagaagctgaaacggctggacgagaaactgggaattttggagaagcagccaagccccgaagagataagagagagggaaagagaaaaagaaagggagcgagagaaagagttggagaaagaacaagaacaggagagggagaaagagcgggagaaagacagagagcgacagcaggagaaagagaaagaactggagaaagaacaagaaaagcagcgggaaatggagaaggagcgtaagcaagagaaagaaaaggaattagaaaggcaaaaggagaaggaaaaagaattacagaaaatgaaggagcaggagaaagagtgcgagctagaaaaagaacgtgagaagttagaagaaaaaattgaaccccgagagcctaatctggagcctatggtggagaagcaggagagtgaaaatagctgcaacaaggccgaggaggagcccgtgttcactcggcaagacagcaacaggagcgagaaagaagctacacctgtggtgcacgaaaccgaacctgagtcaggtagccagcccagacctgcagtcctgtccggttacttcaaacagtttcagaaatcactccccccccgctttcagcggcagcaggagcagatgaaacagcaacagtggcagcagcaacagcagcagggcgtgttaccgcagacagttccgagccagccatcctcctctactgtgccccccccaccccaccgcccattgtatcagccaatgcagccacatccacaacatctggcaagtatgggttttgaccctagatggctcatgatgcagtcttacatggacccgcggatgatgtctggcagacccgccatggacattccaccaatacatcccgggatgataccccccaagccgctcatgagacgagaccagatggaaggaagtcccaatagttcagagagtttcgagcatatcgctaggtccgcacgtgaccatgccatatctctatcagaaccaaggatgctgtggggtagcgatccttacccacatgcagagccacagcaagccaccactcccaaggctactgaggaacctgaggacgtccgatcagaagccgctctggaccaggagcagataacagccgcatattcagtagagcacaatcagctggaggcacaccctaaagctgacttcatacgtgagtcaagtgaagctcaggtccagaagttcctcagtcgctccgtggaggacgtgagacctcaccatacagatgccaataaccagagtgcgtgcttcgaagcgcctgatcagaagactctgagcgcccctcaggaggagagaatcagtgctgtggagtctcagccatccaggaagaggtctgtctctcatggatcgaaccacactcagaaacccgatgagcagcggtccgaacctagtgcaggcataccgaaagtgacctcgaggtgtattgattcaaaagagcctatagaaagacccgaagaaaagcccaagaaggagggttttatcagatcgtccgagggccccaagccagagaaggtgtataagagcaaaagcgagactagatgggggccccgcccctcctcaaaccggcgtgaggaagttaacgaccgaccagtccggcggtccggccccatcaagaagcctgtcttgagagatatgaaggaggagcgcgaacagagaaaggagaaagagggagagaaggccgagaaggtgacggaaaaagttgtggtgaagccagagaagacggaaaagaaggatctgccgccaccacccccaccgccccagcccccagctccaatccagcctcagtcagttcccccacccatccaaccagaagccgagaaatttcccagtacagaaacggctacactcgcccagaaacctagccaggataccgaaaagccactggagccagtaagtaccgtgcaggtcgaacccgccgttaagaccgtgaatcagcaaaccatggcagcccccgtagtgaaggaggagaaacagcctgagaaggtcatcagcaaagatttagtcatcgagcgcccacgaccagactccagaccagccgtgaaaaaggaaagtaccttgccgccacgcacttattggaaagaggcgagagaaagggactggttccccgatcagggttatcgtggacggggccggggcgaatactactcccgcgggcgctcttaccgcgggagctatgggggtcgggggcggggaggcagaggacatacacgggactatccacagtaccgcgataataaacctcgcgcagagcacattcctagtggtccactgcgccagcgagaggagtccgagacgcggtccgaaagtagcgacttcgaagtcgttccaaaacgtcgacgacagcgaggatctgaaactgacacagacagcgagatccacgaatccgctagcgacaaggattccctgtctaagggcaagctacctaaaagagaagaacgcccagagaacaaaaagccagtgaagccccattcaagctttaaaccagacaatcatgtgcgaatcgataacagactccttgagaaaccgtacgtacgagacgatgataaggctaagcctggctttctgccaaagggtgaacccacaagacgaggacgcggaggaaccttccgacgaggagggagagatcccgggggaagaccttcaaggccatcgacactaaggcggcccgcataccgggataatcaatggaacccccggcagtctgaggtgccaaaaccagaggacggcgagcctccgaggagacatgaacaattcatccccatcgccgcagataagaggcctcctaaattcgaacgtaagtttgatccggctagagagagaccacgtagacagaggcccactcggcccccgcgccaggataagccaccccggtttcggcggttacgcgagcgcgaggccgcctctaaaagcaatgaggtagtagccgtaccgactaacggcactgttaataacgtcgcacaggagccggttaacactctcggtgatatctccgggaataaaacgcccgatctgtctaaccagaattcgtccgatcaggccaatgaggagtgggagacagcttctgaatcctcagatttcaacgaacgcagggaacgcgatgaaaaaaagaacgccgacctgaacgctcagaccgtggtgaaggttggcgaaaacgtgcttccgcccaaacgggaaatcgccaaacggagcttctcatcacagcgcccggtcgaccggcagaaccgaagaggtaacaatggtcctccaaagtcgggtcgaaattttagcggaccgcgcaacgaaagaaggtccggtcctcccagcaaatctggaaaaaggggtcccttcgacgatcagcccgcgggtactacaggagttgatctaatcaatggaagttcagcccaccaccaggagggcgtgcccaatggaactggacagaaaaattccaaggatagcacaggaaagaaaagagaggatccgaaacctgggccaaagaagcctaaggagaaagtggacgctctcagccagttcgacctgaacaattatgcctctgttgttataatagatgaccatccggaggtaacagtgattgaggatcctcagtctaacctgaacgatgacggcttcaccgaagtagtgtctaagaagcagcaaaagcgtctgcaggatgaggagcgccgcaaaaaagaagagcaggtcatacaggtgtggaacaagaagaatgctaacgagaaaggccgttcacaaacctctaaactacccccacgcttcgctaagaagcaggccactgggatccaacaggctcagagcagtgcatcagtcccacccctggcatccgctcccctaccaccctcaacatccgctagcgttcccgcaagtacctccgccccgctgcccgcgacattgaccccagttccagcttccacctccgcccccgtgccagcatccaccctcgcaccggtgctggcttcaacctccgcgcccgtgcctgctagcccactggccccggtcagcgcgtctgccagtgtatccgcgagcgttcctgcctcaacttctgctgcggcgatcacttcttcctccgcacctgcatccgctccggccccaacccctatacttgccagcgtttccacacccgcctctgtgacaatactagcatccgccagtataccaatcctggcctccgccctggctagtactagcgcccccacgcctgctcctgctgctagctcccccgccgcgcccgtgatcacggctcctacaattcctgccagtgcacctacggcctccgtgcccctcgctccagcatcagccagtgcccctgccccggctccgacacctgttagtgctcccaatcccgctcctcctgcgcctgcccagacacaggctcaaactcacaaacccgtccagaaccccctgcagaccacaagtcagtcaagtaagcagccgccgcccagcattcgtttgccctccgcccagactccgaatggtactgactacgtggcctcaggcaaatccatccagacacctcagagccatggaaccctaacggccgaattatgggacaacaaggtggccccccccgctgtgctgaatgatataagcaagaaactgggccccatttcacctccacagccccccagcgttagcgcatggaataagccgctgacgtcctttggttcagctcccagtagcgaaggggccaagaatggacaggagagtggactagagatcggcaccgacactatccagtttggagcacctgcgtctaacggcaatgaaaacgaggtggtccccgtcttgagcgaaaaatccgctgacaagattccagagcccaaagagcagcggcaaaaacagccgcgcgcggggccaatcaaggcccagaagctgcctgatctgtcccccgtggagaacaaagaacataagcccggcccgatcggcaaggagagaagcctgaaaaatagaaaagtcaaggacgcccaacaggttgagcccgaggggcaggaaaaaccgagtcccgccaccgttagatccactgatcccgtgactacaaaagagacaaaggccgtgtctgagatgagcactgagataggtactatgatctctgtatccagcgcagagtatggaacgaacgccaaagagtcagtgactgattacaccacaccatcatcaagcctgcctaacaccgtggccacgaataacactaaaatggaggatactctggttaacaatgttcccctgcctaacactctgcccttgccaaaaagagaaactatccagcagtcaagctcacttacatctgtccctccaacaacctttagcctgacattcaaaatggaatccgctagaaaagcttgggaaaattcacccaatgtccgggaaaaaggcagtccagtcacctccacagccccacctatcgccacgggagtatcctcttccgccagtggcccaagtactgctaactacaattcttttagttccgcttccatgccacagataccagtcgccagtgtgacacctacggcctcgctgtccggagccgggacgtacacaacatctagtctcagcaccaaatctactacgacctctgaccctccaaacatttgcaaggtgaaaccccaacagctgcagaccagtagtttgccgagcgcctctcatttttctcagctgtcatgcatgccctccttaattgctcaacaacaacaaaatccccaggtctatgtgtcacagtctgctgcagcccaaataccagccttttatatggatacatcacatctattcaacacgcagcatgcccggctggcaccaccatctctcgctcaacagcaaggcttccagcctggtttgagccagccaacatccgtgcagcaaattcccattcctatatacgctccccttcaaggacagcatcaggcacagttgagcctgggcgctggtcctgccgttagtcaggcccaggaattattctcaagttccctccagccctacagatcccagcctgcgttcatgcagagctccttaagccagcccagtgtggtgctgagtggtaccgctatccacaactttccaaccgttcagcatcaggagttggcgaaggcacagagcgggttagcgtttcaacagacctccaacacacagcccatacctatcctgtatgagcatcagctgggacaggcatccggattgggaggatcgcaactcatagatactcacctgctgcaagctagggccaatttgacacaggcaagcaatctgtactcagggcaggtgcagcagccaggtcagaccaacttttataacaccgctcagagcccctccgcactgcagcaagtgaccgtaccattgccagcttcacaactgtccctgcccaacttcggatcaactggccagcctcttattgctctgccgcagactctgcagccccccctccagcacacaactccccaggcccaggcgcagagccttagcagacctgcccaagtgagccaacccttccgtggtctcatccctgcgggcacacaacattctatgatcgcgactacggggaaaatgagtgagatggaactgaaagcgtttggtagtggcatagacattaagcccggcacgccccctatcgctggcaggtccacgaccccaaccagctccccttttcgtgcaaccagcacctcgcctaatagccagagctctaagatgaattcaatcgtttatcagaaacagttccaaagcgccccagccactgtccgaatgactcagccctttcccacacagtttgccccccagatactttcccagccaaacctagtcccgcccctggtgcgagccccacatactaatacctttccggcacctgtgcaacgccctcccatggctcttgcctcccaaatgccacctcccctgaccaccggtttaatgagccatgccagacttccccatgtggctcgaggtccatgcgggtctctgtctggcgttcggggaaaccaggcgcaagctgccctaaaagctgaacaggacatgaaggcaaagcagagagcagaggtcctgcagtccacccagcgatttttttccgagcagcagcagagtaagcagattggcggtggcaaagcccagaaagttgactcagatagtagtaagccccccgaaacgctcacagacccaccaggtgtttgtcaggaaaaggtcgaggaaaagcctcctccagcccccagcatcgccaccaaaccggttaggactgggccgatcaaacctcaagctatcaagaccgaggagacaaagtcttag

SEQ ID NO: 184930 - DNA, 8259 bp, Artificial Sequence
  derived and/or modified sequence
atgagtgaaaaaagcggccagtccaccaaggcaaaagacgggaagaagtatgctacactgtcactctttaatacctacaaaggcaagagccttgaaacacagaagaccaccgcaaggcacgggctccagtccctgggtaaggtcggcattagtcgacgaatgccaccccctgcaaacctcccttccttgaaagctgagaataagggaaacgatccgaatgtgaatatcgtaccaaaggacggaactggatgggcgtctaagcaagaacagcatgaggaggaaaaaactcctgaggtgcctccggcgcagcctaaacccggagtggccgccccccctgaggtggcgccagcgccaaaaagctgggcgtcgaacaaacagggaggccaaggagacgggattcaggtgaattctcagttccaacaagagtttccaagcttacaggccgcgggggaccaggagaaaaaggagaaggaaaccaatgacgataactacggcccgggcccaagcctccgcccaccgaacgtcgcctgctggagagatggtggtaaggccgcgggtagcccgagctccagtgaccaggacgaaaaacttcctggacaggacgagtcaacggcgggcacgtccgaacagaatgacatactcaaggtggtcgagaagcgaatagcgtgcgggcccccacaggcaaaactgaatggccaacaggctgcgctagcatctcagtatcgcgccatgatgccgccttacatgttccagcaatatccacgaatgacgtacccaccccttcacggtcccatgcggttcccgccttctctgagtgagaccaacaagggtttacgcggcagaggcccccccccgtcctgggcatccgagcccgagaggccttcaatcctttcagcaagcgaactgaaagaattggataagttcgacaacctggacgccgaggccgatgaaggatgggcgggggcccaaatggaggtggactatacagagcagctgaatttttccgacgacgatgagcaggggtctaacagcccaaaagagaataattctgaggatcagggctcaaaagcctcagagaataatgagaacaagaaggaaactgacgaagtttcgaacactaagtcatcatcccaaatcccagcgcagccctccgtcgccaaagtgccctatggcaaaggacctagtttcaaccaagaaagaggaacatcaagtcatctgcctcctcccccgaagcttttagcccagcagcaccccccacccgacaggcaggcggtgccgggtaggcccggcccttttccgagcaagcagcaggttgctgatgaggacgagatctggaagcagcggaggcggcagcagagtgaaataagcgctgctgtcgaacgggcacgaaagagaagagaggaggaagagagaagaatggaggagcagaggaaagcagcttgtgctgagaaactgaaaaggctggacgaaaaactgggaatccttgaaaagcagccttctccggaagaaattcgggaaagagagagggagaaggagcgtgagcgcgagaaagagctcgagaaggagcaggaacaggagagggagaaagagcgcgaaaaggatcgcgagaggcagcaggagaaggagaaagaactagagaaagagcaggagaaacagcgagagatggaaaaggagcgcaaacaggaaaaggagaaagaactggagcgccaaaaagagaaggagaaggagttgcaaaagatgaaagagcaagaaaaggaatgtgaacttgagaaggaacgggagaaattagaggaaaaaattgaaccacgggagccaaacttagagcctatggtggaaaaacaggagagtgagaactcttgtaataaggaggaggaaccagtgtttaccagacaggatagcaaccgctccgagaaggaggccacccctgtggtgcacgagacagaaccagagagtggatcccagccccgaccagccgtcttgagcggatattttaagcaattccagaaatcactccctcccagattccagaggcaacaggagcagatgaaacagcaacagtggcagcagcagcagcagcagggggtgttgcctcagactgtgccaagccagccgagtagttccaccgtgccgccccccccacacaggccgctgtatcagcctatgcagccccacccccagcacctcgcctccatgggctttgacccccggtggttaatgatgcagtcatatatggaccccaggatgatgtctggacgtcccgcgatggacatcccaccgatccaccccggtatgattcccccgaaaccactcatgaggagagaccagatggagggcagtcctaactcatcagagagctttgagcacatcgctagaagtgctcgtgatcacgcaatatctctgagtgaaccgcgcatgctgtgggggagcgatccttatccccatgccgaaccccagcaggccacgacacccaaagctaccgaagaacctgaagacgtgagatccgaggctgcactcgaccaggaacaaataaccgctgcatattcagttgaacacaaccaactagaggcccacccgaaggctgattttatcagagaaagttccgaggcacaggtgcagaaattcctttctcggagcgtcgaagacgtgaggccccaccacaccgatgcgaacaatcagtccgcgtgcttcgaggcacccgaccagaagactttatctgccccacaggaagaaaggatttctgctgtagagagtcaaccttccaggaagaggtctgtatcacacggatccaatcatacccaaaaacctgatgagcagaggtcagaaccctccgctggaatcccaaaggtgacgagtcgttgtattgactccaaagaacccatcgaaaggcccgaggagaaaccaaagaaggagggatttatacgctcatcagagggcccaaagcccgagaaagtgtataaatctaaaagtgaaacgagatgggggccacggcctagctcaaatcgccgggaagaggtaaacgatagacctgtgcgtcggagtggcccaattaaaaagcccgtcctccgagatatgaaagaggaaagagaacagcgcaaagagaaggaaggggaaaaggccgagaaggtgacggagaaggtcgtggtgaaaccagagaaaaccgagaagaaggacttgccaccgcccccgcctcctccacagcccccggcgccaattcagccgcagagcgtgccaccccccatccagccagaggcagaaaagtttccatcaaccgaaacggcaactcttgcccagaagccttctcaagacacagagaagcccctggagccagtgtcaaccgttcaggttgagcccgccgtgaagactgtgaaccagcagacaatggctgcccctgtcgtgaaagaggagaagcagcccgaaaaggttatctctaaagatttagtgatagaaagacctcggccagatagccgccctgcagtgaaaaaagagagtactctcccccctcgaacatattggaaagaagcccgcgagcgggactggttccctgaccagggttatagggggcgagggcggggagagtactactcccgcggccgttcatatagggggtcgtacggcgggcgcggaagaggagggcgcgggcatacccgggattatccccagtatagggataataagccgcgggctgaacatataccttcgggccccttgagacagcgggaggaatccgagacccgctccgaatccagtgatttcgaagtcgtccctaagaggaggagacagcgaggatccgaaaccgacaccgactccgaaatacacgagtctgcatctgacaaggacagcctcagcaagggcaaacttccaaagcgcgaagagcgccccgagaacaagaagccagtcaagccccacagcagtttcaagccagacaaccacgtgaggattgacaaccgtctgctggagaagccctacgttcgggacgacgacaaagccaaacccggattcctgcccaaaggggagccaacccggcggggaagaggcggcacgttcaggaggggcgggcgtgatcccggaggcaggccttcaagacctagtaccctgaggaggccagcgtaccgggataatcaatggaatccaaggcagagcgaggtgcctaagccggaagacggcgagccccccaggcgccatgagcaatttattccaatcgcagccgataagcgccctccgaagttcgaacgtaagttcgatccggctagagagcgacctcgcagacagcgtccgacccgcccccccaggcaagacaagccccctaggttccgcagacttcgagaaagggaagctgcaagcaagtctaacgaggtggtggccgtgccaaccaatgggacagtaaacaacgtcgcccaagagcctgtgaacaccttgggagacatttctggcaacaagacacctgatttgtcaaatcaaaattctagcgatcaggccaacgaagagtgggaaacagccagcgagtcttccgacttcaatgagcgacgagaacgcgacgaaaagaaaaatgctgatctcaatgctcaaactgtggttaaagtgggagagaacgtgctaccgcctaaacgggaaatagccaagagatcattttcaagtcagaggcctgttgatcgccagaataggaggggtaataatgggccgcccaagagcggacgtaatttctccggacctcgtaacgaacgccgaagtggtccaccatcaaagtctggcaaaaggggccctttcgatgaccaaccggcgggaacgaccggggtagacttgatcaacggcagtagcgcccatcaccaggagggagtgcctaacggcaccggtcagaaaaatagtaaggatagcactgggaaaaagcgggaggaccctaaaccgggaccaaagaaacctaaggagaaagtagacgccctgtcacagtttgatctgaataactacgcatctgtggtcataattgatgaccatcccgaagtgactgtaattgaggatcctcagtcaaacctgaatgatgatggatttacagaggtagtgtctaagaagcagcagaaaagattacaagacgaagaacggaggaagaaggaggagcaggtgatccaggtatggaataaaaagaatgcgaacgagaagggccgtagccagacgagtaagctgccaccaaggtttgccaaaaagcaggcaacagggattcagcaggcacagtcctccgccagtgttccacccctggcttcagcacctctgcccccctctacaagcgcatctgttcctgccagtactagcgctcctctgcccgccacgctgacgcctgttcctgcttccacgagcgctccagttcccgcaagcacgcttgctcccgttctggcttctacttccgctcccgtccccgccagcccactggcccccgtgagcgcaagcgcttctgtaagcgcatccgttcccgcctctacgtcagctgcagcgattactagttccagcgcccctgcatctgcccccgctcctactccaatattggcaagcgtgagcacccctgcgtcagtgacgatcctggcttctgcgagcattcccatactggcgtctgctttagcttccacaagcgcccctactcctgcgccagctgccagcagcccagcagctccggtgatcaccgcccctaccataccggcgagcgcccccactgcatctgtgcccctcgctcctgcatccgcgtcagcaccagccccagcccccacccctgtttcagctccaaatccagccccgccagcccccgcacagactcaggcccagacgcataagcctgtgcagaaccccctgcagacaacctcacagtcctccaagcagccccctccctctatccgtcttccatccgcccagacgccaaacggaactgattacgtggcgtctggcaaaagtatacaaacaccacagtcacacgggacgctaactgccgagctttgggacaacaaagtcgcaccaccggccgtactgaatgatatatctaagaagctcgggcctataagtcccccgcagccccccagtgtgtccgcctggaataaaccactcaccagttttggatctgccccatcctctgaaggcgccaagaatggccaggaatctggtctcgaaattggcactgataccatccagttcggggctccagccagcaacgggaatgagaacgaggtcgtcccagtgctgtccgagaaaagtgcagataagatccccgagccaaaagaacagcggcagaagcagccaagagcgggaccaattaaggcccagaaattacctgacttatctccagtagaaaacaaggaacacaaaccaggacccataggtaaggaacggtccctgaagaaccgaaaagtaaaggacgcgcagcaggtggagccagagggccaagagaagcccagtcctgccacggtgaggtcgactgatcccgtgaccacaaaggagacaaaggcagtgagtgagatgtcgaccgaaattggcacgatgattagcgtatcatcagcggagtatggcacaaatgcaaaaatggaaagtgccagaaaggcctgggagaatagtccaaacgtgcgggagaaaggtagtcccgtcacaagcactgccccccctattgcaaccggcgtgagtagcagcgcctcgggtccgagtaccgcaaactacaattcgttctcaagtgcctcaatgccccaaatacctgtggcttccgtgactcctactgccagcctctcaggtgctgggacctataccacttcatctctgtcaactaaatcgacgaccacctctgaccccccgaatatctgcaaagttaaacctcagcagcttcagactagtagcctgccaagtgcgtcccatttttcccaattaagttgcatgccatcactgatcgctcagcagcagcagaatccccaggtgtatgtcagtcagagcgctgccgcccaaatccccgcgttttacatggatacttcacacctctttaatacccagcatgcgcgcctggcccctccctccctggctcagcagcagggctttcaaccaggacttagccagcctacatcagtgcaacagatcccaattcctatctacgcccctctacagggccaacatcaagcccaactgagtctcggagccggtcctgcagtctcgcaagcccaagagctgttctcctcatccttacaaccctatcggtcacagccagcatttatgcagtctagtctgagccagccctctgtggtgttgtccgggacagccatacacaattttccgacagtccaacaccaggagctcgctaaggcacagagtggcctggctttccaacagacaagcaacactcagcctatccccattctgtatgaacaccagctcggccaggcatccgggctcggaggatctcagctgatcgatacccacctgttacaggcccgagccaatctgacacaagcatccaacctttacagcgggcaggtgcaacagcccgggcagaccaatttttacaataccgcccagtcacctagcgccctgcagcaggttactgtgcctctacccgcatcccagttgagtctccctaactttggtagcacagggcaacctcttattgcgctgcctcagactctacaacctccacttcagcacaccactcctcaggcacaggctcaaagtctcagccgccctgcacaggtgtcacagcctttcagagggttgatccccgcgggtacacagcattctatgattgccactactggaaagatgagtgaaatggagttaaaagcatttggcagcgggatcgacattaaacctggaacgccaccgatagcgggtcggtctactacacccacatcttccccttttagagcaactagcacctcacccaatagtcagagcagtaaaatgaattctatcgtgtaccagaaacagtttcagtctgctccagccaccgtcaggatgacgcagccgtttcctactcaattcgccccacaggcaaagcagcgagccgaagtgcttcagtcaacacagcggttcttcagcgaacagcagcagtccaaacagattggaggcgggaaagctcaaaaagtcgactcggacagctctaaacccccggaaactctcactgatccgcctggcgtctgccaggaaaaggtcgaggagaagccgcccccggccccgtcaatagctaccaaacctgtgcgcacgggccccatcaaaccacaagccattaaaaccgaggagaccaagtcatag

SEQ ID NO: 184931 - DNA, 8553 bp, Artificial Sequence
  derived and/or modified sequence
atgagcgagaagagtggccaatcaacaaaagcaaaagatggaaaaaaatatgccacattgtcgctctttaatacctataagggaaagtctctggagactcaaaaaacgacagcccggcatggcttgcagtctcttgggaaggtcggcatctctcgcagaatgcctcctcccgcaaacctgccctccttgaaagctgaaaacaaggggaacgatccaaatgtgaatatcgttcctaaagacggtaccggatgggcctccaaacaggagcagcatgaagaggaaaagactcctgaggtgccacctgcacagccgaaacctggtgtggcagcgccgcctgaagttgcgccagcacccaagtcctgggcctccaataaacaaggagggcagggcgacggcatacaggtgaactcccagttccagcaggaatttccttcactgcaggcggccggcgatcaggagaaaaaagaaaaggaaactaacgacgacaactatgggcccggcccctccctgcgacctcccaacgtcgcctgctggcgtgatggaggaaaggctgccggcagcccatcgagttcggaccaagatgaaaagcttcccgggcaggacgagtccacagccggcacatccgagcagaacgatattttaaaggtcgttgaaaagcgcatcgcgtgtggtccacctcaggcgaaactcaatggccagcaggcggcactggccagtcaataccgtgctatgatgcctccctatatgtttcagcaatacccacggatgacctatcctcctttgcacggaccaatgcggtttcccccatctctgtcagaaactaataaaggcctgagaggccgaggaccaccgcccagctgggcttccgagccggaacgcccttctattctgtctgctagcgagttaaaagagttagataagttcgacaatctagatgctgaggccgacgagggatgggcaggcgcccagatggaagtggactacacggagcagctgaactttagtgacgacgatgagcaggggtctaacagtcccaaagaaaataattccgaagaccaaggttcaaaagcttcagaaaacaacgagaataagaaggaaaccgatgaggtcagtaatacgaaatcgtcctctcaaatacccgcgcagccgagcgtggccaaagtgccctacgggaaaggacccagctttaatcaggagcggggcacatcttcacacctcccgcccccacccaagttgttagcccagcagcaccctcccccagaccgccaggccgtcccgggtagacctggacccttccccagcaagcagcaggtggccgatgaggacgagatctggaagcagcgcagacgtcagcagagcgagatatcagccgctgttgagcgtgctcgaaagcgtcgggaggaggaggagagaaggatggaagagcagagaaaagcagcctgcgcagagaagctaaagcgcttggatgagaagcttggcattctcgagaagcagccatcgccagaagagatccgcgagagggagcgcgagaaagagagagaacgggaaaaagagttggaaaaggagcaggagcaggaacgggagaaagaaagagagaaagatagggagcggcagcaggaaaaggagaaggagttggaaaaagaacaagagaagcagcgggaaatggaaaaggaacgcaaacaagagaaagagaaggagttggagcggcaaaaagagaaggaaaaggagctgcaaaagatgaaagagcaggagaaagagtgtgagctcgagaaggagcgggaaaaactcgaggagaagattgaaccccgcgaacctaatctggaacctatggtggagaaacaggagtccgagaactcctgtaacaaagccgaagaggaacccgtctttactcgtcaagacagcaaccggtctgaaaaagaagcaacacctgtcgtccacgaaactgagcccgagagcgggagtcagccccggcctgccgtgttgtcgggctactttaagcagttccagaagtcattgccccctcgcttccaacgccagcaggagcagatgaagcagcaacaatggcagcagcagcaacagcaaggggtgctcccacaaacggtgccttcacagccatcctctagcaccgttccgccccctccccatcggccgctttaccagcctatgcaacctcacccacaacatcttgcgtccatggggtttgatccgagatggcttatgatgcagagctatatggaccccaggatgatgtctgggagaccggccatggatatccctccaatccatccaggcatgattcctccgaaacctctgatgagaagagaccaaatggaaggctcccctaatagctccgagagtttcgaacacattgcccggtcagcaagggaccacgcaatcagcctaagcgaaccacgcatgctctggggaagcgacccatatccacacgccgaaccccaacaggccaccacacccaaggcaaccgaggagccagaagacgtgaggtctgaggctgccttggaccaggagcagatcactgccgcgtacagtgtcgagcacaatcaattggaggcacaccctaaggccgatttcatcagagagtccagcgaggctcaggtgcaaaaatttctgtctagatctgtggaggacgtgcggccacaccataccgatgcaaataatcagtcagcgtgctttgaggcccccgatcaaaaaacactctctgcaccccaggaggaaagaatctctgctgtcgagagtcagccctcacgcaaacgctctgtatctcatggttctaaccacacacagaagcccgacgaacaacgcagcgaaccgtctgccgggattccaaaggttacctcccgctgtattgactcaaaagagcccattgaacgtccagaagagaaaccaaaaaaagaggggttcattcggtccagcgaggggcccaagcccgagaaagtctacaagtccaaatccgaaactcggtggggcccaaggccaagcagtaacaggagggaagaagttaacgacaggcctgtgagacgttccggtccgatcaagaagcccgtattgagggacatgaaagaagagcgtgaacaacggaaagagaaagaaggcgaaaaagctgagaaagtgacggagaaggtcgtggtcaagccagaaaagacagagaaaaaagacctgccccctccacctccccctccccagccccccgctcccattcagcctcagtccgtgccccccccaatccagccagaggcagagaagttccccagtactgaaactgcaaccctagctcagaagccaagccaggatacagagaaacccctggagccagtgagcactgtgcaggtggagcctgcagtcaaaaccgtgaaccaacagacaatggccgcccccgtcgtcaaagaggagaagcagccagagaaagtgatctccaaagatctagtgattgaacgacccaggccagacagccggccggcagtcaaaaaggagagtacactgcctccaaggacctattggaaagaggctcgtgaaagagattggtttcccgatcagggctatcgtggaagaggaagaggggagtattattcgaggggcaggagctaccggggtagctacggcggtcgaggccgggggggaagaggacacacacgggattacccacagtacagggacaataaaccccgcgccgagcacattccctctggcccactgcggcagcgcgaggagtccgaaaccagatcagaatcatcggattttgaggtggtccctaagagacgaaggcagcgcgggagtgagacagacaccgattccgagatacacgagtctgcaagcgataaagatagtttgtcaaaaggtaagctgcccaagcgggaggagaggccggagaataagaagcccgtcaaacctcacagctccttcaaacctgataaccatgtgcgaattgacaaccgcctgctcgagaagccatacgtgagagatgatgacaaagcgaaacccgggttcctgccgaagggtgagcccacgaggcgcggacgtggcgggacctttagaagggggggacgagacccagggggaaggccatctagaccttctactttgcgtcggccggcctatcgcgataaccagtggaatccgaggcagtccgaggtaccaaagcctgaggacggggagccacctagaagacatgagcagttcatacccatcgcagctgataagcgccctcctaagtttgagaggaagtttgacccagctcgtgaacgtcctaggagacagcgaccaaccagaccccccaggcaggataagcccccgagatttcggcggttgagagagcgggaagcagcgtcaaagagcaatgaggtagtggccgtcccaaccaatgggacggtgaacaatgtcgctcaggagccagtgaacactcttggcgacatatccgggaacaagactcctgatctaagtaatcaaaattcgtctgatcaagctaacgaggagtgggagactgcctcagaaagttcagatttcaacgagcgccgagaaagggacgaaaaaaagaatgctgatctgaacgcacagaccgtggtgaaggtcggcgaaaacgtgctgcccccaaagcgcgagatcgccaagcggtctttctcttcgcagaggccagtggatcggcaaaaccgacgggggaataacggaccacctaagtctggtagaaatttcagcggcccacgcaacgagaggagatccggcccaccgtctaaatctgggaagagaggcccatttgacgaccagcctgctgggactactggagtcgacttgattaacgggtcctcagcacaccatcaagagggcgtaccaaacggcactgggcagaagaatagtaaagacagtacgggcaaaaagcgtgaagatcctaaacccggcccaaagaaacccaaagagaaggttgatgcactctctcagttcgatctgaacaactatgctagcgtggtcataattgatgatcatcctgaggtgaccgttatcgaagaccctcagtctaatctgaacgacgatggattcaccgaagtggtatctaaaaaacagcaaaagcgattgcaggatgaagagcggcgaaagaaggaggagcaggtgattcaggtgtggaataagaagaatgctaacgagaaaggcaggagtcagacatctaagctgcctcctcgtttcgcaaaaaagcaagccacagggatccagcaggctcagtcgtccgcatctgtcccaccactcgcttccgctcctctgccacctagcacgctcgcccccgtgtcagcctcagccagcgtgagcgcgagcgttccggcatctacatcagcagctgccatcaccagttcttctgcaccagcctctgctcccgccccaactcccatcctggcttccgtgtccactccggcaagtgtcaccattctagccagtgctagtatccctattctggctagcgccctggcttctacctctgctccaaccccagctccagctgcgagtagtccggccgcacctgtgataacggctcctaccatcccagccagtgccccaaccgccagcgttccactggcccccgcttctgcctccgctcctgccccagcgcccactcctgtgtcagcgcctaacccagccccccccgctcccgcccagacgcaggctcagacacataagcctgtgcagaatcctctccaaaccacttctcagagtagcaaacagcccccacccagcatccgcctacctagtgcccagacccctaacggaacggactacgtcgcatccgggaagtctatccagacccctcagagccacgggactttgaccgctgaactctgggataataaggtggcgcctccagctgtgctcaacgacatctccaagaagctgggccccatctcaccaccgcagcctcccagtgtctcagcctggaataaacctttgacctcgttcggctctgctccatcctcagaaggggccaagaatggacaggagtctggtctcgagatcggtacggataccatccagtttggggcaccagcatccaacggaaatgaaaacgaagtggttccagttttgtctgaaaaatcggccgacaagatcccagagcccaaagagcagagacaaaaacagccacgcgccggaccaattaaggcccaaaagctgccggatctgagtccagtagagaacaaggagcataagccaggcccgatcggaaaagagcgctctctcaagaatcgtaaggtgaaggatgcacaacaggtggagcctgagggccaggagaagccgtcccccgccaccgtcagaagcaccgaccctgtgacaaccaaagaaaccaaggccgtttcggaaatgagtacagagatcggaacaatgatctctgtgtcgagtgctgaatatggaactaacgccaaagagagcgtcaccgattatactacacctagttctagcctgcctaacacagtagctacaaacaacactaaaatggaagacacactggttaacaacgtccccctcccaaacacactgccactgccaaagagagaaactatccagcagagctcctctctaacaagcgtaccgccgaccactttcagcctgaccttcaagatggagtccgcaaggaaagcttgggagaattcccctaacgtgagggagaaaggcagtcccgtcacctctaccgccccccctatcgctactggcgttagcagctctgcctccggcccatcaacggccaattataacagcttctcttccgcaagcatgcctcagattcctgttgcttctgtcacccctactgcgagcctcagtggcgccggtacctacactacaagttctctcagcacgaagagtactaccacgagtgatccacccaatatatgtaaagtgaagccgcaacaattgcagacatcaagccttcctagtgcgtcccatttttcccagctttcctgcatgccaagtctcatcgctcagcagcagcagaatcctcaggtgtatgtctcccagtctgcggctgcacagatcccagccttttatatggatacctcgcaccttttcaacactcagcatgcccggctggcgccaccaagcctggcccagcaacagggattccagcctgggttatcccagccaacttccgtccagcagataccaattcccatttatgctcctctgcagggacagcatcaagcgcaactgtccttgggcgcaggaccggcagtgagccaagcacaggagctgttctcctcctcactccagccttatcgatcccagccggcctttatgcagtctagcctgtcacaaccatcagtcgttctatccggcactgccatccataacttccctaccgtgcagcatcaggaactggctaaggcccaatccggcctcgcgtttcagcagacctcgaatacacagccaatccctatactgtatgaacatcagctgggtcaagcctccggtcttggcggttcccagttgatagatactcacttgctacaggcaagagctaatctgacgcaggcttccaatttgtacagcggacaggtacagcagcccggccaaaccaacttctataacaccgctcaatctccaagcgctctgcagcaggtgaccgtccctttgcccgcatcccaattgagcctccccaatttcggtagcacgggacagcccctaatcgcattgccgcaaactctgcagcctcctctgcagcacactacgccacaggctcaggcccagtcgctgtccagacctgcacaggtcagccagccattcagaggtctcattccagcaggtacccagcatagcatgatagccaccaccggtaagatgtcagaaatggaactcaaagcattcgggtccgggattgacattaagcccgggacccctcctattgccggccgaagcaccaccccaacatccagtccttttagagctacttcaaccagtccgaacagccagagttcaaaaatgaactcaattgtttatcaaaagcagttccaatccgccccggccacggttaggatgacccagccattccccactcagtttgccccacagattctttcacagcccaatctagtccctcccttggtgagggccccccataccaacacctttccagcccccgtgcagaggccacccatggcactcgccagtcagatgcccccaccattaaccacgggcctcatgtcccatgcaagactgccacatgtcgcgagaggcccttgcgggagcctgtcgggggtccgtggaaatcaggcacaagctgccctcaaggcggaacaggacatgaaggcaaagcagagagcagaagtgctgcagtcaacgcagcggttctttagcgaacaacaacagtcaaagcagatcggaggcggcaaggcccaaaaggttgacagcgattcttccaaaccacctgagactcttacggaccccccgggcgtttgtcaggaaaaggtcgaggaaaaacctcccccagcccccagcatcgccaccaaacctgtccgcaccgggcccatcaagccccaagcaatcaagacagaggagaccaagtcctag

SEQ ID NO: 184932 - DNA, 8454 bp, Artificial Sequence
  derived and/or modified sequence
atgtctgagaagagcggccagagcaccaaggccaaggatggcaagaagtatgccaccctgagcctcttcaacacctacaagggcaagagcctggagacccagaagaccacagcccggcacggcctgcagagcctgggcaaggtgggcatcagcaggaggatgcctcctccagccaacctgcccagcctgaaggccgagaacaagggaaatgaccccaacgtgaacatcgtgcccaaggatggcaccggctgggccagcaagcaggagcagcacgaggaggagaagaccccagaggtgcccccagcccagcccaagccaggagtggccgcccctcctgaggtggccccagcccccaagtcctgggccagcaacaagcagggcggccagggagatggcatccaggtgaacagccagttccagcaggagttccccagcctgcaggccgccggggaccaggagaagaaggagaaggagaccaatgatgacaactacggccctggccccagcctgcggccccccaacgtggcctgctggagagatggcggcaaggctgctggcagccccagcagcagtgaccaggatgagaagctgcccggccaggatgagagcacagctggcaccagcgagcagaatgacatcctgaaggtggtggagaagagaattgcctgtggccccccccaggccaagctgaatggccagcaggccgccctggccagccagtaccgggccatgatgccaccctacatgttccagcagtaccccaggatgacctacccacccctgcacggccccatgaggttcccccccagcctgtctgagaccaacaagggcctgcggggccggggccccccacccagctgggccagcgagcctgagcggcccagcatcctgagcgccagcgagctgaaggagctggacaagtttgacaacctggatgctgaggctgatgagggctgggccggggcccagatggaggtggactacacagagcagctgaacttcagtgatgatgatgagcagggcagcaacagccccaaggagaacaacagcgaggaccagggcagcaaggcctctgaaaataatgaaaacaagaaggagacagatgaggtgagcaacaccaagagcagcagccagatcccagcccagcccagcgtggccaaggtgccctacggcaagggccccagcttcaaccaggagcggggcaccagcagccacctgcccccaccacccaagctgctggcccagcagcaccccccaccagaccggcaggccgtgcccggccggcccggccccttccccagcaagcagcaggtggctgatgaagatgagatctggaagcagaggcggcggcagcagagcgagatctctgctgctgtggagcgggccaggaagagaagagaggaggaggagaggaggatggaggagcagaggaaggccgcctgtgccgagaagctgaagaggctggatgagaagctgggcatcctggagaagcagcccagccctgaggagatccgggagcgggagcgggagaaggagcgggagcgggagaaggagctggagaaggagcaggagcaggagcgggagaaggagcgggagaaggaccgggagcggcagcaggagaaggagaaggagctggagaaggagcaggagaagcagcgggagatggagaaggagaggaagcaggagaaggagaaggagctggagcggcagaaggagaaggagaaggagctgcagaagatgaaggagcaggagaaggaatgtgagctggagaaggagcgggagaagctggaggagaagattgagccccgggagcccaacctggagcccatggtggagaagcaggagagcgagaacagctgcaacaaggaggaggagcccgtcttcacccggcaggacagcaacagaagtgagaaggaggccacccctgtggtgcatgaaacagagcctgagagcggcagccagcccaggcctgctgtgctgagcggctacttcaagcagttccagaagagcctgcccccacgcttccagaggcagcaggagcagatgaagcagcagcagtggcagcagcagcagcagcagggcgtgctgccccagacagtgcccagccagcccagcagcagcacagtgcccccaccaccccaccggcccctgtaccagcccatgcagccccacccccagcacctggcctccatgggctttgacccccgctggctgatgatgcagagctacatggaccccaggatgatgagcggccgcccagccatggacatcccccccatccaccctggcatgatcccccccaagcccctgatgaggcgggaccagatggagggcagccccaacagcagcgagagctttgagcacatcgcccggagcgcccgggaccacgccatcagcctgtctgagcccaggatgctgtggggcagtgacccctacccccatgctgagccccagcaggccaccacccccaaggccacagaggagccagaagatgtgcgctctgaggccgccctggaccaggagcagatcacagctgcctacagcgtggagcacaaccagctggaggcccaccccaaggctgacttcatccgggagagcagcgaggcccaggtgcagaagttcctgagccgctctgtggaggatgtgcggccccaccacacagatgccaacaaccagagcgcctgctttgaggccccagaccagaagaccctgagcgccccccaggaggagcgcatctctgctgtggagagccagcccagcaggaagaggtctgtgagccacggcagcaaccacacccagaagccagatgagcagaggtctgagcccagcgctggcatccccaaggtgaccagccgctgcatcgacagcaaggagcccatcgagaggcctgaggagaagcccaagaaggagggcttcatccgcagcagcgagggccccaagccagagaaggtgtacaagagcaagtctgagacccgctggggcccccggcccagcagcaacagaagagaggaggtgaatgacaggcctgtgagaagaagtggccccatcaagaagcctgtgctgcgggacatgaaggaggagcgggagcagaggaaggagaaggagggggagaaggccgagaaggtgacagagaaggtggtggtgaagccagagaagacagagaagaaggacctgcccccacctcctcctccaccccagcccccagcccccatccagccccagagcgtgcccccacccatccagcctgaggccgagaagttccccagcacagaaacagccaccctggcccagaagcccagccaggacacagagaagcccctggagcctgtgtccacagtgcaggtggagcctgctgtgaagacagtgaaccagcagaccatggccgcccctgtggtgaaggaggagaagcagcctgagaaggtgatcagcaaggacctggtgattgaaagacccaggccagacagcaggcctgctgtgaagaaggagagcaccctgccccccaggacctactggaaggaggcccgggagcgggactggttcccagaccagggctaccggggccggggccgcggggagtactacagccggggccgcagctaccggggcagctatggaggccggggccggggcggccggggccacacccgggactacccccagtacagagacaacaagcccagggctgagcacatccccagcggccccctgcggcagcgggaggagagcgagaccaggtctgagagcagtgactttgaggtggtgcccaagagaagacggcagaggggcagcgagacagacacagattctgagatccacgagagcgccagtgacaaggacagcctgagcaagggcaagctgcccaagcgggaggagaggcctgagaacaagaagcctgtgaagccccacagcagcttcaagccagacaaccacgtgagaattgacaaccggctgctggagaagccctacgtgagagatgatgacaaggccaagccaggcttcctgcccaagggggagcccacccggcggggccggggcggcaccttcagaagaggaggccgggaccccggcggccggcccagccggcccagcaccctgcggcggcctgcctacagagacaaccagtggaacccccggcagagcgaggtgcccaagccagaagatggagagccccccaggagacatgagcagttcatccccatcgctgctgacaagaggcctcccaagtttgagaggaagtttgatcctgcccgggagcggccccggcggcagaggcccacccggcccccccggcaggacaagccaccccgcttccggcggctgcgggagcgggaggccgccagcaagagcaatgaggtggtggccgtgcccaccaacggcaccgtgaacaacgtggcccaggagcctgtgaacaccctgggggacatcagcggcaacaagaccccagacctgagcaaccagaacagcagtgaccaggccaatgaggagtgggagacagccagcgagagcagtgacttcaatgaaagaagagaaagagatgagaagaagaatgctgacctgaatgcccagacagtggtgaaggtgggagaaaatgtgctgccccccaagcgggagatcgccaagaggagcttcagcagccagaggcctgtggaccggcagaacagaagaggcaacaacggcccccccaagtctggaagaaacttcagcggccccagaaatgaaagaagaagtggcccccccagcaagagcggcaagaggggcccctttgatgaccagcctgctggcaccaccggggtggacctgatcaatggcagcagcgcccaccaccaggagggcgtgcccaacggcaccggccagaagaacagcaaggacagcacaggcaagaagcgggaggaccccaagccaggccccaagaagcccaaggagaaggtggatgccctgagccagtttgacctgaacaactatgcctctgtggtgatcattgatgaccaccctgaggtgacagtgattgaggacccccagagcaacctgaatgatgatggcttcacagaggtggtgtccaagaagcagcagaagaggctgcaggatgaggagaggaggaagaaggaggagcaggtgatccaggtgtggaacaagaagaatgccaatgagaagggccgcagccagaccagcaagctgccccccaggtttgccaagaagcaggccaccggcatccagcaggcccagagcagcgcctctgtgccccccctggccagcgcccccctgccccccagcaccagcgcctctgtgcctgccagcaccagcgcccccctgcctgccaccctgacccctgtgcctgccagcaccagcgcccctgtgcctgccagcaccctggcccctgtgctggccagcaccagcgcccctgtgcctgccagccccctggcccctgtgtctgccagcgcctctgtgtctgcctctgtgcctgccagcaccagcgctgctgccatcaccagcagcagcgccccagccagcgccccagcccccacccccatcctggcctctgtgtccaccccagcctctgtgaccatcctggccagcgccagcatccccatcctggccagcgccctggccagcaccagcgcccccaccccagccccagctgccagcagccctgctgcccctgtgatcacagcccccaccatcccagccagcgcccccacagcctctgtgcccctggccccagccagcgccagcgccccagccccagcccccacccctgtgtctgcccccaacccagcccccccagccccagcccagacccaggcccagacccacaagcctgtgcagaaccccctgcagaccaccagccagagcagcaagcagcccccacccagcatccggctgcccagcgcccagaccccaaatggaacagattatgtggccagcggcaagagcatccagaccccccagagccacggcaccctgacagctgagctgtgggacaacaaggtggcccccccagctgtgctgaatgacatcagcaagaagctgggccccatcagccccccccagcccccatctgtgtctgcctggaacaagcccctgaccagctttggcagcgcccccagcagcgagggcgccaagaatggccaggagagcggcctggagattggaacagacaccatccagtttggagccccagccagcaatggaaatgaaaatgaggtggtgcctgtgctgtctgagaagtctgctgacaagatccctgagcccaaggagcagaggcagaagcagcccagggctggccccatcaaggcccagaagctgcctgacctgagccctgtggagaacaaggagcacaagccaggccccatcggcaaggagaggagcctgaagaacaggaaggtgaaggatgcccagcaggtggagcctgagggccaggagaagcccagccctgccaccgtgcgcagcacagatcctgtgaccaccaaggagaccaaggctgtgtctgagatgagcacagagatcggcaccatgatctctgtgagcagcgcagaatatggcaccaatgccaaggagagcgtgacagactacaccacccccagcagcagcctgcccaacacagtggccaccaacaacaccaagatggaggacaccctggtgaacaacgtgcccctgcccaacaccctgcccctgcccaagcgggagaccatccagcagagcagcagcctgacctctgtgccccccaccaccttcagcctgaccttcaagatggagagcgccaggaaggcctgggagaacagccccaacgtgcgggagaagggcagccctgtgaccagcacagccccacccatcgccactggagtgagcagcagcgccagcggccccagcacagccaactacaacagcttcagcagcgcctccatgccccagatccctgtggcctctgtgacccccacagccagcctgagcggggccggcacctacaccaccagcagcctgagcaccaagagcaccaccaccagtgacccccccaacatctgcaaggtgaagccccagcagctgcagaccagcagcctgcccagcgccagccacttcagccagctgagctgcatgcccagcctcatcgcccagcagcagcagaacccccaggtgtatgtgtcccagagcgctgctgcccagatcccagccttctacatggacaccagccacctgttcaacacccagcacgcccggctggccccacccagcctggcccagcagcagggcttccagcccggcctgagccagcccacctctgtgcagcagatccccatccccatctatgcccccctgcagggccagcaccaggcccagctgagcctgggcgccggccctgctgtgtcccaggcccaggagctgttcagcagcagcctgcagccctaccgcagccagcctgccttcatgcagagcagcctgagccagcccagcgtggtgctgagcggcacagccatccacaacttccccaccgtgcagcaccaggagctggccaaggcccagagcggcctggccttccagcagaccagcaacacccagcccatccccatcctgtatgagcaccagctgggccaggccagcggcctgggcggcagccagctgattgacacccacctgctgcaggcccgggccaacctgacccaggccagcaacctgtacagcggccaggtgcagcagcccggccagaccaacttctacaacacagcccagagccccagcgccctgcagcaggtgacagtgcccctgcctgccagccagctgagcctgcccaactttggcagcacaggccagcccctcatcgccctgccccagaccctgcagccccccctgcagcacaccaccccccaggcccaggcccagagcctgagcaggcctgcccaggtgtcccagcccttccggggcctcatcccagctggcacccagcacagcatgattgccaccaccgggaagatgtctgagatggagctgaaggcctttggaagtggcatcgacatcaagccaggcaccccacccatcgccggccgcagcaccacccccaccagcagccccttccgggccaccagcaccagccccaacagccagagcagcaagatgaacagcatcgtgtaccagaagcagttccagagcgccccagccaccgtgaggatgacccagcccttccccacccagtttgccccccaggccaagcagagagctgaggtgctgcagagcacccagcgcttcttcagcgagcagcagcagagcaagcagattggaggcggcaaggcccagaaggtggacagcgacagcagcaagcccccagagaccctgacagatcctcctggggtgtgccaggagaaggtggaggagaagcccccaccagcccccagcatcgccaccaagcctgtgaggacaggccccatcaagccccaggccatcaagacagaggagaccaagagctag

SEQ ID NO: 184933 - DNA, 8697 bp, Artificial Sequence
  derived and/or modified sequence
atgtctgagaagagcggccagagcaccaaggccaaggatggcaagaagtatgccaccctgagcctcttcaacacctacaagggcaagagcctggagacccagaagaccaccgtggccgcccggcacggcctgcagagcctgggcaaggtgggcatcagcaggaggatgcctcctccagccaacctgcccagcctgaaggccgagaacaagggaaatgaccccaacgtgaacatcgtgcccaaggatggcaccggctgggccagcaagcaggagcagcacgaggaggagaagaccccagaggtgcccccagcccagcccaagccaggagtggccgcccctcctgaggtggccccagcccccaagtcctgggccagcaacaagcagggcggccagggagatggcatccaggtgaacagccagttccagcaggagttccccagcctgcaggccgccggggaccaggagaagaaggagaaggagaccaatgatgacaactacggccctggccccagcctgcggccccccaacgtggcctgctggagagatggcggcaaggctgctggcagccccagcagcagtgaccaggatgagaagctgcccggccaggatgagagcacagctggcaccagcgagcagaatgacatcctgaaggtggtggagaagagaattgcctgtggccccccccaggccaagctgaatggccagcaggccgccctggccagccagtaccgggccatgatgccaccctacatgttccagcagtaccccaggatgacctacccacccctgcacggccccatgaggttcccccccagcctgtctgagaccaacaagggcctgcggggccggggccccccacccagctgggccagcgagcctgagcggcccagcatcctgagcgccagcgagctgaaggagctggacaagtttgacaacctggatgctgaggctgatgagggctgggccggggcccagatggaggtggactacacagagcagctgaacttcagtgatgatgatgagcagggcagcaacagccccaaggagaacaacagcgaggaccagggcagcaaggcctctgaaaataatgaaaacaagaaggagacagatgaggtgagcaacaccaagagcagcagccagatcccagcccagcccagcgtggccaaggtgccctacggcaagggccccagcttcaaccaggagcggggcaccagcagccacctgcccccaccacccaagctgctggcccagcagcaccccccaccagaccggcaggccgtgcccggccggcccggccccttccccagcaagcagcaggtggctgatgaagatgagatctggaagcagaggcggcggcagcagagcgagatctctgctgctgtggagcgggccaggaagagaagagaggaggaggagaggaggatggaggagcagaggaaggccgcctgtgccgagaagctgaagaggctggatgagaagctgggcatcctggagaagcagcccagccctgaggagatccgggagcgggagcgggagaaggagcgggagcgggagaaggagctggagaaggagcaggagcaggagcgggagaaggagcgggagaaggaccgggagcggcagcaggagaaggagaaggagctggagaaggagcaggagaagcagcgggagatggagaaggagaggaagcaggagaaggagaaggagctggagcggcagaaggagaaggagaaggagctgcagaagatgaaggagcaggagaaggaatgtgagctggagaaggagcgggagaagctggaggagaagattgagccccgggagcccaacctggagcccatggtggagaagcaggagagcgagaacagctgcaacaaggaggaggagcccgtcttcacccggcaggacagcaacagaagtgagaaggaggccacccctgtggtgcatgaaacagagcctgagagcggcagccagcccaggcctgctgtgctgagcggctacttcaagcagttccagaagagcctgcccccacgcttccagaggcagcaggagcagatgaagcagcagcagtggcagcagcagcagcagcagggcgtgctgccccagacagtgcccagccagcccagcagcagcacagtgcccccaccaccccaccggcccctgtaccagcccatgcagccccacccccagcacctggcctccatgggctttgacccccgctggctgatgatgcagagctacatggaccccaggatgatgagcggccgcccagccatggacatcccccccatccaccctggcatgatcccccccaagcccctgatgaggcgggaccagatggagggcagccccaacagcagcgagagctttgagcacatcgcccggagcgcccgggaccacgccatcagcctgtctgagcccaggatgctgtggggcagtgacccctacccccatgctgagccccagcaggccaccacccccaaggccacagaggagccagaagatgtgcgctctgaggccgccctggaccaggagcagatcacagctgcctacagcgtggagcacaaccagctggaggcccaccccaaggctgacttcatccgggagagcagcgaggcccaggtgcagaagttcctgagccgctctgtggaggatgtgcggccccaccacacagatgccaacaaccagagcgcctgctttgaggccccagaccagaagaccctgagcgccccccaggaggagcgcatctctgctgtggagagccagcccagcaggaagaggtctgtgagccacggcagcaaccacacccagaagccagatgagcagaggtctgagcccagcgctggcatccccaaggtgaccagccgctgcatcgacagcaaggagcccatcgagaggcctgaggagaagcccaagaaggagggcttcatccgcagcagcgagggccccaagccagagaaggtgtacaagagcaagtctgagacccgctggggcccccggcccagcagcaacagaagagaggaggtgaatgacaggcctgtgagaagaagtggccccatcaagaagcctgtgctgcgggacatgaaggaggagcgggagcagaggaaggagaaggagggggagaaggccgagaaggtgacagagaaggtggtggtgaagccagagaagacagagaagaaggacctgcccccacctcctcctccaccccagcccccagcccccatccagccccagagcgtgcccccacccatccagcctgaggccgagaagttccccagcacagaaacagccaccctggcccagaagcccagccaggacacagagaagcccctggagcctgtgtccacagtgcaggtggagcctgctgtgaagacagtgaaccagcagaccatggccgcccctgtggtgaaggaggagaagcagcctgagaaggtgatcagcaaggacctggtgattgaaagacccaggccagacagcaggcctgctgtgaagaaggagagcaccctgccccccaggacctactggaaggaggcccgggagcgggactggttcccagaccagggctaccggggccggggccgcggggagtactacagccggggccgcagctaccggggcagctatggaggccggggccggggcggccggggccacacccgggactacccccagtacagagacaacaagcccagggctgagcacatccccagcggccccctgcggcagcgggaggagagcgagaccaggtctgagagcagtgactttgaggtggtgcccaagagaagacggcagaggggcagcgagacagacacagattctgagatccacgagagcgccagtgacaaggacagcctgagcaagggcaagctgcccaagcgggaggagaggcctgagaacaagaagcctgtgaagccccacagcagcttcaagccagacaaccacgtgagaattgacaaccggctgctggagaagccctacgtgagagatgatgacaaggccaagccaggcttcctgcccaagggggagcccacccggcggggccggggcggcaccttcagaagaggaggccgggaccccggcggccggcccagccggcccagcaccctgcggcggcctgcctacagagacaaccagtggaacccccggcagagcgaggtgcccaagccagaagatggagagccccccaggagacatgagcagttcatccccatcgctgctgacaagaggcctcccaagtttgagaggaagtttgatcctgcccgggagcggccccggcggcagaggcccacccggcccccccggcaggacaagccaccccgcttccggcggctgcgggagcgggaggccgccagcaagagcaatgaggtggtggccgtgcccaccaacggcaccgtgaacaacgtggcccaggagcctgtgaacaccctgggggacatcagcggcaacaagaccccagacctgagcaaccagaacagcagtgaccaggccaatgaggagtgggagacagccagcgagagcagtgacttcaatgaaagaagagaaagagatgagaagaagaatgctgacctgaatgcccagacagtggtgaaggtgggagaaaatgtgctgccccccaagcgggagatcgccaagaggagcttcagcagccagaggcctgtggaccggcagaacagaagaggcaacaacggcccccccaagtctggaagaaacttcagcggccccagaaatgaaagaagaagtggcccccccagcaagagcggcaagaggggcccctttgatgaccagcctgctggcaccaccggggtggacctgatcaatggcagcagcgcccaccaccaggagggcgtgcccaacggcaccggccagaagaacagcaaggacagcacaggcaagaagcgggaggaccccaagccaggccccaagaagcccaaggagaaggtggatgccctgagccagtttgacctgaacaactatgcctctgtggtgatcattgatgaccaccctgaggtgacagtgattgaggacccccagagcaacctgaatgatgatggcttcacagaggtggtgtccaagaagcagcagaagaggctgcaggatgaggagaggaggaagaaggaggagcaggtgatccaggtgtggaacaagaagaatgccaatgagaagggccgcagccagaccagcaagctgccccccaggtttgccaagaagcaggccaccggcatccagcaggcccagagcagcgcctctgtgccccccctggccagcgcccccctgccccccagcaccagcgcctctgtgcctgccagcaccagcgcccccctgcctgccaccctgacccctgtgcctgccagcaccagcgcccctgtgcctgccagcaccctggcccctgtgctggccagcaccagcgcccctgtgcctgccagccccctggcccctgtgtctgccagcgcctctgtgtctgcctctgtgcctgccagcaccagcgctgctgccatcaccagcagcagcgccccagccagcgccccagcccccacccccatcctggcctctgtgtccaccccagcctctgtgaccatcctggccagcgccagcatccccatcctggccagcgccctggccagcaccagcgcccccaccccagccccagctgccagcagccctgctgcccctgtgatcacagcccccaccatcccagccagcgcccccacagcctctgtgcccctggccccagccagcgccagcgccccagccccagcccccacccctgtgtctgcccccaacccagcccccccagccccagcccagacccaggcccagacccacaagcctgtgcagaaccccctgcagaccaccagccagagcagcaagcagcccccacccagcatccggctgcccagcgcccagaccccaaatggaacagattatgtggccagcggcaagagcatccagaccccccagagccacggcaccctgacagctgagctgtgggacaacaaggtggcccccccagctgtgctgaatgacatcagcaagaagctgggccccatcagccccccccagcccccatctgtgtctgcctggaacaagcccctgaccagctttggcagcgcccccagcagcgagggcgccaagaatggccaggagagcggcctggagattggaacagacaccatccagtttggagccccagccagcaatggaaatgaaaatgaggtggtgcctgtgctgtctgagaagtctgctgacaagatccctgagcccaaggagcagaggcagaagcagcccagggctggccccatcaaggcccagaagctgcctgacctgagccctgtggagaacaaggagcacaagccaggccccatcggcaaggagaggagcctgaagaacaggaaggtgaaggatgcccagcaggtggagcctgagggccaggagaagcccagccctgccaccgtgcgcagcacagatcctgtgaccaccaaggagaccaaggctgtgtctgagatgagcacagagatcggcaccatgatctctgtgagcagcgcagaatatggcaccaatgccaaggagagcgtgacagactacaccacccccagcagcagcctgcccaacacagtggccaccaacaacaccaagatggaggacaccctggtgaacaacgtgcccctgcccaacaccctgcccctgcccaagcgggagaccatccagcagagcagcagcctgacctctgtgccccccaccaccttcagcctgaccttcaagatggagagcgccaggaaggcctgggagaacagccccaacgtgcgggagaagggcagccctgtgaccagcacagccccacccatcgccactggagtgagcagcagcgccagcggccccagcacagccaactacaacagcttcagcagcgcctccatgccccagatccctgtggcctctgtgacccccacagccagcctgagcggggccggcacctacaccaccagcagcctgagcaccaagagcaccaccaccagtgacccccccaacatctgcaaggtgaagccccagcagctgcagaccagcagcctgcccagcgccagccacttcagccagctgagctgcatgcccagcctcatcgcccagcagcagcagaacccccaggtgtatgtgtcccagagcgctgctgcccagatcccagccttctacatggacaccagccacctgttcaacacccagcacgcccggctggccccacccagcctggcccagcagcagggcttccagcccggcctgagccagcccacctctgtgcagcagatccccatccccatctatgcccccctgcagggccagcaccaggcccagctgagcctgggcgccggccctgctgtgtcccaggcccaggagctgttcagcagcagcctgcagccctaccgcagccagcctgccttcatgcagagcagcctgagccagcccagcgtggtgctgagcggcacagccatccacaacttccccaccgtgcagcaccaggagctggccaaggcccagagcggcctggccttccagcagaccagcaacacccagcccatccccatcctgtatgagcaccagctgggccaggccagcggcctgggcggcagccagctgattgacacccacctgctgcaggcccgggccaacctgacccaggccagcaacctgtacagcggccaggtgcagcagcccggccagaccaacttctacaacacagcccagagccccagcgccctgcagcaggtgacagtgcccctgcctgccagccagctgagcctgcccaactttggcagcacaggccagcccctcatcgccctgccccagaccctgcagccccccctgcagcacaccaccccccaggcccaggcccagagcctgagcaggcctgcccaggtgtcccagcccttccggggcctcatcccagctggcacccagcacagcatgattgccaccaccgggaagatgtctgagatggagctgaaggcctttggaagtggcatcgacatcaagccaggcaccccacccatcgccggccgcagcaccacccccaccagcagccccttccgggccaccagcaccagccccaacagccagagcagcaagatgaacagcatcgtgtaccagaagcagttccagagcgccccagccaccgtgaggatgacccagcccttccccacccagtttgccccccagatcctgagccagcccaacctggtgccccccctggtgcgggccccccacaccaacaccttccctgcccctgtgcagaggcctcccatggccctggccagccagatgcccccacccctgaccaccggcctgatgagccacgcccggctgccccacgtggcccggggcccctgtggcagcctgagcggcgtgcggggcaaccaggcccaggccgccctgaaggccgagcaggacatgaaggccaagcagagagctgaggtgctgcagagcacccagcgcttcttcagcgagcagcagcagagcaagcagatcggcggcggcaaggcccagaaggtggacagcgacagcagcaagcccccagagaccctgacagaccccccaggagtgtgccaggagaaggtggaggagaagcccccaccagcccccagcatcgccaccaagcctgtgaggacaggccccatcaagccccaggccatcaagacagaggagaccaagagctag

SEQ ID NO: 184934 - DNA, 7962 bp, Artificial Sequence
  derived and/or modified sequence
gtgcccaaccagatgttccagcagtaccccaggatgacctacccacccctgcacggccccatgaggttcccccccagcctgtctgagaccaacaagggcctgcggggccggggccccccacccagctgggccagcgagcctgagcggcccagcatcctgagcgccagcgagctgaaggagctggacaagtttgacaacctggatgctgaggctgatgagggctgggccggggcccagatggaggtggactacacagagcagctgaacttcagtgatgatgatgagcagggcagcaacagccccaaggagaacaacagcgaggaccagggcagcaaggcctctgaaaataatgaaaacaagaaggagacagatgaggtgagcaacaccaagagcagcagccagatcccagcccagcccagcgtggccaaggtgccctacggcaagggccccagcttcaaccaggagcggggcaccagcagccacctgcccccaccacccaagctgctggcccagcagcaccccccaccagaccggcaggccgtgcccggccggcccggccccttccccagcaagcagcaggtggctgatgaagatgagatctggaagcagaggcggcggcagcagagcgagatctctgctgctgtggagcgggccaggaagagaagagaggaggaggagaggaggatggaggagcagaggaaggccgcctgtgccgagaagctgaagaggctggatgagaagctgggcatcctggagaagcagcccagccctgaggagatccgggagcgggagcgggagaaggagcgggagcgggagaaggagctggagaaggagcaggagcaggagcgggagaaggagcgggagaaggaccgggagcggcagcaggagaaggagaaggagctggagaaggagcaggagaagcagcgggagatggagaaggagaggaagcaggagaaggagaaggagctggagcggcagaaggagaaggagaaggagctgcagaagatgaaggagcaggagaaggaatgtgagctggagaaggagcgggagaagctggaggagaagattgagccccgggagcccaacctggagcccatggtggagaagcaggagagcgagaacagctgcaacaaggccgaggaggagcctgtgttcacccggcaggacagcaacagaagtgagaaggaggccacccctgtggtgcatgaaacagagcctgagagcggcagccagcccaggcctgctgtgctgagcggctacttcaagcagttccagaagagcctgcccccacgcttccagaggcagcaggagcagatgaagcagcagcagtggcagcagcagcagcagcagggcgtgctgccccagacagtgcccagccagcccagcagcagcacagtgcccccaccaccccaccggcccctgtaccagcccatgcagccccacccccagcacctggcctccatgggctttgacccccgctggctgatgatgcagagctacatggaccccaggatgatgagcggccggcctgccatggacatcccccccatccaccctggcatgatcccccccaagcccctgatgagaagagaccagatggagggcagccccaacagcagcgagagctttgagcacatcgcccggagcgcccgggaccacgccatcagcctgtctgagcccaggatgctgtggggcagtgacccctacccccacgccgagccccagcaggccaccacccccaaggccacagaggagccagaagatgtgcgctctgaggccgccctggaccaggagcagatcacagctgcctacagcgtggagcacaaccagctggaggcccaccccaaggctgacttcatccgggagagcagcgaggcccaggtgcagaagttcctgagccgctctgtggaggatgtgcggccccaccacacagatgccaacaaccagagcgcctgctttgaggccccagaccagaagaccctgagcgccccccaggaggagcgcatctctgctgtggagagccagcccagcaggaagaggtctgtgagccacggcagcaaccacacccagaagccagatgagcagaggtctgagcccagcgctggcatccccaaggtgaccagccgctgcatcgacagcaaggagcccatcgagaggcctgaggagaagcccaagaaggagggcttcatccgcagcagcgagggccccaagccagagaaggtgtacaagagcaagtctgagacccgctggggcccccggcccagcagcaacagaagagaggaggtgaatgacaggcctgtgcggcgcagcggccccatcaagaagcctgtgctgcgggacatgaaggaggagcgggagcagaggaaggagaaggagggggagaaggccgagaaggtgacagagaaggtggtggtgaagccagagaagacagagaagaaggacctgcccccacctcctcctccaccccagcccccagcccccatccagccccagagcgtgcccccacccatccagcctgaggccgagaagttccccagcacagaaacagccaccctggcccagaagcccagccaggacacagagaagcccctggagcctgtgtccacagtgcaggtggagcctgctgtgaagacagtgaaccagcagaccatggccgcccctgtggtgaaggaggagaagcagcctgagaaggtgatcagcaaggacctggtgattgagcggcccaggccagacagcaggcctgctgtgaagaaggagagcaccctgccccccaggacctactggaaggaggcccgggagcgggactggttcccagaccagggctaccggggccggggccgcggggagtactacagccggggccgcagctaccggggcagctatggaggccggggccggggcggccggggccacacccgggactacccccagtacagagacaacaagcccagggctgagcacatccccagcggccccctgcggcagcgggaggagagcgagaccaggtctgagagcagtgactttgaggtggtgcccaagagaagacggcagaggggcagcgagacagacacagacagcgagatccatgaaagtgccagtgacaaggacagcctgagcaagggcaagctgcccaagcgggaggagaggcctgagaacaagaagcctgtgaagccccacagcagcttcaagccagacaaccacgtgagaattgacaaccggctgctggagaagccctacgtgagagatgatgacaaggccaagccaggcttcctgcccaagggggagcccacccggcggggccggggcggcaccttccggcggggcggccgggaccccggcggccggcccagccggcccagcaccctgcggcggcctgcctacagagacaaccagtggaacccccggcagagcgaggtgcccaagccagaagatggagagcccccaagaagacatgagcagttcatccccatcgctgctgacaagaggcctcccaagtttgagaggaagtttgatcctgcccgggagcggccccggcggcagaggcccaccaggcctccccggcaggacaagcccccacgcttccggcggctgcgggagcgggaggccgccagcaagagcaatgaggtggtggccgtgcccaccaatggaacagtgaacaacgtggcccaggagcctgtgaacaccctgggggacatcagcggcaacaagaccccagacctgagcaaccagaacagcagtgaccaggccaatgaggagtgggagacagccagcgagagcagtgacttcaatgaaagaagagaaagagatgagaagaagaatgctgacctgaatgcccagacagtggtgaaggtgggggagaatgtgctgccccccaagcgggagatcgccaagaggagcttcagcagccagaggcctgtggaccggcagaacagaagaggcaacaatggaccacccaagagcggcaggaacttcagcggccccagaaatgaaagaagaagtggcccccccagcaagagcggcaagaggggcccctttgatgaccagcctgctggcaccactggagtggacctgatcaatggcagcagcgcccaccaccaggagggcgtgcccaatggaacaggccagaagaacagcaaggacagcacaggcaagaagcgggaggaccccaagccaggccccaagaagcccaaggagaaggtggatgccctgagccagtttgacctgaacaactatgcctctgtggtgatcattgatgaccaccctgaggtgacagtgattgaggacccccagagcaacctgaatgatgatggcttcacagaggtggtgtccaagaagcagcagaagaggctgcaggatgaggagaggaggaagaaggaggagcaggtgatccaggtgtggaacaagaagaatgccaatgagaagggccgcagccagaccagcaagctgcccccaagatttgccaagaagcaggccaccggcatccagcaggcccagagcagcgcctctgtgccccccctggccagcgcccccctgccccccagcaccagcgcctctgtgcctgccagcaccagcgcccccctgcctgccaccctgacccctgtgcctgccagcaccagcgcccctgtgcctgccagcaccctggcccctgtgctggccagcaccagcgcccctgtgcctgccagccccctggcccctgtgtctgccagcgcctctgtgtctgcctctgtgcctgccagcaccagcgctgctgccatcaccagcagcagcgccccagccagcgccccagcccccacccccatcctggcctctgtgtccaccccagcctctgtgaccatcctggccagcgccagcatccccatcctggccagcgccctggccagcaccagcgcccccaccccagccccagctgccagcagccctgctgcccctgtgatcacagcccccaccatcccagccagcgcccccacagcctctgtgcccctggccccagccagcgccagcgccccagccccagcccccacccctgtgtctgcccccaacccagcccccccagccccagcccagacccaggcccagacccacaagcctgtgcagaaccccctgcagaccaccagccagagcagcaagcagcccccacccagcatccggctgcccagcgcccagacccccaacggcacagattatgtggccagcggcaagagcatccagaccccccagagccacggcaccctgacagctgagctgtgggacaacaaggtggcccctcctgctgtgctgaatgacatcagcaagaagctgggccccatcagccccccccagccccccagcgtgtctgcctggaacaagcccctgaccagctttggaagtgcccccagcagcgagggcgccaagaatggccaggagagcggcctggagatcggcacagacaccatccagtttggagccccagccagcaatggaaatgaaaatgaggtggtgcctgtgctgtctgagaagtctgctgacaagatccctgagcccaaggagcagaggcagaagcagccccgggccggccccatcaaggcccagaagctgcctgacctgagccctgtggagaacaaggagcacaagccaggccccatcggcaaggagaggagcctgaagaacaggaaggtgaaggatgcccagcaggtggagcctgagggccaggagaagcccagccctgccaccgtgcgcagcacagatcctgtgaccaccaaggagaccaaggctgtgtctgagatgagcacagaaattggcaccatgatctctgtgtcctctgcagaatatggcaccaatgccaaggagagcgtgacagactacaccacccccagcagcagcctgcccaacacagtggccaccaacaacaccaagatggaggacaccctggtgaacaacgtgcccctgcccaacaccctgcccctgcccaagcgggagaccatccagcagagcagcagcctgacctctgtgccccccaccaccttcagcctgaccttcaagatggagagcgccaggaaggcctgggagaacagccccaacgtgcgggagaagggcagccctgtgaccagcacagccccacccatcgccaccggggtgagcagcagcgccagcggccccagcacagccaactacaacagcttcagcagcgcctccatgccccagatccctgtggcctctgtgacccccacagccagcctgtctggagctggcacctacaccaccagcagcctgagcaccaagagcaccaccaccagtgacccccccaacatctgcaaggtgaagccccagcagctgcagaccagcagcctgcccagcgccagccacttcagccagctgagctgcatgcccagcctgattgcccagcagcagcagaacccccaggtgtatgtgtcccagagcgctgctgcccagatcccagccttctacatggacaccagccacctgttcaacacccagcacgcccggctggccccacccagcctggcccagcagcagggcttccagcccggcctgagccagcccacctctgtgcagcagatccccatccccatctatgcccccctgcagggccagcaccaggcccagctgagcctgggcgccggccctgctgtgtcccaggcccaggagctgttcagcagcagcctgcagccctaccgcagccagcctgccttcatgcagagcagcctgagccagcccagcgtggtgctgtctggaacagccatccacaacttccccaccgtgcagcaccaggagctggccaaggcccagagcggcctggccttccagcagaccagcaacacccagcccatccccatcctgtatgagcaccagctgggccaggccagcggcctgggcggcagccagctgattgacacccacctgctgcaggcccgggccaacctgacccaggccagcaacctgtacagcggccaggtgcagcagcccggccagaccaacttctacaacacagcccagagccccagcgccctgcagcaggtgacagtgcccctgcctgccagccagctgagcctgcccaactttggcagcacaggccagcccctgattgccctgccccagaccctgcagccccccctgcagcacaccaccccccaggcccaggcccagagcctgagcaggcctgcccaggtgtcccagcccttccggggcctcatcccagctggcacccagcacagcatgattgccaccaccgggaagatgtctgagatggagctgaaggccttcggcagcggcatcgacatcaagccaggcaccccacccatcgccggccgcagcaccacccccaccagcagccccttccgggccaccagcaccagccccaacagccagagcagcaagatgaacagcatcgtgtaccagaagcagttccagagcgccccagccaccgtgaggatgacccagcccttccccacccagtttgccccccagatcctgagccagcccaacctggtgccccccctggtgcgggccccccacaccaacaccttccctgcccctgtgcagaggcctcccatggccctggccagccagatgcccccacccctgaccaccggcctgatgagccacgcccggctgccccacgtggcccggggcccctgtggcagcctgtctggagtgcggggcaaccaggcccaggccgccctgaaggccgagcaggacatgaaggccaagcagagagctgaggtgctgcagagcacccagcgcttcttcagcgagcagcagcagagcaagcagattggaggcggcaaggcccagaaggtggacagcgacagcagcaagcccccagagaccctgacagatcctcctggggtgtgccaggagaaggtggaggagaagcccccaccagcccccagcatcgccaccaagcctgtgaggacaggccccatcaagccccaggccatcaagacagaggagaccaagagctag

SEQ ID NO: 184935 - DNA, 8259 bp, Artificial Sequence
  derived and/or modified sequence
atgtctgagaagagcggccagagcaccaaggccaaggatggcaagaagtatgccaccctgagcctcttcaacacctacaagggcaagagcctggagacccagaagaccacagcccggcacggcctgcagagcctgggcaaggtgggcatcagcaggaggatgcctcctccagccaacctgcccagcctgaaggccgagaacaagggaaatgaccccaacgtgaacatcgtgcccaaggatggcaccggctgggccagcaagcaggagcagcacgaggaggagaagaccccagaggtgcccccagcccagcccaagccaggagtggccgcccctcctgaggtggccccagcccccaagtcctgggccagcaacaagcagggcggccagggagatggcatccaggtgaacagccagttccagcaggagttccccagcctgcaggccgccggggaccaggagaagaaggagaaggagaccaatgatgacaactacggccctggccccagcctgcggccccccaacgtggcctgctggagagatggcggcaaggctgctggcagccccagcagcagtgaccaggatgagaagctgcccggccaggatgagagcacagctggcaccagcgagcagaatgacatcctgaaggtggtggagaagagaattgcctgtggccccccccaggccaagctgaatggccagcaggccgccctggccagccagtaccgggccatgatgccaccctacatgttccagcagtaccccaggatgacctacccacccctgcacggccccatgaggttcccccccagcctgtctgagaccaacaagggcctgcggggccggggccccccacccagctgggccagcgagcctgagcggcccagcatcctgagcgccagcgagctgaaggagctggacaagtttgacaacctggatgctgaggctgatgagggctgggccggggcccagatggaggtggactacacagagcagctgaacttcagtgatgatgatgagcagggcagcaacagccccaaggagaacaacagcgaggaccagggcagcaaggcctctgaaaataatgaaaacaagaaggagacagatgaggtgagcaacaccaagagcagcagccagatcccagcccagcccagcgtggccaaggtgccctacggcaagggccccagcttcaaccaggagcggggcaccagcagccacctgcccccaccacccaagctgctggcccagcagcaccccccaccagaccggcaggccgtgcccggccggcccggccccttccccagcaagcagcaggtggctgatgaagatgagatctggaagcagaggcggcggcagcagagcgagatctctgctgctgtggagcgggccaggaagagaagagaggaggaggagaggaggatggaggagcagaggaaggccgcctgtgccgagaagctgaagaggctggatgagaagctgggcatcctggagaagcagcccagccctgaggagatccgggagcgggagcgggagaaggagcgggagcgggagaaggagctggagaaggagcaggagcaggagcgggagaaggagcgggagaaggaccgggagcggcagcaggagaaggagaaggagctggagaaggagcaggagaagcagcgggagatggagaaggagaggaagcaggagaaggagaaggagctggagcggcagaaggagaaggagaaggagctgcagaagatgaaggagcaggagaaggaatgtgagctggagaaggagcgggagaagctggaggagaagattgagccccgggagcccaacctggagcccatggtggagaagcaggagagcgagaacagctgcaacaaggaggaggagcccgtcttcacccggcaggacagcaacagaagtgagaaggaggccacccctgtggtgcatgaaacagagcctgagagcggcagccagcccaggcctgctgtgctgagcggctacttcaagcagttccagaagagcctgcccccacgcttccagaggcagcaggagcagatgaagcagcagcagtggcagcagcagcagcagcagggcgtgctgccccagacagtgcccagccagcccagcagcagcacagtgcccccaccaccccaccggcccctgtaccagcccatgcagccccacccccagcacctggcctccatgggctttgacccccgctggctgatgatgcagagctacatggaccccaggatgatgagcggccgcccagccatggacatcccccccatccaccctggcatgatcccccccaagcccctgatgaggcgggaccagatggagggcagccccaacagcagcgagagctttgagcacatcgcccggagcgcccgggaccacgccatcagcctgtctgagcccaggatgctgtggggcagtgacccctacccccatgctgagccccagcaggccaccacccccaaggccacagaggagccagaagatgtgcgctctgaggccgccctggaccaggagcagatcacagctgcctacagcgtggagcacaaccagctggaggcccaccccaaggctgacttcatccgggagagcagcgaggcccaggtgcagaagttcctgagccgctctgtggaggatgtgcggccccaccacacagatgccaacaaccagagcgcctgctttgaggccccagaccagaagaccctgagcgccccccaggaggagcgcatctctgctgtggagagccagcccagcaggaagaggtctgtgagccacggcagcaaccacacccagaagccagatgagcagaggtctgagcccagcgctggcatccccaaggtgaccagccgctgcatcgacagcaaggagcccatcgagaggcctgaggagaagcccaagaaggagggcttcatccgcagcagcgagggccccaagccagagaaggtgtacaagagcaagtctgagacccgctggggcccccggcccagcagcaacagaagagaggaggtgaatgacaggcctgtgagaagaagtggccccatcaagaagcctgtgctgcgggacatgaaggaggagcgggagcagaggaaggagaaggagggggagaaggccgagaaggtgacagagaaggtggtggtgaagccagagaagacagagaagaaggacctgcccccacctcctcctccaccccagcccccagcccccatccagccccagagcgtgcccccacccatccagcctgaggccgagaagttccccagcacagaaacagccaccctggcccagaagcccagccaggacacagagaagcccctggagcctgtgtccacagtgcaggtggagcctgctgtgaagacagtgaaccagcagaccatggccgcccctgtggtgaaggaggagaagcagcctgagaaggtgatcagcaaggacctggtgattgaaagacccaggccagacagcaggcctgctgtgaagaaggagagcaccctgccccccaggacctactggaaggaggcccgggagcgggactggttcccagaccagggctaccggggccggggccgcggggagtactacagccggggccgcagctaccggggcagctatggaggccggggccggggcggccggggccacacccgggactacccccagtacagagacaacaagcccagggctgagcacatccccagcggccccctgcggcagcgggaggagagcgagaccaggtctgagagcagtgactttgaggtggtgcccaagagaagacggcagaggggcagcgagacagacacagattctgagatccacgagagcgccagtgacaaggacagcctgagcaagggcaagctgcccaagcgggaggagaggcctgagaacaagaagcctgtgaagccccacagcagcttcaagccagacaaccacgtgagaattgacaaccggctgctggagaagccctacgtgagagatgatgacaaggccaagccaggcttcctgcccaagggggagcccacccggcggggccggggcggcaccttcagaagaggaggccgggaccccggcggccggcccagccggcccagcaccctgcggcggcctgcctacagagacaaccagtggaacccccggcagagcgaggtgcccaagccagaagatggagagccccccaggagacatgagcagttcatccccatcgctgctgacaagaggcctcccaagtttgagaggaagtttgatcctgcccgggagcggccccggcggcagaggcccacccggcccccccggcaggacaagccaccccgcttccggcggctgcgggagcgggaggccgccagcaagagcaatgaggtggtggccgtgcccaccaacggcaccgtgaacaacgtggcccaggagcctgtgaacaccctgggggacatcagcggcaacaagaccccagacctgagcaaccagaacagcagtgaccaggccaatgaggagtgggagacagccagcgagagcagtgacttcaatgaaagaagagaaagagatgagaagaagaatgctgacctgaatgcccagacagtggtgaaggtgggagaaaatgtgctgccccccaagcgggagatcgccaagaggagcttcagcagccagaggcctgtggaccggcagaacagaagaggcaacaacggcccccccaagtctggaagaaacttcagcggccccagaaatgaaagaagaagtggcccccccagcaagagcggcaagaggggcccctttgatgaccagcctgctggcaccaccggggtggacctgatcaatggcagcagcgcccaccaccaggagggcgtgcccaacggcaccggccagaagaacagcaaggacagcacaggcaagaagcgggaggaccccaagccaggccccaagaagcccaaggagaaggtggatgccctgagccagtttgacctgaacaactatgcctctgtggtgatcattgatgaccaccctgaggtgacagtgattgaggacccccagagcaacctgaatgatgatggcttcacagaggtggtgtccaagaagcagcagaagaggctgcaggatgaggagaggaggaagaaggaggagcaggtgatccaggtgtggaacaagaagaatgccaatgagaagggccgcagccagaccagcaagctgccccccaggtttgccaagaagcaggccaccggcatccagcaggcccagagcagcgcctctgtgccccccctggccagcgcccccctgccccccagcaccagcgcctctgtgcctgccagcaccagcgcccccctgcctgccaccctgacccctgtgcctgccagcaccagcgcccctgtgcctgccagcaccctggcccctgtgctggccagcaccagcgcccctgtgcctgccagccccctggcccctgtgtctgccagcgcctctgtgtctgcctctgtgcctgccagcaccagcgctgctgccatcaccagcagcagcgccccagccagcgccccagcccccacccccatcctggcctctgtgtccaccccagcctctgtgaccatcctggccagcgccagcatccccatcctggccagcgccctggccagcaccagcgcccccaccccagccccagctgccagcagccctgctgcccctgtgatcacagcccccaccatcccagccagcgcccccacagcctctgtgcccctggccccagccagcgccagcgccccagccccagcccccacccctgtgtctgcccccaacccagcccccccagccccagcccagacccaggcccagacccacaagcctgtgcagaaccccctgcagaccaccagccagagcagcaagcagcccccacccagcatccggctgcccagcgcccagaccccaaatggaacagattatgtggccagcggcaagagcatccagaccccccagagccacggcaccctgacagctgagctgtgggacaacaaggtggcccccccagctgtgctgaatgacatcagcaagaagctgggccccatcagccccccccagcccccatctgtgtctgcctggaacaagcccctgaccagctttggcagcgcccccagcagcgagggcgccaagaatggccaggagagcggcctggagattggaacagacaccatccagtttggagccccagccagcaatggaaatgaaaatgaggtggtgcctgtgctgtctgagaagtctgctgacaagatccctgagcccaaggagcagaggcagaagcagcccagggctggccccatcaaggcccagaagctgcctgacctgagccctgtggagaacaaggagcacaagccaggccccatcggcaaggagaggagcctgaagaacaggaaggtgaaggatgcccagcaggtggagcctgagggccaggagaagcccagccctgccaccgtgcgcagcacagatcctgtgaccaccaaggagaccaaggctgtgtctgagatgagcacagagatcggcaccatgatctctgtgagcagcgcagaatatggcaccaatgccaagatggagagcgccaggaaggcctgggagaacagccccaacgtgcgggagaagggcagccctgtgaccagcacagccccacccatcgccaccggggtgagcagcagcgccagcggccccagcacagccaactacaacagcttcagcagcgcctccatgccccagatccctgtggcctctgtgacccccacagccagcctgtctggagctggcacctacaccaccagcagcctgagcaccaagagcaccaccaccagtgacccccccaacatctgcaaggtgaagccccagcagctgcagaccagcagcctgcccagcgccagccacttcagccagctgagctgcatgcccagcctgattgcccagcagcagcagaacccccaggtgtatgtgtcccagagcgctgctgcccagatcccagccttctacatggacaccagccacctgttcaacacccagcacgcccggctggccccacccagcctggcccagcagcagggcttccagcccggcctgagccagcccacctctgtgcagcagatccccatccccatctatgcccccctgcagggccagcaccaggcccagctgagcctgggcgccggccctgctgtgtcccaggcccaggagctgttcagcagcagcctgcagccctaccgcagccagcctgccttcatgcagagcagcctgagccagcccagcgtggtgctgtctggaacagccatccacaacttccccaccgtgcagcaccaggagctggccaaggcccagagcggcctggccttccagcagaccagcaacacccagcccatccccatcctgtatgagcaccagctgggccaggccagcggcctgggcggcagccagctgattgacacccacctgctgcaggcccgggccaacctgacccaggccagcaacctgtacagcggccaggtgcagcagcccggccagaccaacttctacaacacagcccagagccccagcgccctgcagcaggtgacagtgcccctgcctgccagccagctgagcctgcccaactttggcagcacaggccagcccctgattgccctgccccagaccctgcagccccccctgcagcacaccaccccccaggcccaggcccagagcctgagcaggcctgcccaggtgtcccagcccttccggggcctcatcccagctggcacccagcacagcatgattgccaccaccgggaagatgtctgagatggagctgaaggccttcggcagcggcatcgacatcaagccaggcaccccacccatcgccggccgcagcaccacccccaccagcagccccttccgggccaccagcaccagccccaacagccagagcagcaagatgaacagcatcgtgtaccagaagcagttccagagcgccccagccaccgtgaggatgacccagcccttccccacccagtttgccccccaggccaagcagagagctgaggtgctgcagagcacccagcgcttcttcagcgagcagcagcagagcaagcagatcggcggcggcaaggcccagaaggtggacagcgacagcagcaagcccccagagaccctgacagaccccccaggagtgtgccaggagaaggtggaggagaagcccccaccagcccccagcatcgccaccaagcctgtgaggacaggccccatcaagccccaggccatcaagacagaggagaccaagagctag

SEQ ID NO: 184936 - DNA, 8553 bp, Artificial Sequence
  derived and/or modified sequence
atgtctgagaagagcggccagagcaccaaggccaaggatggcaagaagtatgccaccctgagcctcttcaacacctacaagggcaagagcctggagacccagaagaccacagcccggcacggcctgcagagcctgggcaaggtgggcatcagcaggaggatgcctcctccagccaacctgcccagcctgaaggccgagaacaagggaaatgaccccaacgtgaacatcgtgcccaaggatggcaccggctgggccagcaagcaggagcagcacgaggaggagaagaccccagaggtgcccccagcccagcccaagccaggagtggccgcccctcctgaggtggccccagcccccaagtcctgggccagcaacaagcagggcggccagggagatggcatccaggtgaacagccagttccagcaggagttccccagcctgcaggccgccggggaccaggagaagaaggagaaggagaccaatgatgacaactacggccctggccccagcctgcggccccccaacgtggcctgctggagagatggcggcaaggctgctggcagccccagcagcagtgaccaggatgagaagctgcccggccaggatgagagcacagctggcaccagcgagcagaatgacatcctgaaggtggtggagaagagaattgcctgtggccccccccaggccaagctgaatggccagcaggccgccctggccagccagtaccgggccatgatgccaccctacatgttccagcagtaccccaggatgacctacccacccctgcacggccccatgaggttcccccccagcctgtctgagaccaacaagggcctgcggggccggggccccccacccagctgggccagcgagcctgagcggcccagcatcctgagcgccagcgagctgaaggagctggacaagtttgacaacctggatgctgaggctgatgagggctgggccggggcccagatggaggtggactacacagagcagctgaacttcagtgatgatgatgagcagggcagcaacagccccaaggagaacaacagcgaggaccagggcagcaaggcctctgaaaataatgaaaacaagaaggagacagatgaggtgagcaacaccaagagcagcagccagatcccagcccagcccagcgtggccaaggtgccctacggcaagggccccagcttcaaccaggagcggggcaccagcagccacctgcccccaccacccaagctgctggcccagcagcaccccccaccagaccggcaggccgtgcccggccggcccggccccttccccagcaagcagcaggtggctgatgaagatgagatctggaagcagaggcggcggcagcagagcgagatctctgctgctgtggagcgggccaggaagagaagagaggaggaggagaggaggatggaggagcagaggaaggccgcctgtgccgagaagctgaagaggctggatgagaagctgggcatcctggagaagcagcccagccctgaggagatccgggagcgggagcgggagaaggagcgggagcgggagaaggagctggagaaggagcaggagcaggagcgggagaaggagcgggagaaggaccgggagcggcagcaggagaaggagaaggagctggagaaggagcaggagaagcagcgggagatggagaaggagaggaagcaggagaaggagaaggagctggagcggcagaaggagaaggagaaggagctgcagaagatgaaggagcaggagaaggaatgtgagctggagaaggagcgggagaagctggaggagaagattgagccccgggagcccaacctggagcccatggtggagaagcaggagagcgagaacagctgcaacaaggccgaggaggagcctgtgttcacccggcaggacagcaacagaagtgagaaggaggccacccctgtggtgcatgaaacagagcctgagagcggcagccagcccaggcctgctgtgctgagcggctacttcaagcagttccagaagagcctgcccccacgcttccagaggcagcaggagcagatgaagcagcagcagtggcagcagcagcagcagcagggcgtgctgccccagacagtgcccagccagcccagcagcagcacagtgcccccaccaccccaccggcccctgtaccagcccatgcagccccacccccagcacctggcctccatgggctttgacccccgctggctgatgatgcagagctacatggaccccaggatgatgagcggccggcctgccatggacatcccccccatccaccctggcatgatcccccccaagcccctgatgagaagagaccagatggagggcagccccaacagcagcgagagctttgagcacatcgcccggagcgcccgggaccacgccatcagcctgtctgagcccaggatgctgtggggcagtgacccctacccccacgccgagccccagcaggccaccacccccaaggccacagaggagccagaagatgtgcgctctgaggccgccctggaccaggagcagatcacagctgcctacagcgtggagcacaaccagctggaggcccaccccaaggctgacttcatccgggagagcagcgaggcccaggtgcagaagttcctgagccgctctgtggaggatgtgcggccccaccacacagatgccaacaaccagagcgcctgctttgaggccccagaccagaagaccctgagcgccccccaggaggagcgcatctctgctgtggagagccagcccagcaggaagaggtctgtgagccacggcagcaaccacacccagaagccagatgagcagaggtctgagcccagcgctggcatccccaaggtgaccagccgctgcatcgacagcaaggagcccatcgagaggcctgaggagaagcccaagaaggagggcttcatccgcagcagcgagggccccaagccagagaaggtgtacaagagcaagtctgagacccgctggggcccccggcccagcagcaacagaagagaggaggtgaatgacaggcctgtgcggcgcagcggccccatcaagaagcctgtgctgcgggacatgaaggaggagcgggagcagaggaaggagaaggagggggagaaggccgagaaggtgacagagaaggtggtggtgaagccagagaagacagagaagaaggacctgcccccacctcctcctccaccccagcccccagcccccatccagccccagagcgtgcccccacccatccagcctgaggccgagaagttccccagcacagaaacagccaccctggcccagaagcccagccaggacacagagaagcccctggagcctgtgtccacagtgcaggtggagcctgctgtgaagacagtgaaccagcagaccatggccgcccctgtggtgaaggaggagaagcagcctgagaaggtgatcagcaaggacctggtgattgagcggcccaggccagacagcaggcctgctgtgaagaaggagagcaccctgccccccaggacctactggaaggaggcccgggagcgggactggttcccagaccagggctaccggggccggggccgcggggagtactacagccggggccgcagctaccggggcagctatggaggccggggccggggcggccggggccacacccgggactacccccagtacagagacaacaagcccagggctgagcacatccccagcggccccctgcggcagcgggaggagagcgagaccaggtctgagagcagtgactttgaggtggtgcccaagagaagacggcagaggggcagcgagacagacacagacagcgagatccatgaaagtgccagtgacaaggacagcctgagcaagggcaagctgcccaagcgggaggagaggcctgagaacaagaagcctgtgaagccccacagcagcttcaagccagacaaccacgtgagaattgacaaccggctgctggagaagccctacgtgagagatgatgacaaggccaagccaggcttcctgcccaagggggagcccacccggcggggccggggcggcaccttccggcggggcggccgggaccccggcggccggcccagccggcccagcaccctgcggcggcctgcctacagagacaaccagtggaacccccggcagagcgaggtgcccaagccagaagatggagagcccccaagaagacatgagcagttcatccccatcgctgctgacaagaggcctcccaagtttgagaggaagtttgatcctgcccgggagcggccccggcggcagaggcccaccaggcctccccggcaggacaagcccccacgcttccggcggctgcgggagcgggaggccgccagcaagagcaatgaggtggtggccgtgcccaccaatggaacagtgaacaacgtggcccaggagcctgtgaacaccctgggggacatcagcggcaacaagaccccagacctgagcaaccagaacagcagtgaccaggccaatgaggagtgggagacagccagcgagagcagtgacttcaatgaaagaagagaaagagatgagaagaagaatgctgacctgaatgcccagacagtggtgaaggtgggggagaatgtgctgccccccaagcgggagatcgccaagaggagcttcagcagccagaggcctgtggaccggcagaacagaagaggcaacaatggaccacccaagagcggcaggaacttcagcggccccagaaatgaaagaagaagtggcccccccagcaagagcggcaagaggggcccctttgatgaccagcctgctggcaccactggagtggacctgatcaatggcagcagcgcccaccaccaggagggcgtgcccaatggaacaggccagaagaacagcaaggacagcacaggcaagaagcgggaggaccccaagccaggccccaagaagcccaaggagaaggtggatgccctgagccagtttgacctgaacaactatgcctctgtggtgatcattgatgaccaccctgaggtgacagtgattgaggacccccagagcaacctgaatgatgatggcttcacagaggtggtgtccaagaagcagcagaagaggctgcaggatgaggagaggaggaagaaggaggagcaggtgatccaggtgtggaacaagaagaatgccaatgagaagggccgcagccagaccagcaagctgcccccaagatttgccaagaagcaggccaccggcatccagcaggcccagagcagcgcctctgtgccccccctggccagcgcccccctgccccccagcaccctggcccctgtgtctgccagcgcctctgtgtctgcctctgtgcctgccagcaccagcgctgctgccatcaccagcagcagcgccccagccagcgccccagcccccacccccatcctggcctctgtgtccaccccagcctctgtgaccatcctggccagcgccagcatccccatcctggccagcgccctggccagcaccagcgcccccaccccagccccagctgccagcagccctgctgcccctgtgatcacagcccccaccatcccagccagcgcccccacagcctctgtgcccctggccccagccagcgccagcgccccagccccagcccccacccctgtgtctgcccccaacccagcccccccagccccagcccagacccaggcccagacccacaagcctgtgcagaaccccctgcagaccaccagccagagcagcaagcagcccccacccagcatccggctgcccagcgcccagaccccaaatggaacagattatgtggccagcggcaagagcatccagaccccccagagccacggcaccctgacagctgagctgtgggacaacaaggtggcccccccagctgtgctgaatgacatcagcaagaagctgggccccatcagccccccccagcccccatctgtgtctgcctggaacaagcccctgaccagctttggcagcgcccccagcagcgagggcgccaagaatggccaggagagcggcctggagattggaacagacaccatccagtttggagccccagccagcaatggaaatgaaaatgaggtggtgcctgtgctgtctgagaagtctgctgacaagatccctgagcccaaggagcagaggcagaagcagcccagggctggccccatcaaggcccagaagctgcctgacctgagccctgtggagaacaaggagcacaagccaggccccatcggcaaggagaggagcctgaagaacaggaaggtgaaggatgcccagcaggtggagcctgagggccaggagaagcccagccctgccaccgtgcgcagcacagatcctgtgaccaccaaggagaccaaggctgtgtctgagatgagcacagagatcggcaccatgatctctgtgagcagcgcagaatatggcaccaatgccaaggagagcgtgacagactacaccacccccagcagcagcctgcccaacacagtggccaccaacaacaccaagatggaggacaccctggtgaacaacgtgcccctgcccaacaccctgcccctgcccaagcgggagaccatccagcagagcagcagcctgacctctgtgccccccaccaccttcagcctgaccttcaagatggagagcgccaggaaggcctgggagaacagccccaacgtgcgggagaagggcagccctgtgaccagcacagccccacccatcgccactggagtgagcagcagcgccagcggccccagcacagccaactacaacagcttcagcagcgcctccatgccccagatccctgtggcctctgtgacccccacagccagcctgagcggggccggcacctacaccaccagcagcctgagcaccaagagcaccaccaccagtgacccccccaacatctgcaaggtgaagccccagcagctgcagaccagcagcctgcccagcgccagccacttcagccagctgagctgcatgcccagcctcatcgcccagcagcagcagaacccccaggtgtatgtgtcccagagcgctgctgcccagatcccagccttctacatggacaccagccacctgttcaacacccagcacgcccggctggccccacccagcctggcccagcagcagggcttccagcccggcctgagccagcccacctctgtgcagcagatccccatccccatctatgcccccctgcagggccagcaccaggcccagctgagcctgggcgccggccctgctgtgtcccaggcccaggagctgttcagcagcagcctgcagccctaccgcagccagcctgccttcatgcagagcagcctgagccagcccagcgtggtgctgagcggcacagccatccacaacttccccaccgtgcagcaccaggagctggccaaggcccagagcggcctggccttccagcagaccagcaacacccagcccatccccatcctgtatgagcaccagctgggccaggccagcggcctgggcggcagccagctgattgacacccacctgctgcaggcccgggccaacctgacccaggccagcaacctgtacagcggccaggtgcagcagcccggccagaccaacttctacaacacagcccagagccccagcgccctgcagcaggtgacagtgcccctgcctgccagccagctgagcctgcccaactttggcagcacaggccagcccctcatcgccctgccccagaccctgcagccccccctgcagcacaccaccccccaggcccaggcccagagcctgagcaggcctgcccaggtgtcccagcccttccggggcctcatcccagctggcacccagcacagcatgattgccaccaccgggaagatgtctgagatggagctgaaggcctttggaagtggcatcgacatcaagccaggcaccccacccatcgccggccgcagcaccacccccaccagcagccccttccgggccaccagcaccagccccaacagccagagcagcaagatgaacagcatcgtgtaccagaagcagttccagagcgccccagccaccgtgaggatgacccagcccttccccacccagtttgccccccagatcctgagccagcccaacctggtgccccccctggtgcgggccccccacaccaacaccttccctgcccctgtgcagaggcctcccatggccctggccagccagatgcccccacccctgaccaccggcctgatgagccacgcccggctgccccacgtggcccggggcccctgtggcagcctgagcggcgtgcggggcaaccaggcccaggccgccctgaaggccgagcaggacatgaaggccaagcagagagctgaggtgctgcagagcacccagcgcttcttcagcgagcagcagcagagcaagcagatcggcggcggcaaggcccagaaggtggacagcgacagcagcaagcccccagagaccctgacagaccccccaggagtgtgccaggagaaggtggaggagaagcccccaccagcccccagcatcgccaccaagcctgtgaggacaggccccatcaagccccaggccatcaagacagaggagaccaagagctag

SEQ ID NO: 184937 - DNA, 8454 bp, Artificial Sequence
  derived and/or modified sequence
atgagcgagaagagcggccagagcaccaaggccaaggacggcaagaagtatgcaacactatctctctttaacacatacaagggcaagagcttggaaacacagaagaccacagccaggcacggactacaaagtctgggtaaagtcggaattagtcgacgcatgcccccacctgccaatctcccctcattgaaagctgagaacaagggaaatgatccaaatgtcaacattgtacccaaggacggaacaggctgggcctcaaaacaggaacaacacgaggaagaaaagaccccggaggtcccaccagcgcagcctaagccgggggtagctgcccctcccgaggttgctccagctccaaaaagctgggccagtaacaaacagggcggacagggagacgggatccaagttaattcacagtttcagcaggaatttcccagccttcaggctgcgggtgaccaggaaaagaaggagaaggagaccaacgatgataactatggaccggggccctcattgaggcccccaaacgtggcctgttggcgggacggaggcaaggctgccgggagtccttcatcaagcgaccaagatgagaagttgccaggacaagacgaatctacagcaggaacgtctgaacaaaatgatattttaaaggtcgtggagaaacgtatcgcctgtggtccccctcaggcaaaactaaacggccagcaagctgcactggcctctcagtaccgcgcaatgatgcctccttacatgttccaacagtatcccaggatgacttatccccccctccatggtcctatgcgattccccccctcgctgtcagagaccaacaaaggccttcggggtagagggccaccaccctcttgggcaagtgagcccgaaagacccagcattcttagcgcgtccgaattgaaagagttagataaatttgataatttggacgcagaagcggacgagggctgggccggtgcccagatggaggtcgattacacagagcagctgaatttctctgacgatgacgaacagggctcaaacagccctaaggagaacaactcagaggaccagggtagcaaggccagcgagaataatgagaacaaaaaagagacagatgaggtgtccaacaccaaaagctcctcccaaataccagcgcaaccatctgtagccaaagtcccgtacgggaagggccctagctttaaccaggagcgcgggaccagttcacatctccctccaccacctaaattgttggcgcagcagcaccctccacctgatagacaggccgtgcctgggcgtcccggccctttccccagcaaacagcaggtggcagacgaagacgaaatctggaagcagcgccggcggcagcagagcgagatttctgccgcagtagagcgggcccgcaagcggcgagaggaggaagagcggcggatggaagagcagaggaaggctgcttgcgccgaaaaactgaaaaggctggatgagaaactcggcatattggagaagcaaccctccccagaggagatcagggaaagagaaagggagaaggaacgggagagagagaaggagctggagaaggaacaagagcaggagcgggaaaaggagagagaaaaggatcgcgaacgccagcaggaaaaggagaaagagctggagaaagagcaggaaaaacagcgcgaaatggagaaagagaggaagcaggagaaggagaaggaactggagaggcagaaagagaaagagaaggagttgcagaaaatgaaagagcaggaaaaagagtgcgaactcgagaaggagcgtgagaaactagaagaaaaaattgagcctcgagagcccaatttggagccaatggttgaaaaacaggaatccgagaattcatgcaataaggaggaagagccagtattcacacgacaggattctaataggagtgagaaggaagctactccagtcgtgcatgagaccgaacccgagagcggcagccagcccaggcctgctgttttatccggttactttaagcaattccaaaaaagcctgcctcctcggtttcagagacagcaggagcagatgaaacagcagcagtggcagcagcagcagcagcagggcgtgctcccacagacagtgcctagtcagccatcctcttctactgtgccccccccaccacaccggccactttaccagccgatgcagccacatccacagcacctggcatctatggggttcgaccccaggtggttaatgatgcagtcatatatggaccccaggatgatgtcaggcaggcccgctatggatattcccccgattcaccccgggatgatcccaccgaagcctctgatgaggagggaccagatggagggatccccgaatagctctgagtccttcgagcacattgccagatcagctcgggaccacgccatctcgctctcagaaccgagaatgctgtggggcagtgacccatacccacacgccgagcctcagcaggcaaccacccccaaagcaacagaagagccagaagacgtcagatccgaagctgccctcgaccaggaacaaatcacagcggcatactccgtggagcataatcagctggaagctcatcccaaagcagattttatcagggaatctagcgaagcccaagttcagaagttcctctcacggtcagttgaggatgtgcggccccaccacacagacgctaataaccagagtgcgtgcttcgaggcgccagaccagaagaccctgtcagccccgcaggaagaaagaatctctgctgtggagagccagccatctcgaaagagatccgtgtctcatggaagcaatcacacacagaagccagatgagcagaggtctgaaccctcagccgggattccgaaagttactagcaggtgtattgatagcaaagagcctatagagagacctgaggagaaacccaagaaggaaggctttatccggagctccgagggccccaaacccgagaaagtgtataagtcgaagtcggagacgagatggggccccagaccgtcctccaaccgtagagaggaagttaacgacagaccagtgcgaaggagtggcccaattaagaagccggtgctgagagatatgaaggaggaaagggaacaacggaaggaaaaggaaggcgaaaaagccgaaaaagtcacagagaaggtggtggtgaagcccgagaagaccgaaaagaaagacctccccccgcctcctccacctcctcaacctccagcccctatccagccccagtctgtgcccccaccgatacagcccgaggctgagaagttcccaagcaccgagactgctacattggcacagaaaccatcacaagatactgaaaaaccactggagcccgtctccaccgttcaggtggagcccgcggtcaagacagtcaatcagcagaccatggctgcaccagtggtcaaggaagaaaaacaacctgagaaggtcatctccaaggacctggtgatcgaacggcctaggcctgatagccgacccgccgtgaaaaaggaaagtactttaccacctcgcacttattggaaagaggccagagagagagattggttccctgaccaaggctatagggggaggggcaggggagaatactatagcaggggaaggtcctaccgaggatcctatggcgggcggggcagaggaggtcgtggccatactcgcgactacccgcagtaccgtgacaacaaaccgagagccgagcatattccttccggtcccctcaggcagagggaggaatccgaaactcggagtgaaagttccgattttgaggtcgtcccaaagaggaggcggcaacggggctcagagaccgataccgactccgagattcacgaatctgcatcagacaaagacagtctctccaaaggaaaactccctaaacgcgaggaacgccctgagaacaagaagccagtgaagccccattcatcattcaaaccagataaccatgtgcgtatcgataacaggttgcttgagaagccctacgtgagggacgacgacaaggccaaacccggttttctgccaaagggcgagccaacacgcagagggcgggggggcaccttcagaaggggggggcgggatcccggcggacgcccgagtcgaccgtcaactctgcggcgtcccgcatacagggacaaccagtggaaccctcgccagtccgaagtgccaaagccagaagacggggaacctccaagacgacacgagcagtttatccccatcgccgctgacaagcgaccaccaaaattcgaacgaaagttcgaccccgcccgagaaaggcccaggagacagcgccccacaagacctcctagacaggacaagcctccccgattcaggaggctccgcgaacgagaggctgcatcaaaaagcaacgaagtggtagcagtacctaccaatggcaccgtgaacaacgtggcccaggagcccgttaacacattgggcgatatctccgggaacaaaactccagacttatcgaaccaaaactcctcagatcaggcaaatgaagagtgggagactgcgagtgagtctagcgactttaatgagcgccgggagcgggatgagaagaaaaatgcagatctgaatgcccagacggtcgtgaaagtgggtgaaaacgtcctgcccccgaagcgcgagattgctaagaggagcttctcctcccagcgacccgtggacagacagaaccggagagggaataatggccccccgaaatcaggaagaaatttctccggacctcggaatgaacgcagatcaggtccaccctcaaaatctggcaagcgagggcctttcgacgatcaacctgccggtacaacaggagtagacctgatcaacggctccagtgctcatcaccaagaaggcgtgccgaacggtacaggccagaagaattctaaagattccacaggcaagaaacgcgaagaccctaaacccggccctaagaagcctaaagaaaaagttgacgccctgagccagttcgatttaaataactacgcttctgtagtcatcatcgacgaccacccagaagtcaccgttatcgaagacccacagagcaatttgaatgatgacggttttactgaagttgtctccaagaaacagcagaagcgcctccaggatgaggagagacgcaaaaaggaggagcaggtaatccaggtgtggaacaagaaaaatgcaaacgagaagggcaggtctcagacgtccaagttacccccacgatttgccaagaagcaagcaactggtatccagcaggcgcagtcttctgctagtgttccacctttggcctctgcgccattacctccctctacctctgcaagcgtgccagcttcaacctcagcccctctgcctgccaccctgactccagtcccagcctctacgtccgctcctgtccccgcctctaccctggcccctgtgcttgcgtccacctctgctcctgtgcctgcctcccctcttgctcctgtgtccgcgagtgccagcgtgagcgcctccgtgcccgccagtacctccgccgcggccatcacatcctcctcggcacctgcctccgcccccgctcccacccctatcttggcctccgtgagtacacctgcctcagtcactatactggcaagcgccagtatcccaatcctcgcgtcagcactggcctccacaagtgcaccaacccccgcacccgccgcctcttctcctgctgccccagtgattaccgcccctaccatccccgcctccgctccaaccgccagcgttcccctggcccccgcaagcgcgtctgcccctgctcccgctccgacaccagtaagcgccccaaaccccgcacccccggcgcctgcccagactcaggcacagacccataagcccgtgcagaaccccctgcaaacgacttcccagagtagtaagcagccccccccatctatccgattgccaagcgctcagacccctaacggtaccgattacgtcgcttcagggaaatccatccagactccccagtctcacggcaccctcacagccgaactctgggataataaagtggctccacccgccgtgctgaacgacatctctaaaaaactgggccctattagtccacctcaacccccctccgtgtccgcttggaataagcccctgaccagcttcggcagtgctccatcttcggaaggcgctaagaatggacaggagagcggcctggagattggcaccgacactatccagttcggggcgcccgcttctaatggcaatgaaaacgaagttgtgcccgtcttgagcgaaaagagcgccgataaaatccccgaaccaaaagaacagagacaaaaacagcctcgagctggtcccatcaaagcccagaagctccccgatttgtcgccagtcgagaacaaagaacacaagcctggacctatcgggaaagagcgttctcttaaaaacagaaaggtcaaggacgcccagcaggtagagcccgagggacaagaaaagccaagccctgcaacagtccgatcaaccgatcctgtgaccaccaaagagactaaagctgtgtcagagatgagcacggagattggcactatgattagcgtttcaagtgccgaatacgggacaaacgcgaaagagtctgttaccgattacacgactccatcttccagcctccctaacaccgtggctacgaacaacaccaagatggaagatacacttgtaaacaatgtgcccctcccgaacaccctgcctctgccaaaacgagagactattcagcagagctcgagtcttacatcagttcccccgaccaccttctccctgacttttaagatggagagcgccaggaaggcctgggaaaatagtccaaatgtgcgtgagaagggttctcctgtaacttcaaccgctccaccaatcgcaacaggtgtgtcttcatccgcctccggcccttctaccgccaattacaatagcttcagtagtgcgtctatgccccagatacctgtggcaagtgttacacccacagccagcctgtccggagccggaacatacactacatcctccctgtctacaaagtccaccactacctcagatccccccaacatatgcaaagtgaagccccagcaactgcagacctccagcttgccatccgcctcacacttcagtcagttgtcttgtatgcccagcttaatagcgcagcaacagcaaaatcctcaagtctatgtttcgcagtcagcggccgcgcaaatcccagccttttatatggacacatctcatttattcaacacacagcatgctcgcttagctccaccgtcactggcgcagcaacagggatttcagcctggtttgagccagccaacatctgttcagcaaataccgatccccatctatgctcctttgcagggacagcaccaggctcagctctctctgggggcgggccccgccgttagtcaggcccaggaactcttcagctcctctctgcaaccataccgctctcaacccgcgttcatgcagagctctctgtcccagccctcagtggtactttcaggcactgcaatccacaacttccccacggtacagcaccaggaactcgcaaaggcacagtctgggcttgcattccagcagacttcaaatacacagccaatacccattctctacgaacatcaactgggccaggctagtggattgggcggctctcagctcatagatacgcatttgcttcaggcccgggctaacctgactcaggccagcaacctatatagcggtcaggttcagcaacccggacagaccaacttctacaacactgcacaatctccgagcgcgttacaacaggtcacagttccactgcccgccagtcagctgtcccttccaaattttgggagtaccggccaacccctcatcgccctgccacagacactacagccgccactgcagcacactacccctcaagcccaggcccagagcctgtcacggcccgcccaggtctcccaaccattccgaggcttaatacccgcagggacgcagcattcaatgatcgccactaccggcaagatgtctgagatggagttgaaagcctttggcagtggcatcgatatcaagccaggtactccacctatcgcaggcagaagcacaacacccacaagttcacccttccgggctacctctacctccccaaactctcagtccagcaaaatgaatagcatcgtgtaccaaaaacagtttcagagcgcccctgctacagtacgcatgactcagccatttcccactcagtttgccccacaggccaaacagagggccgaggtgctccagagtacccaacgctttttttccgagcagcagcagtccaagcagatcggagggggaaaggcacagaaggtggactctgacagctcaaaaccacctgagactttaactgatccaccaggggtctgccaggagaaggtcgaagagaaaccaccacccgcgcctagcatcgccactaaacccgttcgcacaggccccatcaagccacaggctataaaaactgaagaaaccaaatcttag

SEQ ID NO: 184938 - DNA, 8697 bp, Artificial Sequence
  derived and/or modified sequence
atgagcgagaagagcggccagagcaccaaggccaaggacggcaagaagtacgccactctctcacttttcaatacatacaagggcaaaagcctggagacacagaagactactgtcgccgcccgccatgggctccagagtttaggcaaagtcggcatcagtcggcggatgcctccgccagcaaatctcccttccttaaaggccgagaataagggcaacgatccgaacgtgaacatcgtgcccaaggatgggaccggttgggcatcgaagcaggagcagcacgaggaggagaagacaccagaagttcctcccgcacagcctaaaccgggtgtagccgccccacctgaagtggctcctgccccaaagagttgggcttctaacaagcagggcggccagggagatggcatccaggtgaactctcaattccagcaggaatttcctagtttgcaagctgctggcgatcaagagaaaaaggaaaaagagactaacgatgacaattacggtcctggccctagcctccgtcccccaaacgtggcctgctggcgcgatggagggaaagctgcaggcagccccagctcgagtgaccaggacgaaaaattgcccggccaggacgaaagcaccgctggtaccagcgaacagaacgatatcctaaaagtggtggagaaacgcatcgcctgcggccctccccaagctaaacttaatggccagcaggccgccctcgcttcacagtaccgtgccatgatgccgccgtacatgttccaacagtatccccgcatgacatatcctccccttcacggccccatgagattcccaccttcacttagcgagactaacaagggtctccgagggagaggtccgccaccatcctgggccagcgagcccgagcggccctcaatcttatcagctagcgaactgaaagaattggacaaattcgacaacctagatgctgaggcggacgaaggctgggctggggcgcagatggaagtcgattatactgaacagcttaatttttctgacgacgatgagcagggctcaaacagcccaaaagaaaataattccgaggaccaaggctcaaaggcatctgagaacaatgagaataagaaggaaacggatgaggtgtcaaatactaaatcttcttcgcaaatccccgcccaaccttctgtagccaaagtgccttatggcaaaggcccgagcttcaaccaagaacgagggacctccagtcacctaccgccccccccaaaattgctggcacaacagcatccaccacccgatcggcaggcagtgcctggacggcctggccctttccctagtaaacagcaggttgcggatgaagacgaaatctggaaacaacgccgccgacagcaaagtgagattagcgcagcggtggagcgtgccagaaaacgacgcgaggaggaggagagacgcatggaagagcaacgaaaggcagcctgtgcggaaaagctgaaaagattggatgagaagctgggcatcctagaaaaacaaccttcaccagaggagatcagagagcgagaacgagagaaagaacgcgaaagagagaaagagcttgaaaaggagcaggaacaggaaagggagaaggaacgggagaaggaccgagagcggcagcaagagaaagaaaaggagctcgagaaagagcaggaaaagcagcgagagatggaaaaagagcgcaagcaggaaaaggagaaagagctggaacggcaaaaagaaaaggaaaaagaactacagaagatgaaggaacaggagaaagagtgcgaactggaaaaagagcgcgagaagctcgaagaaaagatagaacctcgcgagccaaatttggagcctatggtcgagaaacaggagagcgaaaattcttgtaacaaggaagaggagcctgtgtttactcggcaggactctaatcgctctgaaaaggaggccacaccagtagtccacgaaaccgaaccagagagtggctcccaaccacgcccggccgtactctctggctatttcaagcagttccaaaagtccttgccaccaagattccaacggcaacaggagcagatgaaacaacagcagtggcagcaacagcagcagcagggtgtcctgccccagacagtgccttcacaacccagtagctccaccgtccctccacccccgcatcgtcctctgtatcagcctatgcagccccaccctcagcacttggccagcatgggattcgatccccggtggctgatgatgcagagttatatggaccctagaatgatgtcagggcgccctgccatggatattccacccatccatccaggcatgattcctccgaagccattaatgagacgggaccagatggagggtagcccaaacagcagcgagtcatttgaacatattgcacgatcggcccgcgaccatgccataagcctgagtgaacctagaatgctctggggcagcgatccctatccccatgcagaaccccagcaggcaaccacgcccaaggctacagaggagcccgaagatgtgcgatctgaagcagcattggaccaggaacaaatcaccgccgcttattctgtggagcataaccagctcgaagcccatccgaaggctgactttattcgggaaagctcagaggcccaagtccagaagtttttatctcggtctgtcgaagacgtgaggcctcaccacacagatgcaaacaatcaaagcgcctgcttcgaggcgccagaccagaaaacactgtcagcaccacaagaggaaagaatttcagctgtggaaagtcaaccttcaaggaaacgcagcgtttcacacgggtccaaccacacacaaaagcctgacgagcagagatcagagccgtccgcaggtattccaaaagtgacctccagatgtatcgacagcaaagaaccaatcgagaggcctgaagaaaagccgaaaaaagaaggtttcatcagaagtagtgaaggcccaaaaccggagaaggtttataaatcaaaatccgagactcgctggggcccgcgcccttctagtaacaggcgcgaggaggttaacgatcgcccagtgcggcgctccgggcccattaaaaagcctgtgctgagggacatgaaggaggagcgggaacagcgtaaggagaaagagggagagaaagctgagaaagtcactgagaaggtggttgtgaagcctgagaaaacagaaaaaaaagacttgccacctcctcctcctccacctcagccccctgcacccatccagccccagtccgtgccacctccgatacaacctgaagccgagaaatttccctcaaccgagaccgctactttggcacagaaaccgtcacaggatacggaaaagcctttggagcccgtaagtactgtgcaggtagaacctgcggtgaagacggtgaatcagcagaccatggccgccccggtcgtgaaagaggagaagcagccagagaaggtgatttctaaagatctcgttatcgagagaccacggcccgactcccggccggccgtgaagaaggagagcactcttccccctagaacttattggaaggaggccagggaacgggattggttccccgaccagggctaccgtggacggggacgcggagaatattatagccggggtcggtcctatcgcggatcctacggggggagaggaaggggcggcaggggccacactagagattatccgcagtaccgtgataacaaacccagggcagagcacatcccctcgggaccactgaggcagcgggaagagtctgaaacccggagcgagtcctcagacttcgaggtggtgccgaaacgccggagacaacggggatctgagacagataccgactctgagatccacgagagcgcttctgataaagattctttgtctaaaggaaagctgcccaagagagaagagcgccctgaaaacaagaaaccagttaaacctcactctagttttaagccagataatcatgtgcgcatcgacaatagacttctcgaaaaaccatatgtccgtgatgacgacaaggccaaacccggattcctgcctaagggcgagcccacccgcaggggccgaggtggcacattccgcagaggtgggagagatcccggaggtagaccatcccgcccctcaaccctgcgccgacccgcataccgggataatcagtggaatcctaggcaatcagaagtcccaaaacccgaggatggggagcctccgcgccggcatgagcagtttatccccattgccgcagacaagcgccccccaaaattcgaacggaaattcgaccctgcaagagagcgcccccgaagacaacgaccaacaaggccccccaggcaggataagccacctcgctttcgcagattgcgggaacgcgaggctgcttcaaagagtaacgaagttgtggccgtgcctacaaacggtactgtcaacaacgtagcacaggagccagtgaataccctcggagatattagcgggaacaaaacgcctgatttaagtaaccaaaactcttccgatcaggctaacgaagaatgggagacggcgagtgagagtagtgacttcaatgaacgcagagaaagagacgagaagaagaacgccgatctgaacgcccagactgtcgtgaaagtaggcgaaaacgtgctgccacctaagcgggagatcgcaaagcgctcattctccagtcagagaccagttgaccgacaaaatcgccgtggcaataacggacccccaaagtctggacggaatttcagcggacccaggaacgagaggaggtctggacctcctagtaagtctggcaagcgcggcccttttgacgatcaaccagccggcaccaccggggtcgaccttatcaatggcagctccgcccatcaccaagaaggcgtgcccaacggcaccggccagaaaaacagtaaagattccacagggaagaagcgtgaagacccaaagcctggacccaagaagcctaaagagaaagtggatgctctgtcacaatttgatctgaataactacgcaagtgttgtgatcattgacgaccaccctgaagttaccgtgattgaagacccccaatctaacctgaacgatgatgggttcaccgaggttgttagcaagaagcagcagaaaaggctacaggatgaagagcggcgaaagaaagaagaacaggttatccaggtgtggaataagaagaacgccaatgaaaaaggacgttcgcagaccagcaagctccccccgagattcgccaagaagcaagccaccgggatccagcaggctcagtcttccgccagtgtgcctcctctcgccagcgccccacttccaccaagcacatccgcctcggtacctgcctctacttctgcacctctcccagctacactgacccccgtcccagcttcaacctctgctcccgtgccagcgagtaccctggcccccgttctcgccagcacatctgctcctgtccctgcgagtccactcgcccccgtgtctgctagtgccagcgtctctgctagcgttccggcctctaccagcgcagctgctataacgtcctcctcagccccagccagtgcccctgcacctacccccattttggccagcgtctccacaccagcctcagttaccattctggcgtccgcatctatccccattctggcgagtgccctggctagtacttcggcacccacccctgcacccgcagcaagttcccctgccgctcccgtgatcaccgccccgacaattccagcttcagctccaactgcttccgttcccctggctcccgcgagtgctagcgcacctgcacctgctcccactcccgtgtccgcgcctaacccagctcccccggcccctgctcagactcaggcccagacacataaacccgttcaaaatcccctccagaccactagccaatcttcgaagcagccgcctccatcaatacggctgcccagcgctcagacgcccaacggaacagattacgttgcctctggtaaatctatacaaactccacagtcccatggcacattaactgcagaactgtgggataacaaggtggccccgcccgccgtgctaaacgatatttcaaagaagctcggccctatttcaccgcctcagccacccagtgtgagtgcctggaataagcccttaacatctttcggtagtgccccgagctctgagggcgctaaaaatgggcaagagtccggtctcgaaatcggtactgataccatccagtttggggcacctgcctccaatggaaacgagaacgaggtggtgccagtgttgagcgaaaaaagcgctgataaaattccagaacccaaggaacagcgccagaagcagccacgtgctgggcctatcaaggcccaaaaactcccagatctcagccccgtggagaataaggaacacaagcctggtccaatcggtaaagagcgaagtcttaaaaacagaaaggtgaaggatgcccaacaggtcgagccagagggccaagaaaaaccgagccctgccactgtccgcagcacagatcctgtgacaaccaaagaaaccaaagctgttagcgagatgtcaaccgagatcgggaccatgatctcagtgagctctgctgaatatggcactaacgctaaggaaagtgtcaccgattatactacgccaagctcctctctccctaataccgtggccacaaataatacaaagatggaagataccctcgtcaacaatgttccactccccaataccctgcctttgccaaaacgtgagaccatccagcagtcctccagtctcacctctgtgccacctacgactttctccttgacatttaaaatggagagcgctcggaaagcatgggaaaacagtccaaacgttcgggagaaggggtcaccggtcacaagtactgcgcctcccatcgcgaccggggtgtctagttccgcttctggccctagtacggccaactataactcattcagttctgcaagtatgcctcaaatcccagtggcgagtgtgacaccgactgcctcactgtctggtgcggggacatacactacctcctccttatccaccaagagtactacaacctctgacccgccaaacatctgtaaggtgaagccacaacagctacaaacttcttcactccccagtgcttctcactttagtcaactctcctgtatgccttctcttattgcccagcagcagcaaaacccacaagtgtacgtatcccagtccgccgctgcgcagattcccgctttttatatggatacatcacatctctttaacacacaacacgccagactggctccaccttctctcgcccagcagcaggggttccagccaggcctgagccagcctacctccgtccaacagatcccgataccaatatacgccccactgcagggccagcatcaggcccagttgtccctgggcgcggggcccgcggtgtcgcaggctcaggagttatttagcagttccctgcagccataccgctcccagcccgcatttatgcagagctcactgtctcagccatccgtggtcctatcgggcacagctatccataacttcccaactgtgcaacaccaggaactggccaaggcccagagtgggttggcatttcagcagacaagcaacactcagccaattcccattctgtacgagcatcagctcggacaagcgtcaggcctgggcgggagtcagttgatagatacacacctgctccaggcacgggccaatttgacccaggcttcaaatctttactccggccaagtacagcagcctggtcagaccaacttttataataccgctcagagccccagtgccctgcagcaagtgaccgtgccactccctgccagccagctgtcgcttcctaactttgggtccacaggacagccactaatcgccctgccgcaaaccctacaaccccctctccagcatactacaccgcaggcgcaggcacagtctctcagcagaccagcccaggtctcccagccctttaggggtctaattccagcagggacgcagcacagcatgatagccaccactggtaagatgagtgagatggaactaaaagcttttggtagtgggatcgatattaaaccgggaactcctcccattgccggcaggagtactactcctacgtcttctccttttcgagccacctccactagtccaaacagccagtcctcgaagatgaatagcatagtttatcagaagcagttccagtctgcccccgctaccgtgcgaatgacacagcctttccctacccagtttgccccacaaatcctaagccagcccaacctagtcccaccactggttcgcgcaccacatactaacacgttcccggcacctgttcaacggccaccaatggctctggccagccaaatgccgcctcccctgacaactggacttatgtcacatgcccgactcccacacgtggctaggggaccttgcggaagtttgtcgggcgttcgggggaatcaagcccaggcagcgttaaaggctgagcaagatatgaaagctaagcagcgcgccgaagtattgcagagtacccaaaggttcttttcggagcagcagcagtcaaagcagatcggaggcgggaaggcccaaaaagtggatagtgactcctcaaagcctcccgagactttgacagatccccctggagtgtgccaagaaaaggtggaggagaagcctccacctgctccatccatcgctaccaagcctgtgcgcacaggccccatcaaaccccaagccattaagaccgaagaaacgaagtcttag

SEQ ID NO: 184939 - DNA, 7962 bp, Artificial Sequence
  derived and/or modified sequence
gtgcccaaccagatgttccagcagtacccccggatgacctaccccccactgcatggtccaatgcgattcccaccaagccttagtgaaaccaataagggcctccggggaagaggtccaccaccgagctgggcgagcgaaccagaacgtccttcaatcctttctgcttctgagcttaaggaactggacaagtttgataacctggacgctgaggctgacgaggggtgggccggcgcacagatggaggtcgactacacagagcagctgaacttttctgatgatgatgagcagggctcaaattcccccaaagagaacaactcagaagaccagggaagtaaggcctcggagaacaatgagaataaaaaggagacagatgaggtttccaatactaagagcagcagtcaaatcccggcacaacctagcgtggctaaagtaccctatggcaagggacccagcttcaaccaagagagagggaccagcagtcaccttccccccccccctaagctcctagcccagcagcatccccctccagaccgacaagcagtccctggacggcccggaccatttccttctaaacagcaggtggcagatgaggacgaaatttggaagcaacggcgaaggcagcagtctgagatctcagccgctgttgagagggcgagaaagcggcgagaagaagaagaacgtaggatggaagaacagcggaaggccgcctgcgccgaaaaacttaagcgattggatgagaaactggggatcttggagaagcagccttctcctgaggaaatccgggaaagagagcgcgaaaaggaacgcgaaagggagaaggagttggagaaagagcaggaacaggaaagggagaaggaacgtgagaaggacagagagcgccagcaggagaaagaaaaggagctggaaaaagagcaggagaaacagcgcgagatggagaaagagaggaagcaggagaaggaaaaggaactggaacgacaaaaggagaaagagaaagagctccaaaaaatgaaagagcaagagaaggagtgcgaactggagaaagaaagagaaaaacttgaggaaaaaatcgaaccaagagagccaaatctggaaccaatggtggagaagcaggaaagtgaaaatagctgcaataaagctgaggaggaaccggtgttcaccagacaagactcaaaccgctccgaaaaggaagctacgccagttgtacacgagactgagccagaatctgggagccagccccgtcccgcagtcctaagtggctatttcaaacaatttcagaaaagcttacccccccgctttcagcggcagcaggagcagatgaaacagcagcagtggcagcagcaacagcaacagggggtgctgccacaaaccgtgccctcgcagccttcttccagcacggtccctcccccgccacacaggcctctctatcagcccatgcaaccccacccacagcaccttgcatccatgggcttcgacccaaggtggttgatgatgcagagctacatggaccctcgtatgatgtctggtagaccggcaatggacattcccccgatccaccccgggatgatcccccccaaaccattgatgcgacgcgatcagatggaaggatccccgaatagctccgagagctttgaacacatagcccgcagcgcacgcgaccatgctatctccctgtctgagcctcggatgttatggggttcggacccatacccccatgccgagccacagcaggcaactacacccaaggctacggaggaacctgaggatgtgcgctcagaagccgccttggatcaagaacagattactgctgcatactctgtcgaacataatcagctagaagctcatcctaaggccgatttcattagagaatccagtgaagctcaggtgcagaaatttctttcccgatcagtggaggacgtgcgaccacaccatacggacgccaataaccaatccgcgtgctttgaggcccctgaccaaaagaccctgtctgcccctcaggaagagaggatctcagccgtggaatctcagccttctaggaagaggtcagtcagtcacggttccaaccacacacagaaaccggatgagcagagaagtgagccatctgccggcattccgaaggtgacctctagatgcatcgatagcaaggaaccaatagaaaggcccgaggaaaaaccgaagaaggagggatttattaggtcttcagaagggcccaagcctgaaaaggtgtataagtccaagtccgaaactcgttggggccctcgcccatccagtaaccggcgcgaagaggtgaatgatcgtcccgttcgcaggagtggacctattaaaaaaccggtgctgcgcgatatgaaggaggaacgagagcagagaaaggaaaaggaaggcgaaaaagccgagaaggttacagaaaaggtcgttgtgaaacctgagaagactgagaaaaaggatttgccaccaccccccccgccccctcagcccccagcacctatccagcctcagtcagtccctccccctattcaacctgaagcagaaaagttccctagtacggagacagctaccctggcacaaaagccctcccaggataccgagaagcccctagaaccagtctcaaccgttcaagttgaaccggcggtgaagactgttaatcagcaaactatggcggccccagtcgtcaaggaggaaaaacaacctgagaaagtaattagcaaagacctggtcattgaacgtccccgtccggattctaggccggctgtgaagaaggaaagcacgttgccacccagaacctattggaaagaggcccgcgaacgggattggtttcccgaccaaggatatagaggtcgagggcgcggagagtattacagcagggggagatcctaccggggtagttacggcgggaggggtcggggcgggcgcgggcacacccgcgactatccccagtaccgcgacaacaagcctagagcagagcatattccgtcaggaccactcaggcaacgcgaggagtctgagacaaggtctgaaagctcagactttgaagtcgtcccaaaaaggcgacgtcagaggggttctgagacagatactgattccgaaatacacgagtctgcgtccgataaagactccctgtccaagggaaaattgcctaaacgggaggagagacccgaaaacaaaaaacccgtgaagcctcatagctcctttaagcctgataatcatgtgagaatcgataatcgactcctggaaaaaccttatgtgagagacgacgataaagcaaaacccggattcctacctaagggggaaccaaccaggagaggaagagggggcacgttccgaagaggcggccgagatccaggcggacgcccatctcggccaagtaccctgcggcgacctgcgtacagagataatcagtggaatcctagacagagcgaggtgcctaagcctgaagacggtgagccgccccgacggcacgaacagttcattcccattgctgccgacaaaaggcccccaaagtttgagcgcaaattcgatccagcacgagagcgccctagaagacagagacccacacgaccaccacgccaggacaaacctccgcggttcaggcgcctgagggagcgggaggcggcaagcaagtcgaatgaagtcgtagccgtgcctaccaatggcacggtgaataatgtggctcaggagccagtgaatacgttgggagacatctcgggcaacaaaactccagacttgtctaaccaaaattcctcggaccaagcgaatgaagagtgggaaacagcctctgagagttcggacttcaacgagagacgagaacgggacgaaaaaaagaatgcggatcttaacgcacaaaccgtcgtcaaagtgggagagaatgtactcccaccgaagcgcgagatcgctaagcgcagtttctctagccagcgccctgtcgaccggcagaaccgacggggtaacaacgggccaccaaagtccggcaggaatttttcggggccgagaaatgaacgaagaagtggtcccccctctaaatccggcaagcggggccccttcgatgatcagcccgccggaaccacgggggttgacttgataaacggttctagcgcccaccaccaggagggggtgccaaacggaactggtcagaaaaattcaaaggactctaccggtaagaaaagggaggatcccaaacccggaccgaagaagcccaaggagaaggttgacgcgctcagccagttcgacctgaacaattacgcctctgtcgtgattattgacgatcatcctgaggttaccgtgatcgaggatccccagagtaatcttaatgacgacggtttcaccgaggttgtgagtaagaagcagcagaagagactgcaggatgaggaacgaagaaaaaaagaggagcaggtaatccaggtctggaataagaaaaatgctaacgagaagggcagaagtcagacctccaaactacccccaaggttcgccaaaaagcaagcaaccggcatacaacaggcccaaagttccgcatccgtaccccctctggcaagtgcgcccctgcccccgtctactagtgcttcagtgccggcaagcacctctgcgccattacccgctaccctcaccccagtacctgcttcaacgagtgcacccgttccagcttccactctggcccccgttctcgcatcaacttctgcacctgtcccagcaagcccattagcacctgtctcggcctcggcatctgtgagtgcttccgtgcctgcctctacctccgcagccgccataacatctagctctgctccggcctccgctccggcacccacaccaatcctggcctcagtaagtactccagcatccgtcactattctggcaagtgcatcaatcccaatcctggcgtccgccctagcctctacgtctgcacccacccccgctcccgctgcaagcagccccgccgccccagtgattacagctccaacgatccccgcgagtgcccctactgcttctgtaccactggcgcctgctagcgcatccgcgccagcccccgctccaacacctgtcagtgcgcctaacccagcacctcccgctcccgcgcagactcaggctcagactcacaaacctgttcagaatcctctacagaccacatctcaatccagtaagcaacctcccccgagtatcaggctcccaagcgctcagacaccaaatgggactgactacgtcgcaagtgggaagagtattcagaccccccaaagccacggaaccttaactgcagagctgtgggacaataaggtcgcaccccctgcagtgctgaacgacatcagcaagaagctgggtcccatctcgcctccacagccaccgtccgtctctgcttggaataagccactgaccagtttcgggtctgctccaagttccgagggggctaagaatggccaggaaagcggcctcgagattggtactgacactatccagttcggtgctcctgcctccaacggaaatgagaatgaggttgtgcctgtgctcagtgagaagagcgcggacaagatcccagagccaaaggagcagcgccaaaagcaacctagggcaggacctatcaaggcacagaagctccctgacttaagcccggtggaaaacaaggagcacaagcccgggcctatcggtaaggagaggtcccttaaaaaccggaaggtcaaggacgcgcagcaagtcgagcccgagggccaagagaaaccctctccagccaccgtaaggtccacggacccggttacaactaaggaaactaaagcggtgagcgaaatgagtactgaaatcggaacaatgatcagcgtttcaagcgcagaatacggtaccaatgctaaagagtcagtgactgattacactacacctagttcgtccctgcccaacactgtagcgacgaataataccaaaatggaggacacactagtgaataacgtgcctctccctaacaccttgccccttcctaaacgagagaccattcagcagagcagctccctgacctcagtaccaccaaccaccttctcgctgaccttcaaaatggagagtgcgagaaaagcttgggagaattcacctaacgttcgcgaaaaaggtagcccagtcacctccactgctccacccatcgctacgggcgtgagcagctccgcttcaggaccgtccacagcaaactacaactccttctcatctgcctccatgccccaaattccagttgcatctgtcacccccaccgcgtcgctcagcggcgccggcacatatacgacctccagcctgtccaccaaatctactacaacaagtgacccccctaacatctgtaaagtgaaaccacagcagttgcagacgagctctctgcctagcgcctctcacttctctcagctgtcttgcatgccgagcctgattgcacaacaacagcagaatccccaggtctacgtgagccagtcagctgctgcccagattccagcattttacatggatacatcccatctgtttaacacccagcacgcacgactcgctccacctagcctggcccagcagcagggtttccagccagggctgagccaaccaacatcagtccaacagatccctatcccaatttacgcgccactgcaggggcagcatcaggcccagctcagcctgggggcaggacccgccgtttcccaggcccaggagctgttctccagctcgctgcagccataccggagccagcctgctttcatgcaatccagcttatcccaaccttccgtggtcctttccgggacagctattcacaactttcccactgtgcagcaccaggagcttgccaaggctcagtctggacttgcctttcaacagactagcaacacgcagcccatccccatcttgtatgagcatcaactggggcaagcatctggtctgggggggtcacagctaattgatacccacctgctgcaggctcgggccaatctaacacaggcttccaacctgtacagcggccaggtacagcaaccgggacagacaaacttttataataccgcccagtccccatccgcccttcagcaggtgaccgtgccgctgccggccagccaattatccctgccgaactttggttccactggacagccattgatagccctcccccaaacattgcagccacccctgcagcatacaacgccccaggctcaggctcaaagtctgtccaggcccgcacaagtgagtcagccttttagagggctgatccccgcagggacacagcattcgatgattgccaccaccggcaaaatgtcagaaatggagttgaaggccttcggctctggcatcgatattaaaccaggaacaccaccaatagccggtaggtctaccacccctacctctagtccgtttcgagccacctccacaagtcccaacagtcaatcttctaagatgaacagtatcgtgtaccaaaagcagttccagtctgccccagcaaccgttcgcatgactcaaccgttccctacgcagtttgcccctcagattctgagccagccaaacctcgtgcctccgctagtcagggctccacacacaaacacgttcccagcccctgtgcaacggccccctatggccctggcatcgcagatgccacccccccttacaaccggactgatgtcgcatgctcgactcccacatgtagctcggggaccatgtgggagcctcagcggcgtcagaggcaatcaagcccaggcggctctcaaagctgagcaggatatgaaagctaaacagcgcgccgaagtgcttcagtcaacccagaggttcttcagtgagcagcaacagagtaagcagataggtgggggtaaggcccaaaaagtggactccgacagttcgaagccacccgagaccctcaccgatccccctggggtctgtcaggagaaggtggaagagaaacccccacctgcaccttcaatagccaccaagcccgtacgcacgggtccaatcaaaccccaagcgataaaaaccgaagaaaccaagtcctag

SEQ ID NO: 184940 - DNA, 8259 bp, Artificial Sequence
  derived and/or modified sequence
atgagcgagaagagcggccagagcaccaaggccaaggacggcaagaaatatgctactctgagcctttttaacacctataaaggtaaatcattggagacccaaaagaccactgccaggcacggactgcagagcctggggaaggtgggcattagtagacggatgcctcccccagccaatctaccttcactgaaggccgagaataaaggtaacgaccctaacgtaaacatagtgcctaaagacggcacagggtgggcaagcaagcaggaacagcatgaagaagagaagacacccgaggtgccccctgcccaacctaaacccggagtggccgccccacctgaggtggcacccgctccgaaatcttgggcctcaaataaacagggcggtcagggggacggcattcaagtcaacagccagtttcaacaagaattccctagtctccaagccgcgggggaccaggaaaaaaaggaaaaagagactaatgacgacaattacggcccaggcccttccctgaggccccctaatgtagcatgttggcgggacggaggaaaagccgctggatccccctccagctccgaccaagacgagaagctgcccggtcaagatgagagcacagctggaacctccgagcagaatgacattctgaaggtcgtggagaaaaggatcgcctgcgggccgccacaagccaaacttaacggtcagcaggcggctttagcctcacagtacagggcaatgatgcctccatacatgttccagcagtaccctaggatgacctatcctcccctacacggccccatgcgctttccacctagcctctctgagacgaataagggtttgaggggccgtgggccaccccccagctgggcaagtgagcccgagcgcccgtccattctgtctgcctccgagcttaaagagctggataaatttgataaccttgatgcggaagctgatgagggctgggctggagctcagatggaagttgattatacagagcaactgaatttttcagatgacgatgagcaaggcagcaactctcctaaagagaacaatagtgaggatcaaggcagcaaggcttccgagaataacgagaataaaaaagagaccgacgaggttagtaacacaaagtctagcagtcagattcccgctcaacccagcgttgctaaagtgccttatggaaagggcccatcttttaatcaggaacgcgggaccagcagtcacctaccgccgccaccaaaactgttggcccagcagcatccaccccccgaccgccaggcggtgcccggccgccctgggccatttccctcgaagcagcaggtcgccgatgaggatgagatttggaaacaacgacgcaggcagcaatccgaaatcagcgccgccgtggagcgtgcgaggaaacgcagggaagaggaggaacgccgcatggaagagcaaaggaaggcggcctgtgccgagaagttgaagcggctggatgaaaagctaggcattttagagaaacaaccttctcctgaggaaatccgtgaaagggagcgcgaaaaggaaagagagcgcgagaaagagctggagaaggagcaagagcaggagcgtgaaaaggaacgcgagaaggatcgcgagaggcagcaagagaaggagaaggagctcgagaaagagcaggagaaacagcgagagatggaaaaggagagaaagcaggagaaagagaaagagctagagaggcaaaaagagaaggagaaagaactacagaagatgaaagaacaggaaaaagaatgcgagctagaaaaggaaagggaaaagctggaggagaagatagagcctcgcgaacccaatctggaaccaatggtggagaagcaagaaagcgagaactcctgtaacaaggaagaagaaccggtattcactcgccaagattccaatagaagcgaaaaagaagccactcctgtcgtgcacgagacggagcctgagtccggctctcagcctcgtcccgctgttctgtccgggtatttcaagcagtttcagaagtctctgccgccacgcttccaaagacagcaagagcagatgaagcagcagcagtggcagcagcagcagcaacagggggttctcccgcagactgtcccctcacagccttcatcatctaccgtgccacccccccctcacagaccgctttatcagccaatgcagcctcaccctcaacatttggcttcaatgggattcgacccacgctggctcatgatgcagtcctacatggacccacgaatgatgagcggaagaccggctatggacattccccccatacaccccgggatgattccccccaagcctctaatgagaagagaccagatggagggcagcccgaactccagcgaatcattcgaacacatcgccagatcagcccgcgaccacgcaattagtctgagcgaaccgcggatgctgtggggttccgatccatatccccacgccgagcctcagcaagctactacaccaaaggctacggaagagcccgaagacgtgagaagtgaggctgctctcgaccaagaacagataacagccgcctattccgtagaacacaatcagctggaagcccatcccaaagccgattttataagagagtcctccgaggcacaggtacagaagtttctctctcgcagcgtcgaggacgtccggcctcaccacactgacgccaacaaccagtccgcatgcttcgaagcaccagatcagaaaacgctgtccgctccccaagaagagcgaatcagcgccgtggagtcccagccctctcgcaaaagaagcgtgagccacggaagtaatcacacccagaagcccgacgagcagaggagcgagccatccgctggtataccgaaggtgacctctcgctgcatcgatagtaaagagcccatcgaaagacccgaggagaagccaaagaaggagggcttcatccgcagttcagagggccctaaacctgaaaaagtgtacaagtctaagtctgagacccggtggggtcctaggccaagcagtaaccgacgcgaggaggtgaacgatcgtcctgtgcggagatccgggcctattaagaaaccagtgcttagagacatgaaggaagagcgcgagcagagaaaagagaaggagggggaaaaagctgaaaaagttactgagaaagtcgtggttaagccagagaaaaccgagaagaaagatctgcctccacccccacctcccccacaacccccagcccctatccagccacagtctgttccaccaccaatccagccagaggcggagaagttccccagcacagagactgccaccttggcccagaaaccttcacaggataccgaaaagccgctagaacccgtaagtaccgtccaggttgagccggccgttaaaaccgtaaaccagcagacaatggctgcccccgtcgtcaaagaagaaaagcagcctgagaaggtgatctccaaggacttagtgatcgaacgacctagaccggactcccgccctgctgtgaaaaaagagtcaactctgccgcctcggacttactggaaagaggcacgggaaagggactggttcccagatcaaggctaccgtggacgcggaaggggcgagtattactcgcgaggcagaagctataggggaagctatggcggccggggacgcggaggacgggggcatacacgcgattatccccagtacagggataacaagccccgagccgagcacatccccagcggtcctctgcgccaacgagaagagtcagagacgcggagcgagtcatctgattttgaggttgtgcccaagcgaaggcgccagcgggggagtgagacagatacggacagcgagattcatgagtctgccagcgataaggacagtctgtccaagggcaaattgccaaaacgggaggagagaccggaaaacaaaaagccagtaaagccccattcaagctttaagcccgataaccacgtacgaatcgacaatcgactgctagagaagccctacgttcgggatgatgataaggccaagcctggatttctgccaaagggggaaccaactcggagaggaaggggaggtacctttcgcagagggggccgggacccagggggaagacctagcaggccctcaacactccgtaggccggcgtatcgggataatcagtggaacccacgccagtctgaggtccccaagcctgaggacggcgaaccgcccagaagacacgagcaatttatacccatagccgccgacaagaggccaccgaagtttgagagaaaattcgaccccgcacgggagagacctcgacgccagaggcctacacgcccccccaggcaagataaaccaccccgatttcggcgccttagagaacgtgaggcagcctctaagtccaatgaggttgtagccgtaccgactaatggcacagtaaacaatgtggcgcaggagcctgtgaacacattaggagatatcagtggcaacaagaccccagatctcagcaaccagaattccagcgaccaggctaacgaggagtgggagaccgccagcgagagctcggatttcaacgagaggcgcgaacgagacgagaagaagaatgctgaccttaacgctcagacagtggtgaaggttggcgagaatgtgcttcccccaaagcgcgagattgccaagcgcagctttagttcccagcgaccagttgacaggcaaaacaggagagggaacaatgggcctccaaagtctgggagaaacttctctggaccccggaacgagaggaggtccgggcctccgagtaagtccggaaagaggggtccttttgacgatcagcccgccggaaccacaggtgtggacttgataaacggtagttcggctcatcaccaggagggcgttccaaatgggaccggccagaagaacagtaaagattccacaggaaagaaaagggaggatcctaagccagggccaaagaagccaaaggagaaggtagacgccttgtcacagtttgacctgaacaactatgcatctgtagtcattattgatgaccacccagaagttacagtgatcgaagatcctcagagcaatttaaatgatgatggcttcacagaagtggtctcaaagaagcagcaaaagaggctgcaggatgaggaacggcgcaagaaagaggagcaggtcatccaggtttggaacaagaaaaacgccaatgagaagggaaggagccaaacatctaaactgcccccccggttcgcaaagaagcaggcgacaggaatccaacaggcacagtcctccgcctcagtgccacctctggcctcagctcccctcccaccgtcaactagtgcatccgtgcccgcatcgacttccgccccactgcccgctactttaacccctgtcccggcatcaacgtctgcccctgtgccagcttcaacacttgcgcctgtgctggccagcactagtgctcctgttccagcctcccccctggctcccgtgagcgctagtgccagcgtgtccgcgagtgttccagcttccacttccgctgcagctattacttcttcctcggctccagcctcagcccccgcaccaaccccaatcctcgcaagcgtgtccaccccagctagcgtgaccattctggcctcagcctcaatcccgatccttgcatccgctctagcaagtacttcagctcccaccccggcaccggcggcctctagcccagctgcgccagtgatcacagcgccaacgattccagcatccgcacctaccgccagtgtgcccctggcacccgcctctgccagcgcgcccgcgccagcccccacacctgtcagtgcccctaatccggctccgccagccccagcccagacccaggcgcaaacccataagcctgtccagaatccactccagaccaccagccaatcttcgaagcagcctcccccatcgatcagactgccaagcgcccagacacctaatggcacagactatgtggcatcaggaaaatctattcagaccccacagtcacacggcactctcacagccgagctctgggataataaggtggcccccccagctgtgctgaatgatatcagcaagaagttggggccaatctcacccccccagccacctagtgtgtccgcgtggaataaaccactcactagctttggaagcgcaccaagcagtgagggtgcgaagaacggacaggaaagcggcctggagatagggacagatacgattcaatttggcgccccagcatctaacgggaacgagaatgaagtggttccggtcctgtcagaaaaaagcgctgacaaaatacctgagcccaaggaacagaggcaaaagcagcctcgcgctggtccaattaaggcccagaagctgccagacttgtcccctgtcgagaacaaggagcataagcccgggcccatcgggaaagaaaggtctctcaaaaatcggaaggtaaaggacgcacaacaggtggaacctgagggtcaggaaaagccctctcctgcgactgtgcgctctaccgatcccgtgactacaaaagaaaccaaagcagtctccgaaatgagcactgagattggaactatgatcagcgtgtcctctgctgaatacggaactaatgctaagatggagagcgccagaaaggcctgggaaaacagccctaatgttcgagagaagggtagccccgtcacaagtacagcacctcccattgcaaccggcgtgagctcttctgcatcgggtcctagcactgctaactacaacagtttctcttccgccagcatgccccagattcccgtcgcctccgtgacacccacggcttcactgagcggcgccggcacgtataccacaagttctctgagtacgaaaagcacaacaacatccgatcctcctaacatctgcaaggtgaagcctcagcagttgcagacatcttctctgccgagtgcctcccacttttcacagttatcatgcatgccctcgttaatcgctcagcagcagcagaacccacaagtctatgtcagccaatccgctgctgcccagataccagcattctatatggacacatcccatctcttcaacacacagcatgctcgactggcccctcccagcttggcacagcagcagggatttcagccaggtctgtcccagcccacctcagtgcagcagatccccatcccgatctatgctcccctgcaagggcaacatcaggcccagttgagtctgggggccggcccagctgtgtcacaggctcaggaactattcagtagctcactgcagccttacaggtcacaacctgcattcatgcaatctagtttgtctcaaccgtccgtggtcctatccggaacagctatacacaacttccctactgttcaacatcaggaactggccaaggcccaatccgggctggcatttcagcagacgagcaatacccagccgatccctattctgtatgagcaccagttgggtcaggccagcgggctcgggggttcacaacttattgacactcacttactgcaggcccgagcaaatcttactcaagcctccaatttgtattccggccaggtgcagcagcctggacagactaacttttacaatacagcgcagtcgcctagcgccctgcagcaagtgacggtgcctctccctgcaagtcaactgtccctgcccaacttcggaagtacgggccagcccctcattgcgctcccgcaaactttacaacctccgctgcagcacactacaccccaggcccaggcccaaagcctgagcagacctgcccaggtgtcgcagccttttcgcggactgattccagccggaacccaacatagtatgatcgccaccaccgggaagatgagtgaaatggagctaaaggcctttgggtctggtatcgacatcaagccgggcaccccaccgatcgccggacgatccacaacaccaacatcctccccattcagggctacatcaaccagtccaaattctcagagcagtaagatgaacagcatcgtctaccagaagcagttccaatccgctcccgccacggtgagaatgacacaaccctttccgacacaatttgctccgcaggctaagcagcgagctgaggtactgcaatcgacccaacgatttttctctgagcagcaacagtccaagcagattgggggtggtaaagcccaaaaagtggattctgattcatccaagccacccgagactttaactgacccacctggggtgtgccaagaaaaggttgaagaaaaaccccccccggcgccttccattgcaaccaagcctgtgaggacaggacctatcaagcctcaggcaattaagaccgaagagaccaagagctag

SEQ ID NO: 184941 - DNA, 8553 bp, Artificial Sequence
  derived and/or modified sequence
atgagcgagaagagcggccagagcaccaaggccaaggacggcaagaaatatgctacgctgtccctcttcaatacctataaagggaagagcctggagacccagaagaccactgcccgccatggcctacagtctctgggcaaggttgggatctcccgtcggatgcctccacctgccaatcttcctagccttaaagcagagaataaagggaatgatcctaacgtgaacatagtaccaaaagacggtacgggctgggcctctaaacaggagcagcacgaggaggagaagacacccgaggtgcccccagcccagcccaaaccaggagtggctgcgcccccggaagtcgcccctgccccaaagtcttgggcaagtaacaagcagggagggcagggggacgggattcaggtaaacagccaatttcagcaggaattcccttcccttcaagccgccggcgaccaggagaagaaagaaaaagagacgaacgacgataattatggtccgggtccttctctgcgcccccccaacgtggcatgttggagggacgggggtaaagctgcaggttcaccttcatcgagcgaccaggacgaaaaactacctggacaggacgagtccacagctggaacaagcgaacagaacgatatcttgaaagtcgtggaaaagaggattgcctgtggcccaccacaagccaagcttaatggtcagcaggccgcactcgcttcccagtaccgcgcaatgatgcctccatatatgtttcagcaatacccacgcatgacttatccccccctgcatgggccaatgagattccctcccagtctgtcagagaccaataagggtctcagaggcaggggacctccccctagctgggcatccgagcccgaacggccctctatcctctcggctagtgaacttaaggagcttgataagttcgataacctggacgccgaagctgacgaggggtgggctggtgcccagatggaggttgactacactgagcagctcaactttagcgacgacgacgaacaggggagcaattcccctaaagaaaataactccgaggaccaggggtccaaagctagtgaaaacaatgagaataagaaagaaaccgacgaagtctccaacacgaagtcctcatcccagataccggcacagccctccgtcgctaaggtcccctatgggaaggggccatcttttaaccaggagcgtggtacttcgagtcacctgcctccccccccaaaactgttggctcagcagcatcccccgccggaccgacaggccgtgccagggcgacccggacccttccccagcaaacagcaggtcgcagatgaggatgaaatatggaaacagagacgccggcagcagtctgagattagcgcagccgttgagagggctaggaaacgacgggaggaagaagaaaggagaatggaagaacagcggaaagccgcctgcgcagagaaactgaagagactggatgagaaactgggcatcctggaaaagcaaccgagcccagaagagatccgggaacgagagcgggagaaggaacgtgagagggagaaagagctggagaaagagcaggaacaagagcgagagaaagaacgtgagaaggaccgggaaagacaacaggaaaaagaaaaagaactggaaaaagaacaggagaagcagagagagatggagaaggagcggaagcaggagaaggagaaggagctggagaggcagaaggaaaaagagaaggaactccaaaaaatgaaggaacaagaaaaggagtgcgaacttgagaaagaacgcgagaagttggaggaaaaaatcgagccccgcgaaccaaacttggaacctatggtggagaaacaggaaagcgaaaacagctgtaacaaggctgaagaggaaccggtcttcactcgtcaagactcaaacagaagcgagaaagaagccacaccagttgtgcacgagaccgaacctgagtcagggtcacagccaaggcctgccgtgctgtctgggtactttaagcagtttcaaaagagtttgcctccccgcttccagaggcaacaagagcaaatgaagcagcaacagtggcagcaacagcagcagcagggagtgctgccccaaactgtgccaagtcagccgtcatcctcaacagtgcctcctcctccacatcgaccactttaccagccaatgcagccccacccgcagcatctggcatcgatgggattcgaccccagatggttgatgatgcaatcctacatggacccccggatgatgagtgggagacccgcaatggatataccacccatccatcccggcatgatccccccaaaacccttgatgagacgggaccaaatggaaggttcccccaatagtagcgagtctttcgagcatattgctcggtcagctcgtgaccacgcaataagcctgtccgagccccgtatgttatggggcagcgacccatatccccatgcagaaccacagcaagccaccacccctaaagctacagaggagccagaggacgtgcggtcagaggccgcattggaccaggaacagataactgcggcttatagcgtcgagcacaaccaactggaagcccaccccaaggccgattttattcgggagtccagcgaagctcaggtgcagaaattccttagtaggagcgtcgaggatgtgcgcccccaccacacggacgctaacaatcagtccgcctgtttcgaagccccagatcagaaaacactgagcgcacctcaggaggagaggatctccgctgtggagagccagccatccagaaagcggagcgtgtctcatggttcgaaccatactcagaagccagatgagcaacgaagtgagccatccgcaggcattccaaaagttacaagtagatgcattgactccaaggaacctattgagcgtccggaagaaaagccaaagaaggaaggattcatacggagcagtgagggtcccaaacctgagaaggtgtataagtcaaaatctgaaacacgatggggcccccggccttcctccaatcggcgtgaggaggttaacgacagaccagttagacgctcggggcccatcaaaaagcctgtgctgcgcgatatgaaagaagagcgagaacagcggaaggaaaaggaaggtgaaaaggcggagaaagtgacggaaaaggtggtggtgaagccagagaaaacagaaaaaaaggatctcccacctcctcccccaccacctcagccccctgcccctatccaaccccagagtgtgccaccgcccatacagccagaggctgagaaatttccctccaccgagaccgcgaccctggcccagaagccaagccaggatacggagaaaccgctggaacccgtcagcactgtccaagtagaacccgccgtcaagaccgttaaccagcaaactatggccgcaccagttgtcaaggaggagaagcagcctgagaaggtcattagcaaagacctggtgatcgaaagacctcgtccggacagccggcctgccgtgaagaaagagtctacactgcctccacggacatattggaaggaggcgcgtgagcgtgattggttcccagaccagggataccgaggaaggggcagaggtgagtattactcgagagggaggtcctatcgcggctcctacggaggcagggggcggggcggtagaggccatacccgggactaccctcaatacagagataataaaccccgagccgaacatattccaagtgggcccctgcgtcagcgagaagagtctgaaacaaggtcagaaagcagcgacttcgaagtggtccccaaacgccggaggcagcggggcagcgagaccgataccgacagtgaaatccatgaatcagccagtgataaggatagcctgtccaaaggcaaactacccaagcgggaagagagacccgagaataagaagccggtgaagccacattcaagctttaaacctgataatcatgttcgaattgacaacaggctcttagagaaaccttatgtgcgcgatgatgataaggcgaaacccggcttcttaccaaaaggggagcccacgaggcggggcagagggggaaccttcaggaggggtggtagggacccaggcggcagaccatcaaggccctcaactctgagaagacccgcttatcgtgacaaccagtggaatccaagacaatctgaggtacctaagccagaggatggggaacctccacgacgccacgaacagttcattcccatagcagccgacaagaggcccccgaagtttgaacgcaaatttgatcctgctcgggagagacctaggagacaaaggccaacgcggccaccccgccaggacaagccgcctcggtttcgaagacttcgagaaagagaggcggcctcaaagagcaacgaagtcgttgcagtacctaccaacggtacagtaaacaacgtagcccaggaacctgtcaacaccctaggggacatatccggtaacaaaacaccagatctaagtaaccaaaactcttcggaccaggcaaacgaagaatgggagacagcttccgagtcctctgatttcaacgaacggcgcgagcgcgatgagaaaaagaacgctgacttaaatgcacagactgtagtgaaggtcggggaaaacgttctgccacccaaaagagaaattgccaagcgcagcttttcctcccagcgtcccgtcgataggcagaacagaagagggaataatggaccaccgaagagtggtcggaactttagtgggccaaggaacgagaggcgcagcggaccacctagcaagagcggcaaacgtggaccattcgacgatcagccagctggcacaactggcgtggaccttataaatggctcctcggcccaccatcaggagggagtacctaacggaacaggtcagaagaatagcaaggatagtacaggaaaaaaacgagaagatcccaagcctggaccaaaaaagccaaaagaaaaagtcgatgccttgagtcagttcgacctaaataattacgcatcagtggtaatcatcgacgatcacccggaagtgactgtgattgaggatccgcaaagcaaccttaatgacgatggatttactgaagtggtgtctaagaagcagcagaaaaggctgcaagacgaggagcgaaggaagaaagaagaacaagttatccaggtttggaacaagaagaatgctaatgagaaagggaggagtcagacttccaaactgcctccacgcttcgccaaaaaacaggccaccgggatccaacaggctcaatcctctgccagcgtgccaccactggccagcgccccactacccccttcgacgctcgcacctgtcagtgcctctgctagcgtttccgcttccgtgcccgcaagtacctctgccgctgccataacaagcagcagcgcccctgccagtgcccccgcgccgacaccaatccttgccagcgtctctacccccgcctccgtcaccatcctggcaagcgcttctattcccatcttggccagcgccctggcttccacgagcgccccgactcctgcgcccgccgcatcctctcccgctgctcccgtcatcacagcccccacaattccagcttcagctcccacggccagcgtgccattggctccagcttcagccagtgccccagcgcccgctccaactccggtttcagctcccaatccggctccgccggccccagcccagacgcaggcccagacacataagcctgtccagaaccccctgcagacaacctcccagtccagcaaacaaccccctccatccatacgtctgccctctgctcagactcccaatggtacggactacgtggcctccggcaagagcatacagacacctcaatcccatggtacactgaccgccgaactgtgggacaataaggttgcaccaccagccgtgcttaacgatatttctaaaaagttgggccccatctccccaccacagccaccaagcgtgtcagcctggaacaagccactcacatcgtttgggtctgctccctctagcgaaggagccaagaatggccaagagagcggcctcgaaatcggcaccgatacaatccagtttggagctcccgcgagtaatggaaatgaaaacgaggtcgtgccagtgctgtccgagaaaagcgcagataagatccccgaacctaaagaacaaaggcagaagcaacctagggccggacctatcaaagcacagaaattgccagacctcagcccagtggagaataaagaacacaagccaggtcctattggaaaagagcgcagtttgaagaacagaaaagtaaaggacgcccagcaggtggaacccgaaggccaggagaagcccagccccgccacagtgcgatcaacagatcctgtcactacaaaggagaccaaggctgttagcgagatgagcaccgaaattggcactatgataagtgtgtcttctgcagaatacggcacaaatgcgaaggaaagtgtgacagattacacaaccccctcgagttccctgcctaacacagtggccacaaataataccaaaatggaagatacccttgtaaataacgtccctctgcctaacacgcttccactgccgaagagagagactattcagcaatctagctccttgaccagcgtacctcccactacctttagtcttactttcaagatggaatccgcaagaaaggcctgggagaatagcccaaacgtgcgggaaaagggaagtcccgtcactagtacagccccacccatcgccacgggggtgagttcatccgcatctgggccatccaccgctaactacaatagcttttcttccgcatccatgcctcagatccccgtcgctagtgtgactccgaccgcttctcttagcggtgccggcacttatacaacaagttctctgtctactaagagcaccaccactagcgatccccccaatatttgtaaagtgaaaccccagcaactgcagacatcatcactgccatcagcttctcatttttcgcaactctcctgtatgccgtccctgattgctcagcagcaacaaaacccccaagtttacgtgagccagtctgccgctgcacagatcccggctttctatatggacacaagccatctcttcaatacgcaacacgctcgcctggcaccccccagccttgcacaacagcagggcttccagcctggtttgagtcaaccaacctctgttcagcaaattcctattccaatctacgctcctctccaaggccaacaccaggctcagttgtctctcggcgctggacctgccgtgagccaggcacaggaattgttctccagttctctccagccgtaccgctctcagcccgccttcatgcagagcagtctgagccagccttctgttgtgctgagcgggaccgccatacacaatttcccaaccgtgcagcaccaagagttggccaaagcacagtccggactggcattccaacagaccagtaacacccaaccaatcccgattctctatgaacatcagctgggccaagccagtgggctgggaggctcgcagctgattgatacacatcttttgcaggcgcgtgccaacctcacacaggcaagcaacttgtacagcggccaggtacagcaacctggacagacaaatttctataatactgctcagtctccgtccgctttgcagcaggtgactgtgcctcttccagcatcccagctgtccctgcctaactttgggtccacagggcagccactgatcgccctccctcagaccctccagccaccactccaacacactaccccacaggcccaggcacaaagtctaagcagacctgctcaggttagccagccttttcgaggattgatccccgccgggacgcagcacagcatgatagctactactggtaagatgagcgagatggagctaaaggcgttcggttcggggattgacatcaagcccggaacccccccgattgccggcaggtcaacgacccccactagttctccgtttcgagcaacatccacttctccaaacagtcagagctccaagatgaacagcatcgtgtatcagaaacagttccagtctgctcccgccaccgttcgcatgactcagccgttccccacccagtttgctccccagattctgtcccagcccaatctagtccctccactggtgcgagctcctcacacaaatacctttcctgcccctgtgcaaaggccccctatggccctggcctcgcagatgcccccacctcttacaaccggcctcatgagccacgcaaggctcccccacgtggcccgcggcccttgcggcagtctctctggtgtgagaggaaaccaggctcaagctgccctgaaagctgaacaggatatgaaagccaagcagcgtgctgaggtactgcagtccacccagaggttttttagtgaacagcagcagtctaagcaaatcggaggtggcaaggcccagaaggtggactccgacagtagtaagccacctgagacgttgaccgacccacctggagtctgccaggagaaagtcgaagagaagcccccgcctgccccctccatcgctaccaaacctgtcagaacgggccctatcaaaccgcaggcaattaagaccgaggaaaccaagtcctag

SEQ ID NO: 184942 - DNA, 8453 bp, Artificial Sequence
  derived and/or modified sequence
atgagtgaaaagtctggacagtccaccaaagccaaggacggcaagaaatatgctacactaagcctattcaatacatacaaggggaaaagcctcgagacccagaagacaaccgctcgccatggtttgcagagcctcggcaaagtcgggatctcccgccgtatgcccccacccgctaacttaccctctttgaaggctgaaaacaagggaaatgaccctaacgtcaatattgtgcctaaagacggcacaggttgggcgagcaaacaggaacaacacgaggaggagaagacacctgaggtgccaccggctcagccaaagcccggtgtggcagcccctccggaagtagccccagcccctaagagctgggcttccaacaagcagggaggtcagggtgatggaattcaggtaaatagccagtttcagcaagagttcccatccctgcaggcggctggcgatcaggagaaaaaggagaaagagacaaacgatgataactacggaccaggaccttccctgaggcctcctaatgttgcatgttggagggatggcggaaaagcagcgggttctccctcctcaagtgatcaggatgaaaaacttcctggccaagatgagagtactgcgggaacatcggaacaaaacgacatactgaaagtggtggagaagagaattgcctgtggccctccacaggcaaaactaaatggacagcaggctgcacttgctagtcagtacagagccatgatgcccccttatatgttccagcagtacccacgcatgacatacccgcctctgcacgggccaatgcgttttcctccctctctgtctgagaccaacaaggggctgagaggcaggggccctccaccgtcttgggcctctgagcctgagagaccctcgattctgtcagcttcagaactcaaagaactcgataaatttgacaatttagacgccgaagcggatgagggctgggctggcgcacagatggaggtagactacactgagcagttgaacttctctgatgacgatgaacagggttcaaacagccccaaggagaataactcagaggaccagggtagcaaggcttctgaaaataacgagaacaagaaagagaccgatgaagtgagcaataccaaatcatctagccaaatcccagcacagcccagcgtcgctaaggtcccctatggaaagggcccttcgtttaaccaggagcgcggaacgtcatcccatttaccacctcctcctaaacttctggcacagcaacaccctccgccagacagacaagctgttcctggtagaccaggtccttttccttccaagcaacaagttgcagacgaagacgagatctggaagcagcgtcggcgacagcagagtgaaatatcggctgccgtggaaagggccaggaagcggagagaagaggaggagagacggatggaagagcagcggaaggcagcctgcgcagagaaactaaaaagactggacgagaagctaggcattttggagaagcagcctagccccgaagagatacgggagcgagagagggagaaggagcgtgagcgtgaaaaggaacttgagaaggagcaggagcaggagagggaaaaggagagagaaaaagacagagagcggcaacaggagaaagagaaggaattagagaaagaacaggaaaaacagcgggaaatggaaaaggagcgcaagcaggaaaaagaaaaagaactggagagacagaaggaaaaagaaaaggaattgcaaaaaatgaaggaacaggaaaaggagtgtgagttggaaaaggaaagagagaaattggaggagaagatcgaacctcgcgagcctaacctggaacctatggttgaaaagcaggagagcgaaaattcctgtaacaaggaagaagagccagtttttactagacaagactcaaaccggagtgaaaaggaagcaacacccgtcgtccacgagaccgaacctgagtctgggagtcagcccagacccgctgtgttgtccggatacttcaaacagttccagaagagcttgccaccgaggttccaacgtcagcaggaacagatgaaacagcagcaatggcagcaacagcagcagcagggcgttctaccccagacggttccttctcaaccaagctcttctaccgtcccccctcctccacataggcccttgtaccagccaatgcaacctcatccccaacatctcgcaagcatgggcttcgatccacgctggctgatgatgcagtcatatatggaccctagaatgatgtctgggagacccgcaatggacatccctcctattcatccagggatgatccctcctaaacctttaatgcgacgggatcaaatggaaggctcgcctaatagcagtgagtccttcgagcatatcgcccgaagcgcaagggaccacgctatttcactctcagaacccagaatgctgtggggttccgatccctatccacacgcggagccacaacaagcaactacacctaaggccacagaggagccagaagatgtacgcagcgaggctgccttggaccaggagcaaatcacggctgcctattcagtagaacataatcagctggaagcccaccccaaggcggacttcatcagggaatctagtgaagcacaggtgcagaaatttctatctagatccgtggaggacgtgagaccccaccacaccgatgccaacaatcagagcgcgtgcttcgaagctccagaccagaaaacactgtccgcaccgcaggaagagaggatatctgcagtggaaagtcaaccttcacggaagcgttccgtatctcacgggtcgaaccacacccaaaaacctgacgagcagagaagtgaacctagcgctggcatccccaaggtgactagtcgctgcatcgatagcaaggaacctattgaacgacccgaagagaagccaaaaaaggaggggttcatccgatcctccgaaggccctaaacctgaaaaggtgtataagtccaagtctgaaacccggtggggccctagacccagctctaaccgtcgggaagaagttaatgatcgaccagtgaggaggagcggcccaattaagaagcccgtgctgagggacatgaaagaagagcgagagcaacggaaggagaaagagggcgaaaaggccgaaaaggtaaccgaaaaggtggtcgttaaaccagagaagaccgaaaagaaagatctgccgccacctccccctcccccacagccccctgctcctatccagccacagtctgtgccgcctcccatacaaccagaagccgaaaaatttccctcaacagagaccgctacactggcccaaaaaccaagccaggacaccgaaaagccgctggaacccgtatccaccgtacaggtcgagcctgccgtgaagacagtgaatcagcagacaatggcagcgccagtagtgaaggaagaaaaacagcccgagaaggtcatctctaaggacctggtgattgaacggccacgccctgattcccggcctgccgtgaaaaaggaaagcacactcccccctaggacttactggaaagaagcacgtgagagagactggtttccagatcaaggttacagaggaagaggacggggagagtactactcccgaggaaggagctaccggggaagctatggcggaaggggtcggggagggcgtggccacactcgcgactatcctcaataccgtgacaataaacctcgagcagagcatattcctagtgggccactgaggcagagagaagagagcgaaaccaggtccgaatcgtccgactttgaagtggtccctaaaaggagacgtcaacgaggatctgaaacagatactgattcagaaatccacgagtctgcaagcgataaggattctctgagcaagggaaagctacctaaacgcgaggagcggcctgagaacaagaagcccgtcaaacctcactccagtttcaaacccgacaatcacgttagaatcgacaaccggctactggaaaaaccctacgtgcgtgacgacgacaaggctaagcctgggtttctgccaaagggcgaaccgaccagacgcggaagagggggtacctttcgccgtggaggcagggatcccggtgggaggccttcccgcccatcaactctgagacgcccagcctacagagataaccagtggaatcctaggcagtccgaggtccctaaaccagaagatggtgaaccaccccgaagacacgagcagtttatccctattgccgctgacaagaggcccccaaaattcgagcgcaagtttgaccccgctcgcgagagaccacgcagacagagacccaccagacctcctcggcaggataagcccccaaggttcagacggttgagggaacgcgaagcagcgtcaaaatccaatgaggtcgtggcggtgccaacgaatgggactgtgaacaacgtagcccaggagccagtgaacaccctgggggacatttcgggcaacaaaacacctgacctatcaaatcaaaacagtagtgaccaggccaatgaggagtgggaaacggcttcggaatcgagcgactttaacgagcggagagaaagggatgaaaaaaaaaacgccgacctcaatgctcaaaccgttgtgaaagttggagagaacgtgttgcctcctaagcgcgaaatcgcgaagcggtcatttagctcacagcgcccagtggataggcagaatcgacgcggtaacaacggtcctcctaaatccggacgcaatttttccgggccacgaaatgagaggcgcagtggtccaccatctaaatcgggtaaacgaggtcctttcgacgatcagccggcaggtacaaccggggtggacctgattaacggctcatcagcccaccatcaggaaggtgtgccaaacggtaccgggcagaaaaacagcaaagactccacgggcaaaaagcgagaggatccaaagccaggacccaagaaacccaaagagaaagttgacgcactgtcccagtttgatcttaacaactatgccagtgtcgtcattattgatgatcaccccgaggtcacagtaattgaagacccccaatctaatctgaatgacgatgggttcaccgaggtggtctccaagaagcaacagaagagactgcaagatgaggaaaggaggaaaaaagaagagcaggtgattcaggtttggaacaagaagaatgcaaatgagaaggggagatcgcagacgtccaagttgccgccacgcttcgcgaaaaaacaggctacaggcattcaacaagctcaaagctctgcgtcagtgccccctcttgcttctgcgccattgcctccatctacctccgcgagtgtgcccgcttccacctcggctcctctgccagctactcttactcctgtgcccgcttctacaagcgcccctgtgcccgcatctacactggctcccgtgttagctagcacaagtgcacccgtgccagcctctcctctcgccccagttagtgcttctgcatccgtgagcgcttctgtccctgcctcgacatccgctgccgcaatcactagctctagtgctcccgcaagcgcaccagctcccaccccaattctggcatccgtttcgactccagcatctgtcacaatcttggcctccgccagtatcccgatcctggcttccgccctcgcttccacatccgccccaacaccagccccagcagcgtctagccctgccgctccagttataaccgcacctaccatccctgcttcagcgccaacagcatctgtgcctctagcacccgcttctgcctctgctcccgcaccggcacctaccccagtctctgctccaaatccagctccacctgcaccagctcaaacccaagcgcaaacccataaaccagtgcagaaccccctgcaaaccaccagtcaatctagtaagcagcctccaccctctattcggttgccctccgcacagaccccaaacggaacggactacgtcgctagcggtaagagcatccagacaccccagtcccacggcaccctgacagctgagctctgggacaataaagtggctcctccagctgtgctgaatgacatctccaaaaagctgggaccaatttctccaccccagcctccaagtgtgtcagcgtggaacaagcccctgacttctttcgggtcagcccctagttccgaaggagccaagaatggacaggagagtggcctggagatcggcacagacactatacagttcggggcacctgctagtaacggcaacgaaaatgaagtggtgcctgtgctatctgagaagtctgcagacaagatccccgaacccaaggagcagcggcagaaacagcctcgggctggccctataaaggctcagaagctacctgacctctcacccgtcgagaataaggagcacaagccgggacccatcggaaaggagcgctctcttaagaacagaaaggtgaaggacgcccaacaggtggaaccagaaggccaagaaaagccctctccagcaaccgtcaggagtaccgatcctgtgaccacaaaggagactaaagcagtgagcgagatgtccaccgagatcggtaccatgatttctgtgagttctgccgagtacgggactaacgctaaggagtctgtgactgattataccaccccgtcgtcatctttacccaatacggtggctaccaacaacaccaagatggaagacaccttggtcaacaacgtccctctccccaatacccttcctttacccaaaagagagacaattcagcaaagctcttccctgacttctgtccccccaacgacgtttagtttgacctttaaaatggaatctgcaagaaaggcatgggagaattcgccaaatgtacgcgagaaggggtctccagtgacctcaacggctcctcccatcgccacaggagtgtcctctagcgccagcggacccagcaccgccaactataattctttcagctcagcgagtatgccccagatccccgtggcttcggttacaccaactgctagtctctcaggtgccggtacctatacaacatccagcctgtccacgaagtcaaccaccaccagtgatccccctaacatctgcaaggtaaagcctcagcagctccaaacatcctccctgccatcagcatcccacttttctcagctgagttgcatgccgtcgttaatagcccagcagcaacagaatccccaggtatatgttagtcagagcgctgcggctcagatcccagcattctacatggacacctcccacctctttaacacccagcacgccaggcttgccccaccgagccttgcccagcagcaaggcttccagcctggtctttcccagcctacctcagtgcagcaaattccaatacccatatatgcccctttacagggccagcatcaagcccaactctccctaggagcaggtccagctgtctcacaggctcaggagctctttagctcctccttgcagccttataggtctcaacccgcattcatgcaaagtagcctctcccagccttcagtggtcctgtccgggactgcaattcacaacttccccactgtacagcaccaagaactggcgaaggcgcaaagcgggctggccttccaacagacgtcaaacacacaaccaattcctattctttacgagcaccaactggggcaagcctctggactgggaggctcacagttgattgacactcatttacttcaggccagagccaatttaacacaggcatccaatctgtattcggggcaagtgcagcaaccaggccagacaaacttctataataccgcccagagtccttctgctctgcaacaggtcaccgtccctctgccagcttctcagctgagcctaccgaatttcggaagcactggccaacccctcatcgctttaccccagaccctgcagccccctctccagcataccacccctcaagctcaggcccagtccctcagccggccagcacaggtcagccagccttttcgcggactcatccctgcgggaacccagcactccatgatcgccaccaccggaaaaatgagcgaaatggagctgaaggctttcggcagtggtatagacataaaacctggtacgcctcccattgctggacgatctactaccccaacttcctccccctttcgggcaaccagcacaagtcccaattcacagtctagtaagatgaattctatcgtatatcagaaacagttccagtctgctccagccactgtcaggatgacacagccttttccaactcaattcgcaccccaggctaagcaacgagccgaggtcctgcagtcaacccagagattcttctcagaacagcaacagagcaagcaaattggcggaggaaaagcccagaaggtcgacagtgactcctccaaacctccggagaccctcaccgatccccctggggtgtgccaggagaaggtggaagagaagccacccccagcaccatcaattgctacaaagcctgtgcgcaccggtcctatcaagcctcaggctatcaaaaccgaggagacaaagtctta

SEQ ID NO: 184943 - DNA, 8696 bp, Artificial Sequence
  derived and/or modified sequence
atgtccgagaagtccggccagtctaccaaggctaaggacggcaaaaagtatgccaccctgtcgctgttcaacacttacaaaggcaagagcctggagacacaaaagacgacagttgcggctcggcatggcctgcagagcttgggtaaggtggggattagtcgacgcatgccacccccagctaatttgccttccttaaaggccgagaacaaaggcaacgatcctaacgtgaatatcgttcctaaagacgggacgggctgggcctcaaaacaagaacagcacgaagaggaaaagactccagaggtgcctcctgcacaacctaagcccggagtggccgctcctcctgaagtggcccctgcgcctaagtcttgggcatcaaacaagcaggggggtcagggagacggaatccaggtgaacagccagttccagcaggagtttcccagcctgcaggctgccggagaccaggaaaagaaggaaaaggagactaatgacgacaactatggccctggaccatccctgagacctcccaacgtggcgtgttggagagacgggggtaaggctgccggttcaccgagctcttcagaccaggatgaaaagctccctggccaggacgagtcgacggccggtacctctgaacagaacgacatcctcaaggtagtggaaaaaagaatcgcttgcggtccccctcaggccaaattgaacggccaacaggcagctctagcctctcagtaccgtgcaatgatgcctccctatatgttccagcagtatcctcgtatgacctacccccctctccatggaccgatgaggtttcctccttcactgtccgagacaaataagggcctccggggtaggggacctccccctagctgggcttctgagcctgagcgccctagtattttaagcgcttcagagctgaaggagctcgataaattcgacaacctggacgcagaggcagacgagggctgggcaggagctcagatggaagtggattatactgagcaacttaatttttcggatgatgatgaacaaggctctaattcccccaaagagaacaacagcgaggaccaggggtccaaagccagtgaaaataacgaaaacaaaaaggaaaccgacgaggttagtaacaccaagtcgtctagccagatccccgctcaaccaagtgttgctaaggtgccctacggcaagggacctagctttaatcaggaacgcggtactagctcccacctgcccccacctcctaagttgcttgcacagcagcaccccccacctgaccgtcaagctgttcctgggcgtccgggtcccttcccttcgaagcagcaggtagctgacgaggacgagatctggaaacagaggcgcaggcagcagtccgaaatctctgccgcagtggaacgagcgaggaaaaggcgcgaggaggaagagcgtcgaatggaggagcagcgcaaagcggcatgcgccgagaaattgaaacggttggatgagaagctcggcatcctggaaaaacagcctagccccgaggagatacgagagagggaaagggagaaggagcgagagcgggagaaggagctggaaaaggaacaggagcaggagcgagaaaaagaacgcgagaaggatcgcgagagacaacaggagaaggaaaaggagttggaaaaagagcaggagaagcaacgggagatggaaaaggaaaggaaacaggaaaaggagaaagagctggagcgacagaaagaaaaggagaaggagttacagaagatgaaggaacaagagaaggagtgtgagctcgagaaagagagggaaaagctcgaggagaaaattgaaccaagagagcccaatctggaaccaatggtcgagaagcaggagtccgaaaattcttgcaataaagaggaggagccagtgttcacccgccaggattccaatcgctcggaaaaagaggccacccctgtggttcatgagacagagcccgagagcggcagccaaccacgccctgcggtcctgtcagggtattttaaacagttccagaaaagcctgccaccgaggtttcagagacagcaggagcagatgaaacaacagcagtggcagcagcagcagcagcagggagtcctccctcaaactgtaccatctcagccaagctcttcaacagtgccacccccacctcacagacctctttatcagccgatgcagcctcaccctcaacacctagcctccatgggcttcgatcccaggtggcttatgatgcagtcatacatggaccccagaatgatgtcaggccgtccagctatggatatcccccctatccaccctggcatgattcctccgaagccccttatgagacgcgatcagatggaaggctctcctaatagctctgagagcttcgaacacatagctcggagcgccagagatcacgccatttcactgagcgagccacggatgctttggggcagcgatccgtatccacacgcagagcctcaacaggccactacccctaaagctactgaagaacccgaagatgtacggtcagaagccgcactggaccaagaacagattacagcagcttactccgtcgaacacaaccaactggaggcccatccaaaggctgatttcattagagaatcatcagaagctcaggttcagaaatttctcagccgaagcgttgaagacgtcagaccgcatcacacagatgctaacaatcaaagtgcctgtttcgaggcccctgatcagaagaccttaagcgccccacaggaagagcgaatctccgcggtggagagccagccctctagaaagcgcagtgtatctcacggcagcaatcacacacagaagcccgatgagcaacggagcgagccctcggccggaatccccaaagtgacgagtcgttgcatcgactcaaaggagcccatcgaaaggccagaggagaagcccaagaaggagggcttcattcgatcgtcggagggccctaagccagaaaaggtgtacaaatccaaatcagagacccggtggggaccacggccttctagtaatcgaagggaagaggtgaacgatcgcccagtgcgcaggtccggacctatcaagaaacccgttctccgcgatatgaaggaagaacgtgagcaacgcaaggagaaggagggcgagaaggcggagaaggtcaccgagaaggtggtagtgaagcccgagaagacagagaagaaagatcttcccccaccgcctcctccaccgcagcctcctgccccaattcaaccccagtctgtcccccctccgattcagcccgaggcagagaagtttccctctacagaaactgcaacactggcccagaagccctcgcaggacacagagaagcccctggagccagtttctaccgtgcaggtggagcccgcagtaaagacagtcaatcagcagacaatggccgctccagtggtaaaggaagaaaagcagcctgaaaaggttatctcaaaggatttggtcattgaacggcctcgccctgactcccgacctgcggtgaagaaggagagcactctgccaccaagaacctattggaaggaggctcgcgagcgggattggtttcccgatcaaggatacagagggaggggacggggagaatactatagtaggggcagatcctatcggggaagctacggaggcagagggcgtggaggcagagggcatacacgagactacccacagtacagagataataaaccacgagcagaacacatccccagtggaccactacggcagcgggaggagagtgagacccgttcagaaagttctgattttgaggtggtgcccaaaaggcggagacagcggggtagcgagaccgacactgactccgagatccacgagtccgcaagtgacaaagattccttgagtaaaggcaagttacccaagcgcgaagagagaccagaaaataaaaagccagtgaagccacattcctcatttaagccagataaccatgtgcgaatcgacaaccgtttgctcgagaagccttatgtgagagacgacgataaggctaaaccagggtttctgcctaaaggggaacccacgaggagaggcagaggtggtacctttcggcgaggaggacgggatccaggcggaagaccctctaggccctcaactctgaggcggccagcatatagggataaccagtggaaccctcgacagagtgaggtaccgaaacctgaggatggtgagcctccgaggcgtcatgagcaatttattcctattgcggctgataaacgccctcctaaatttgagcgtaagtttgacccagccagagagcgaccacgacgtcagagacccacgcgtcccccaagacaggataaacccccaaggttccggaggctgagggaaagggaggccgctagcaagtccaacgaggtggtggcagttcccactaacggcacggtaaataacgtcgcccaagaacctgtcaatacacttggtgatatctctggaaataagacaccagacctgagcaaccagaactcctccgaccaggccaacgaagaatgggaaacggcctctgaaagtagcgatttcaacgaacgccgagaacgcgacgagaagaaaaatgctgaccttaacgcccagactgtggtgaaagtgggtgaaaatgttctgcctccaaaaagagagattgcgaagcgctccttctctagtcagcgtcctgtcgacagacagaataggcggggtaacaacgggcctcctaagtccggaagaaacttctctggaccgaggaacgaacggagaagtggaccccctagtaaaagcgggaagagaggtccgttcgacgatcagccagcaggcacaactggagtagatctgatcaacggctcttcagcccatcaccaggagggcgtccctaatggaacagggcagaagaattctaaggacagtaccggcaagaagcgcgaagatccaaagcctggtcccaagaagcccaaggagaaagttgatgcactgagtcagtttgatctgaataattatgcttccgtggtaataatcgatgaccatcccgaggtgacggtgatcgaagacccccaatctaacctgaatgatgatggctttactgaggtggtttccaagaagcagcagaagagactgcaggacgaggagcggcgtaaaaaagaggagcaggtaatacaggtctggaataagaaaaatgccaacgagaagggtcgatcccagacctcaaagctccctcccaggtttgccaagaaacaggccactggcatccagcaggcgcagtcatctgcctcagtaccacctctggcctccgcacctttaccaccatcaacttctgcgtcggtgccggcaagcacaagcgcgcctctgccagcgacactgaccccagtgcctgcctccacctccgcccctgtgcctgcctcaaccctggcacccgttctcgcttctacctccgctcctgtgcccgctagccctctcgcccctgtttctgcgtcagcatcagtttctgcatccgttccagcctcaacttcagctgctgccatcacatcctcgtccgcacccgctagtgctcctgcgccaacacccatccttgcctccgtcagtacgccggcaagcgtgacgattctggcctcagcatcaattcccattctggcctcagctcttgcaagcacctctgcccctacccctgcccctgcagcttcttccccagctgcacccgtgatcacagcccctacaattcccgcaagtgctcccaccgcatccgtgcctctggctcctgcctccgcgagtgcccctgcccctgccccaacacctgttagcgctcctaatccagcccctcctgctcccgcacaaacacaggcccagacccacaaacctgttcagaacccactgcagaccacctctcaaagcagcaagcagccccctcctagtatccgccttccctcggctcagactccaaatggaaccgactatgtagcgtctggaaagtcaatacagacacctcagagccacggaaccctgaccgccgaactctgggacaacaaggtcgcccctcctgcagtgctgaacgacatctctaaaaagctcggccctattagcccaccacagcctcctagcgtaagcgcctggaacaaacctctcacctcgtttggctccgcccctagcagcgaaggagcgaaaaatggccaggagtctggtctggaaatcggcactgatactattcagtttggcgctccggcaagcaacggtaacgagaacgaagtggtcccagtgctctccgaaaagtcggcggataagattcccgaacctaaagaacagcggcagaagcaaccacgcgcaggcccaataaaggcccagaagctccctgaccttagccctgttgaaaacaaagagcacaaaccagggcctatcggcaaggaaagaagtttaaaaaatagaaaagtgaaagacgcccagcaggtcgagcccgagggccaggagaaaccaagccccgctaccgttcggtccaccgaccccgtgaccactaaagagaccaaagccgtgtctgagatgtccacagaaatagggaccatgatatcagtgagcagtgcagaatatgggaccaacgccaaggaatcagtgactgattacacaactccctctagcagcctgccgaataccgttgctactaacaataccaagatggaggacacactggtgaataacgtgcctttacccaatacacttccgcttcctaagagagagacgatacagcagtcttcctcacttacaagcgtacctcccactacattttctctcacgtttaagatggagagtgccaggaaggcttgggaaaatagccctaatgtccgcgaaaaaggtagcccggttacatctacagctcctccaattgccactggggtgtctagcagcgcaagtgggccttcaaccgcgaactataactccttctcgagcgcatccatgccccaaattccagttgcaagtgtgaccccgaccgcctctctgtccggggctggaacatatactacctctagtctatctactaaaagcacaaccacgagcgacccgccaaatatatgtaaggtcaaaccccaacagctccagacctcatcattgccctcagccagtcactttagccagctctcctgtatgccttctctgatcgcacagcaacagcagaacccgcaggtctatgtgagccaaagcgcagccgctcagatcccggctttctatatggacacctcccaccttttcaatacgcaacacgctaggttggcccctccctccctagcccaacaacagggctttcagcctggcctgagtcagcccacatctgttcagcagattccaatccccatctacgcacctctacaggggcaacaccaggctcagctttctcttggcgcaggacccgctgtctcacaggcccaggagctgttttcttcctctctgcagccttatcgaagtcagcccgctttcatgcagagctccttgagccagccgtctgtggtactttccgggaccgcgatccacaactttccgaccgtccaacaccaggagctggctaaagctcaatctggacttgcctttcagcagacttctaacacacaacccatcccaatcttgtacgaacaccaactgggccaggcctcaggactcgggggatcgcagttgatagatacccatctcctgcaggcacgggctaacctaactcaggcgagtaacttgtattctgggcaagtccaacagccgggacagaccaacttttacaatacagcccagagcccttccgcacttcagcaggtcaccgttccactccccgcttcacagctgagcctgccaaatttcggaagcactgggcagcctctgatagcgctgccgcagaccttgcagccccctctccagcacaccactccacaggcccaggcccagtcactgtccaggccagctcaggtcagtcagccattccgaggactgattccagcaggtacccaacattcaatgatcgcaactacggggaaaatgagtgaaatggagctgaaggcatttggttctggaatagacatcaagccaggcacgccgccaattgccggaagaagtaccacccctactagctctcctttccgcgctacatccacgtctcctaattctcagtcctcgaaaatgaattcgatagtatatcagaagcagtttcagtctgcacctgcaacagtacggatgacgcagcccttccctacccagtttgctcctcagatactgtcccagccaaacttagtccctccactagtccgagcaccccacaccaatacatttccagcccctgtgcagcgcccacctatggctctcgcaagtcagatgccaccacctctaacaacaggtttaatgtcacacgcacgcctccctcacgttgccagaggaccctgcggaagcctgtccggcgtgaggggaaaccaggctcaggccgctctgaaagccgagcaggatatgaaggccaaacagcgggcagaggttctacagtccacccaacgcttcttttctgaacaacagcaatcaaaacaaatcggcggtggaaaggcacagaaagtcgactctgatagtagcaagccgccagaaactttgaccgatcctccaggggtctgtcaggagaaagtagaggagaagcccccaccagcaccatccatcgccaccaagccagtgcgcactggaccaattaaaccccaggccataaaaaccgaggagaccaaatcata

SEQ ID NO: 184944 - DNA, 7962 bp, Artificial Sequence
  derived and/or modified sequence
gtccctaaccaaatgtttcagcagtatcctcggatgacttatcctccgttgcacggtcctatgcggtttcctcctagtctttccgaaacaaacaaggggttgaggggccgtggaccacctccctcatgggcgagcgaacctgagcggccttccatcctgtctgcaagtgagctaaaagagctcgataaattcgataatctggatgccgaggctgatgaggggtgggcgggagctcaaatggaagtcgattacaccgaacagctcaacttcagtgacgacgatgagcagggctccaattcacccaaagaaaacaacagcgaagaccagggcagcaaggcttccgaaaacaatgagaacaagaaggagactgacgaggtttccaatacgaagtcctctagccagataccagcgcagccttccgtcgctaaggtaccctacggaaaagggccttctttcaaccaggagagaggcacgtccagccacctccccccaccgcctaagcttctcgctcagcagcatccaccccctgataggcaggccgtgccgggacggccaggaccgttcccatcgaaacagcaagtcgctgatgaagatgaaatctggaagcagcgcagacgccagcaatcagaaatcagcgctgccgtggaacgggctcggaaacgacgcgaggaagaggagcgcagaatggaggagcagagaaaggcagcctgtgcagagaaactgaagagacttgacgagaaactcggtatcttggaaaagcagccatcccccgaggagatcagggagagggagcgagagaaagagcgggagcgtgaaaaggaactcgagaaggaacaggagcaagagcgtgagaaggagagggagaaggaccgtgaaagacaacaggaaaaggagaaagaactggagaaggaacaggagaaacaaagagaaatggagaaggagagaaaacaggaaaaggagaaggaactggaaagacagaaggagaaagaaaaagagctgcagaagatgaaggagcaggaaaaggaatgcgagctggagaaagaaagggagaaactagaagagaagatcgagcctcgggaacccaatcttgaaccgatggtggagaagcaagaatccgagaatagttgtaataaggcggaagaggagccagtgttcacccggcaggactcaaacaggagcgagaaggaggcgaccccggttgtccacgaaactgagcctgagagtggcagccaaccgagacccgcagtgttgagcggatacttcaaacagtttcagaaatcgctgccccctagatttcagcgacagcaggaacagatgaagcagcaacagtggcaacagcagcagcagcagggcgtgttgcctcagaccgtgccgagtcagccatcctcatctactgtgcccccaccccctcataggccactctatcagcctatgcaaccccaccctcagcatcttgcctcgatggggttcgatcctcgatggctgatgatgcagagctacatggatccaagaatgatgagcgggcgacccgcaatggatattcctcccatccacccaggaatgatccccccaaaaccactgatgaggcgtgatcagatggagggttcaccaaacagctcagagtctttcgagcacatcgcccgatcagcacgggatcacgcaatctcactgtctgagccaagaatgttgtggggttcagacccataccctcacgccgaaccccagcaggcgaccacacctaaggcaactgaggaacctgaagacgtgaggtctgaggccgctctggatcaggaacagatcacagcggcatacagcgtagagcacaaccagttggaggctcatcccaaagcggacttcattcgggagtcctccgaggcgcaggttcagaagttcctctcaagatcagtggaggatgtccggcctcaccacaccgatgcgaacaatcagagcgcttgttttgaggctccagaccagaaaacgctttccgctcctcaggaggaacgcatcagtgccgtggaatctcagccaagtagaaaaaggagcgtgagtcatggttccaatcacacacaaaaacctgacgagcagcgatccgagccttcagccggtattcctaaggtcacaagccggtgcatagactcaaaggagccaattgagaggcccgaagaaaagccgaagaaggaagggttcatacgctctagcgaaggtccaaagcccgagaaagtgtataaaagcaagagtgagacccgctggggcccacgtccatcttctaaccggagagaggaggtcaacgatcggcctgtcaggaggtccggccctattaaaaagcccgtgcttcgggacatgaaagaggagagggaacagcgcaaagagaaggagggcgaaaaggcggaaaaggtgactgagaaagttgttgtgaaacccgagaagaccgagaagaaggacctgccacccccacctcctccaccccagccaccggctcccatccagccccaatccgtgcccccaccaattcagccagaggcggagaagtttccctccaccgagactgcaaccctcgcccagaagccaagccaggacacagaaaaaccgcttgaaccagtgagtaccgtgcaggtggagccggcagtgaagaccgtgaatcagcagacaatggcagccccagtggtgaaagaagagaaacagcctgaaaaagtcatcagcaaagacctcgttatcgaaagaccaagacctgatagccggcctgccgtcaagaaagagagcaccctgcctccaagaacatactggaaagaagccagagagagggattggtttccggaccaggggtataggggtagagggaggggcgagtactactccagggggcgaagctatcgtgggtcctacggtggcagaggcagaggcggtaggggccataccagggactacccgcaatacagagataacaagcctcgtgctgagcatataccatcaggcccattgcgccagagggaagagtccgagacccggtctgagtcaagtgatttcgaagtggttcccaaaaggaggagacagcgaggatccgaaacggacactgatagcgagattcatgagtccgcatccgacaaggattccctgtctaagggaaagctgcctaagcgggaagaaagacctgaaaataagaagcctgttaaacctcatagctcattcaaacccgataaccatgttagaatcgataacagactgctggagaaaccatacgtgagggatgacgacaaggcaaagcctgggttcctgccaaaaggggaacccacacggcgtggccgtggcggaaccttccggagaggtgggagggatcctggtggccgtccttcccgcccttctacattgcgccgtcctgcctacagagacaatcagtggaacccaagacagtcagaggtgcctaaaccagaggacggcgaacctccaaggcgccacgaacagtttatccccatagccgcagacaagcgccctcctaaattcgaaagaaaatttgacccagcgagagagaggcctcgccgacagaggccaacgagaccccctagacaggataaacccccaagatttaggcggctgcgggaacgggaagccgcatcgaagagcaacgaggtggtggcagtgccaaccaatggtaccgttaacaacgtcgctcaagagccggtcaatacactcggcgatatatccggaaacaagacccctgatctgtccaaccagaattcgagcgaccaggctaacgaagaatgggagaccgcaagtgagtccagcgattttaacgagagaagggagcgagacgagaaaaaaaatgctgaccttaacgcacagaccgttgtaaaagttggggagaacgtgctgcctcctaaacgagagatcgcaaagcggtccttttccagccagcgtcctgtggacaggcaaaacagaagaggaaataacggtccaccaaaatctggacggaatttttcagggcctcggaacgagaggcggtccggtccccctagtaagtccggtaaaaggggccctttcgacgaccagcctgctggtaccaccggggtggatctcattaacgggagctcggcccaccaccaggagggcgttcctaatggaactggacaaaagaattccaaggattcaactgggaagaaaagagaggatcctaaacctggaccaaagaagcccaaagagaaggtggacgctcttagccagtttgacctgaataattatgcctcagttgtgatcattgacgatcatccagaggtgacagtgattgaggatcctcagagtaatctcaatgacgatggatttactgaggttgtctccaagaagcagcagaagcgccttcaagatgaggagaggagaaaaaaagaggaacaggtgattcaggtatggaacaaaaagaatgctaatgaaaagggcaggtcccagacctctaaacttccaccgaggttcgctaaaaaacaggcgacaggcatccaacaagcccagtcctcagcaagcgtgccccctttggcttcagcccctcttcctccctccaccagcgccagcgttcctgcctcaacttccgccccactgccggctaccctgactcccgtccccgcatcaacgagcgcccctgtaccagcctcaactctggccccagttctggcgagtacatccgctcccgtccccgcttctccactagcgcctgtgtcagccagcgccagcgtaagcgcgagcgtgccagccagcacttctgccgctgccattacttcctcctcagccccagcttctgcgccagcgcctacgcctatcctggctagcgtgtcgacccctgcatcagtgaccatactggcgtctgcatccatacctattttggcttctgcccttgcttctacgagcgctccaacaccagccccagctgcatcgagccccgcagcaccggtgatcacagctcctacgattcccgctagcgctcccacggcatcggtgcctcttgcaccagcgagtgcttccgcccctgcaccagcacccacgcccgtgagtgcacccaatccagcgccaccagcacccgctcagacacaagctcagacacacaaaccggttcaaaatccattgcagactacatcccagagtagcaagcaaccaccacccagtataaggctcccttctgcacaaacgcccaatgggaccgactatgtggctagcggaaagagcatccaaactcctcagtcccatggaaccctaaccgccgagctatgggacaacaaggtggctcccccagctgtgctcaacgatatcagcaagaagctagggcctatcagcccaccccagccgccttccgtctcagcatggaacaaacccctcacttcattcgggtcagccccatcaagcgagggagctaaaaacggccaggagagcggcctagaaataggcacagatacgattcagttcggggctcccgcatctaacggcaacgaaaacgaggtcgttccggtcctctcagaaaaatctgcggataagattcccgagcccaaagagcagcgccagaaacagcccagggcagggcctattaaagcacagaagctccccgacctctccccagtggaaaataaagagcataagcctggtcctatcggaaaagagcgttcactgaaaaatcgaaaggtcaaagacgcccagcaggttgagccggaaggacaggagaagccaagcccagccacagtccgaagcaccgacccggtgaccaccaaggaaactaaagctgtgtctgagatgagtacagagattgggactatgatatcagtgtcgtcagcggaatacggcacaaacgctaaggagtcagtgacagattatacaactcccagtagctcactccctaatactgtggccacaaacaataccaaaatggaagacacactcgtgaataacgtgccactgccaaacaccttgccattgcccaaacgcgagaccatacagcaatcctcctccctcactagtgttcctccaaccacattttctctgacatttaagatggagagtgctaggaaggcgtgggaaaatagtcccaacgtccgggagaagggctcaccggtgacctccactgctccaccaatcgctacaggcgtttcttcctcagccagcggaccatctactgctaactacaatagtttctcttcagcctccatgccccagatcccagtggctagtgtaacacctaccgcctccttgtcaggagccggaacttacacaacgtctagcttatctacaaagtctaccacaacctcagaccctccaaacatttgcaaagttaagccccagcaacttcagacgagttctcttcctagcgcatcccacttcagtcaactttcctgtatgccctcgctgattgcacagcaacagcaaaacccacaggtgtatgtttctcagtccgccgcagctcaaattccagctttttacatggatacttcacatttattcaatactcagcacgcaaggttggctcctccctctctggcccagcagcagggatttcagcctgggctaagtcagcccacctcagtgcagcagataccaatccctatctacgctcccctgcagggccaacaccaggcccagttgagcctgggcgcaggacccgctgtgtcacaagctcaggagcttttctcatcatccttgcagccctaccgaagccagcccgcattcatgcagagctcactgtcccagccttcagttgtcctctcggggaccgcaatccataactttcccactgtccagcaccaggagttagcgaaagctcagagtggactcgcttttcaacagactagcaatactcagccaataccaattctttacgagcaccagttggggcaagcgtctggcctcgggggatctcagctgatcgacacgcatctcctccaggcgagggccaatctgacgcaagccagcaatctttactccgggcaagtgcagcagcctggacagaccaacttctataatacagctcaaagcccctcggcccttcaacaggtaaccgttccacttccagccagtcagctcagcttgccgaacttcggctctactggtcaacccctgatagctctgccgcagaccctccagccaccactgcagcacacaactcctcaagcccaggctcagtcactgagcaggccagcccaagtctcgcagccgttcagggggctgatcccggcaggcactcaacatagtatgatcgcaaccactgggaagatgtcagagatggagcttaaagccttcggttcaggtatcgacattaaaccaggtacaccacccatcgctggcaggtccaccacgccaactagttcccctttcagggctacctccacatcccccaactcccagtcaagcaagatgaacagcatcgtctaccagaaacagttccaaagcgccccagccactgttcggatgacacaaccattccctacgcagtttgcaccgcagatcctttcgcagcccaatctggtgcccccactggttcgcgctcctcatacaaacactttcccggctccagtgcagcggcctcctatggccctggccagtcagatgccacctcctctcacaacaggcttgatgagtcacgcccgactgccacacgtggccagaggaccttgcggcagcctcagcggcgtgcgcggaaatcaagcccaggcagcccttaaagcagaacaggacatgaaggcgaaacagcgtgctgaggtgcttcagtccactcagaggtttttctccgagcagcagcagagcaagcaaatcggcggaggcaaggcacagaaggtggattccgattcgtctaagccaccagaaacccttaccgaccctcccggagtgtgccaggagaaggtcgaggaaaagcctccaccagctccctctatcgccaccaagcctgtgcggaccggacctatcaagccccaagcaatcaaaacagaggagactaagtcttaa

SEQ ID NO: 184945 - DNA, 8258 bp, Artificial Sequence
  derived and/or modified sequence
atgtccgaaaaaagtggccagtcgaccaaggctaaggacggtaaaaaatacgcaacactgagcctgtttaacacatacaagggaaagtctttagagacccaaaaaactactgcaaggcacggtctgcagtccctcggcaaggtcgggatcagcaggagaatgccccctccagctaacctgccctcactcaaagccgaaaacaagggaaatgaccctaatgtcaatattgtcccaaaggacggtactggatgggcctctaagcaggaacaacacgaagaggaaaagaccccggaagtcccaccagcacagccaaaacccggagtagcagcgccacccgaagttgcacccgctcctaaatcgtgggcgagtaacaagcagggaggacagggtgatggaatccaggtcaactcgcagttccagcaggaatttccatcactgcaagcagcgggtgatcaagagaagaaggagaaagaaaccaatgatgataattatggcccaggaccctccctgcggccaccaaacgtggcgtgctggcgagacggaggcaaggcagccggatccccaagttctagtgatcaggatgaaaagctaccaggacaggatgagagtaccgctggaacaagcgagcaaaacgacatcttgaaggtcgttgaaaagagaattgcctgcggccctccccaggccaagcttaatggtcagcaagctgctttggcctcccagtatcgggctatgatgcccccttacatgttccaacagtatcctaggatgacataccctcctttgcacggaccaatgaggttcccccctagcctttccgagactaacaaaggactgcgcggacgcggacccccaccttcctgggcatctgagccagagcggcctagcatattgagtgcatccgaactgaaggaattagataagtttgataaccttgatgccgaggccgacgaagggtgggctggggctcagatggaagtcgactatacagaacagcttaatttctccgacgatgacgagcagggcagcaactcacccaaagagaacaactcagaggatcagggttccaaagctagcgagaataacgagaacaagaaagagacagacgaggttagcaatactaaaagctcctcccagattccggcacagccgagcgtggcaaaggtgccgtatggaaaaggacctagcttcaaccaggaaagaggcacatcttctcacctgccacctccgccaaagctcctagcacagcaacatccgccacccgacaggcaggcagtccccggacggccaggtccctttccatctaagcagcaggtagcagatgaggatgagatctggaagcagcgcagacggcaacaatctgaaatctccgcggctgtcgagagggcaaggaagagacgcgaggaggaagagaggaggatggaggaacagagaaaggccgcatgtgccgaaaagctgaagagactggatgagaagctcggaatacttgaaaagcagccatcccctgaggaaatcagggaaagagaaagagaaaaagaacgggagagagaaaaggaattggaaaaggagcaggagcaggagcgggagaaggaaagagaaaaggacagagaaaggcagcaggagaaggaaaaggaactggaaaaagagcaggagaaacagcgggagatggagaaagaacgaaaacaggaaaaggaaaaggagctggaacgtcagaaagagaaagagaaagagctccagaagatgaaggagcaagagaaggagtgcgaactggagaaggaacgcgagaagctggaagagaaaatcgagccaagagaaccaaacctggagcccatggtggaaaaacaggaatctgagaacagctgtaacaaggaggaggaacccgtcttcaccagacaggatagcaatcggagcgagaaagaagccacccccgtggtacatgagactgaacctgagtcagggagccagcccagacctgccgtcctgagcggatatttcaagcagttccaaaaaagccttcctcccaggtttcaaaggcagcaggaacagatgaaacagcagcagtggcaacaacaacagcaacaaggcgttctcccccagacggtgcccagccagccatcctccagtacagtgccccctccaccacaccggcctctgtatcagccgatgcagcctcatccgcagcacctggcatcaatggggtttgacccaagatggttgatgatgcaatcatacatggacccccgaatgatgagcggcagacccgctatggacattccccctatccaccctgggatgatcccacctaagcccctgatgagacgggatcagatggagggaagcccgaattcttcggagagcttcgagcacatagctcgctcagctcgcgaccacgccatatcactgtccgagccaagaatgctgtgggggagcgatccgtatcctcacgccgaaccccaacaggcaactacgcctaaagccacagaagaacctgaggacgtcagatccgaggcagcgctggatcaggagcaaataactgcagcctactctgtagagcacaaccaacttgaggctcacccaaaggccgacttcatcagggaaagttccgaagcgcaggtccaaaaatttcttagtaggagtgttgaagacgttagaccacaccacacagacgctaacaaccagtccgcatgcttcgaagcgcctgaccaaaaaaccttatccgccccacaggaggaacgaatcagtgccgtcgagtctcagccctccagaaagcggtccgtgtcacatggctctaaccatacacagaaaccagatgagcaacggagtgagcccagcgccggtatcccaaaagtcacttccaggtgcatcgattcaaaagagccaatcgaacgtcctgaagaaaaacctaaaaaagaaggcttcattcgttcctcagagggcccaaaaccagagaaggtgtacaagtctaagtcagaaactcggtggggccctcggccttcatcaaaccgtcgcgaggaggttaacgaccgtccggtgaggagatcaggccctatcaaaaaacctgtgctgcgagatatgaaggaagaacgggagcagaggaaggaaaaggagggggaaaaggccgaaaaagtcaccgagaaggtggtggtaaaacctgaaaagacagagaaaaaagacctgccgcctcctcctcccccaccccagcctcccgcacctatacagcctcagtccgtcccacctcccattcagccagaggccgagaaattcccttcgacagagactgccaccttggcccagaagccatctcaggacactgaaaagccactggaacctgttagcaccgtccaggtcgagccagccgtgaaaactgtgaaccaacagacaatggccgctcctgtcgtgaaggaggaaaagcaaccggagaaggttatctccaaagatctggtaatagagagacccagacctgattctcgaccagcagtgaaaaaggaaagcacccttcctcctcgtacatactggaaggaagctagggagcgggactggttccccgaccaggggtacaggggcagagggcgtggtgagtactactcgcggggacgctcctatcgcggaagctatggcggacgcggtcgcggagggcgaggccacacccgcgattatccccaatatcgcgataacaagccacgggcagagcacattcctagtggacccctaaggcagagggaagagagcgaaacacgctctgaaagctcagatttcgaagtggtgccaaagcgaagacggcagagagggtctgaaacagatactgattccgagatccacgagtcggcctccgataaggacagcctgtctaaggggaagctccctaaacgagaggagcgtccagagaataaaaagcctgtgaaacctcacagttcatttaaaccggataatcatgtaagaattgacaatcgtctcctggagaaaccatatgtgagagatgatgacaaagctaagcccggatttctgcccaagggagagccaacgaggaggggacgaggcggaaccttccggcgtggtggcagagacccgggtggtagaccctccaggccaagcactttaagaagacccgcatacagagataaccagtggaacccccgacagagtgaagtgcctaagcctgaagacggggaaccaccacgtaggcatgaacagttcatacctatcgctgcagataagcgccctcccaaattcgagcgcaaattcgaccctgctcgcgagcgtcccagacgtcagcggcctacacgcccaccaagacaagacaagcccccaaggtttcggaggctcagggaacgagaagcagccagtaagagcaatgaggtcgtcgctgtcccgaccaacggaaccgttaacaatgtggcccaggagccggttaacactttaggggacataagtggtaataagacccctgacttatccaaccagaattcctctgatcaggctaatgaggaatgggagaccgcctctgaaagctctgacttcaatgaacgccgtgagcgagacgagaagaaaaacgctgacctgaacgctcagacggtcgtgaaagtgggagagaatgtcttaccacctaaaagggagattgccaaaaggtcattcagtagccagcggccagtggacaggcagaatcgcaggggcaacaacggccctccaaagagcggccgaaatttctcaggacccagaaacgagcggagaagcggtcctccgagtaagtccggtaaaagggggccatttgacgatcaaccagctgggaccacaggtgtggacctgattaacggcagcagtgcacaccaccaggagggtgtgccaaatggtacaggtcagaagaattcaaaagactccactggcaaaaaacgcgaagatcccaagccgggacctaaaaagccaaaggaaaaggtcgatgcgctgagccagttcgatctaaataattacgcctccgtcgtgatcatcgatgatcatccagaggtcacagtgatcgaagacccacagagtaatctcaatgacgacggttttacagaggtggtctcgaagaagcagcaaaagcggctgcaggacgaggaaaggagaaaaaaagaagaacaagtaatccaagtctggaacaaaaaaaatgccaacgagaagggcaggtcgcaaacgtctaagttgccgcctcgattcgcaaaaaaacaggccaccggcatccagcaggcccagtccagcgcctccgtgccaccactggcttcggctccactacccccatccacttccgcaagcgtgcccgcttccaccagtgcacctctcccagccactctcacacccgtgccagctagcacatccgctcctgtcccagcctccacactggccccagtactcgcttctacctcagcccctgtccccgcatcgccactcgctcccgtgagcgcatcagccagtgtttcagccagtgtccccgcttctacatccgctgccgcaattacgtcttctagtgctcctgctagcgctccggcacccacccccattctggcctccgtgagtactcccgcatccgtgacaattctggcctccgccagtatcccgatcctcgcttccgcactggccagtacatcagcgccaaccccagccccagccgcatcatctccagccgctcctgtcatcacagctcctacaatcccggcttcagctccgaccgctagcgtgccacttgctccagccagtgctagcgctcctgctccagccccaactcccgtaagcgccccaaacccagcccctcctgcgcctgcccaaacccaggcccagacgcacaaacctgtccagaaccccctgcaaaccacgagtcagagttccaagcaacccccacccagcatccgattaccaagcgctcagaccccgaatggaacagattatgtggcaagtggcaagagtatccagacaccacagagccacggcacgttaaccgctgagctgtgggacaacaaggtcgcaccaccagcagtcctcaacgatatttctaagaaacttggtccaatttcacccccacagccgccttccgtttctgcttggaacaagccactgacttcattcgggagtgccccaagctccgagggcgctaaaaacggacaggagagcgggctcgagatcgggacagatactatccagtttggagcacccgcttcaaacggcaacgaaaacgaggtggtccctgttctgagcgaaaagagcgccgataaaatcccagagcccaaagagcagcgtcagaagcagcccagggctggccctattaaggcccagaagctgcccgatttatcgcccgtggagaataaagagcacaagcctggtcctatcggcaaggagcgcagcttgaaaaatcgtaaggtcaaggatgcacagcaggtggagccagagggacaggagaaaccgtcccctgcgacggtccggtcaaccgaccccgttaccacaaaagagaccaaagccgtgtccgagatgagtaccgagatcgggactatgattagcgtctcaagcgctgagtatggtaccaacgcaaagatggagagtgctcgaaaggcatgggagaactctccaaatgtgagagagaagggatcccccgtgacttcgactgcgccacctatcgctactggcgtgtcttctagtgcgagtggcccatcaactgctaactacaattcttttagctccgccagtatgccacagatccctgtggctagcgtaacaccgaccgcctcactgtctggcgcaggtacctacactacaagctccctgagtaccaaatcaactactacatccgatcccccaaacatctgcaaggttaagccgcagcaactgcagacctcctcattaccaagcgcctcccacttttctcaactgagctgcatgcccagcctcattgcccagcagcagcagaacccacaggtgtacgtgtctcagtcggcggcagctcagattcccgctttttacatggatacttcgcacttgttcaatactcaacacgcacgcctggctcctccatcccttgcacagcagcaaggctttcagccgggactctctcagcccacctccgtgcagcaaatacctatcccgatctacgccccactgcaaggtcagcaccaagctcagctctcactcggcgcaggcccagccgtatctcaagcccaggaacttttctctagcagcctgcaaccctatagatcccagccagcattcatgcaatccagtttgtcccagccttcagtggttctcagtggcaccgcaatccataacttccctacagtgcaacaccaggagctggcgaaggcccagtcgggcctggctttccagcaaaccagcaacacgcagccaattcctattctgtacgagcatcagctgggtcaagccagcggcctgggagggtctcaactgatagatacgcacctgttgcaggctcgcgcaaatctgacccaggcctctaacttgtactccgggcaagtgcagcagcccggacagactaacttctacaacacagctcagtctccttcagctttacagcaggtgacagtccctctccctgcctcccagttgtcgctccctaatttcggctcaacaggacagcctttgattgctctgccccagactttgcagcctccattgcaacataccactccgcaggcccaagctcagagcctaagcagaccggctcaggtatcacagcctttccgagggctcatccctgcagggacccaacactccatgattgctaccacaggcaaaatgtcagagatggagctgaaagcatttgggtcaggaatagacatcaagcctggaacacctcccattgccggacgcagcactacgccaacgtctagcccattcagagcaacctcaacctcaccgaactcacagtccagtaagatgaacagcatcgtgtatcagaagcaatttcaaagtgcacccgctacagtgcgcatgacgcaacccttccccacgcagttcgcaccccaggctaagcagagagccgaggtgctgcagtcaactcagagatttttttcggagcagcagcagagtaaacaaatcggcggaggtaaagcccagaaggtcgactcagattcatccaaacccccagagacccttaccgacccccctggagtttgtcaagagaaggtcgaagagaagcctcccccagcaccttcaatcgcgaccaaacccgtgcgaacaggacctataaaacctcaggcaatcaaaactgaagagacgaaatctta

SEQ ID NO: 184946 - DNA, 8552 bp, Artificial Sequence
  derived and/or modified sequence
atgagcgagaagtcggggcaatctacaaaagccaaagacggcaagaaatacgccacattatccttgtttaacacatacaagggcaagagtttggagactcagaaaactaccgcaagacatggcctgcaatccctgggaaaagtcgggattagtaggcggatgcctccaccagctaatctcccatcgctcaaggccgagaacaaagggaacgatcccaacgtgaacatcgtgcccaaggatggaacaggttgggcttcgaaacaggagcagcacgaggaggagaaaacacctgaggttccaccagcgcagccaaagccaggcgtagctgctccgcctgaggtagctcctgccccaaaaagctgggcctcaaataagcaagggggacagggtgatggcattcaagtgaactcccaattccagcaggagtttccttcgctccaggcagctggagatcaggagaagaaagaaaaggaaactaacgacgacaattacgggcctggaccatctctgcgtccgccaaacgtggcgtgctggcgcgatggcggaaaggccgctgggtctccgagcagcagtgatcaggacgaaaagttaccaggacaagacgaatctacagctggtaccagcgagcagaacgatatcctgaaagttgtggagaagaggattgcatgtggaccccctcaggccaaactcaacggacagcaagccgctctggctagtcagtaccgagccatgatgcctccttacatgttccagcaataccccaggatgacatacccaccattgcatggtccaatgcgctttccgccttctcttagtgaaaccaataagggtctgcgcggtcgtggccctcctccatcctgggcctcggagcctgagcggccatccattttgtccgcttcagagctgaaggaattggataaatttgacaatcttgatgcagaagctgatgagggctgggcaggggcacagatggaagtggactataccgagcagctcaacttctcagatgacgacgaacagggaagcaattcccccaaggaaaacaattctgaggaccagggcagcaaagcttctgagaataacgaaaacaagaaggagactgacgaagtgtccaacactaagtcttcatcccaaatcccggctcagccatctgtcgcgaaggtcccctacggaaaaggccctagcttcaaccaggagcgcggtacttcatcgcatctaccccctccgcctaagcttctcgcccagcagcacccccctccagatagacaggcagttcctggcagacctggcccattcccgtcaaaacaacaggtggccgacgaggacgagatttggaagcaaagacgacgccaacagtcagaaatctccgcagccgttgaacgcgctcgcaaacgaagggaggaggaagaaagaaggatggaagagcagcgcaaggcagcttgcgcagagaagttaaagcgtctcgacgaaaagctggggatactagagaaacaaccatcacccgaggagattagagaaagagagcgggaaaaggaaagagaacgcgagaaggagctggagaaggagcaagaacaggaacgggaaaaagagcgcgagaaagatcgagagcgccagcaggagaaagaaaaggagctagagaaagagcaggagaagcagcgtgagatggagaaggagagaaaacaggaaaaggagaaagaactcgagcgccagaaggagaaagaaaaggagctgcagaagatgaaggagcaggagaaggagtgcgagctggaaaaagagcgtgaaaaactagaagaaaaaatcgaacctcgcgagcccaatttagaaccgatggtagagaaacaggagagcgagaacagctgcaacaaggctgaagaagagcctgtgtttacccgtcaggattctaaccgatcagagaaagaggctactcctgtcgtccatgaaactgaacccgagtctggcagtcagcccagaccggctgtcctatccgggtatttcaagcagttccagaaatcattgcctccaaggttccagaggcagcaggaacaaatgaagcagcagcaatggcagcagcaacagcaacagggcgtgttgcctcaaactgtaccctcccagccttcatcctcaaccgttcccccacctccgcacagacctctgtaccaacccatgcagccgcatccacaacatctcgcatcaatgggctttgatcccagatggctgatgatgcagagctatatggaccctcggatgatgtccggtagacctgccatggatatcccacccatacatccagggatgattcctcccaaaccactgatgcgaagagatcaaatggaggggtcccccaattcctctgagagcttcgagcacatagcaagatcggccagagaccacgccatatctttatccgagcccaggatgctgtgggggtccgacccgtatccccatgccgagccacagcaggcaacaactcccaaggccacagaggaacccgaggacgtcagaagtgaggcagcattggatcaagaacagattactgccgcatactctgtcgagcataaccaactggaggcccacccaaaggcagatttcattcgggagtccagtgaggcccaggtgcagaaatttctgtcacgatcagtggaggatgtccgaccccaccacaccgatgccaacaaccagtccgcctgcttcgaggcgcctgaccagaagacccttagcgccccacaggaggagaggatcagcgcagttgaaagtcaaccttcacgcaagcgctctgtaagccatgggagcaaccatacacagaagcctgacgagcaacggtctgagccttcggccggtatcccgaaggtgacttcgcggtgcatcgattccaaagaacccattgagcgtcctgaggaaaaacctaagaaggaagggttcatccgaagtagtgagggaccaaagcccgaaaaggtatataaatctaagtctgaaacaagatggggtccccgacccagctccaaccgacgcgaagaggtcaatgacagacctgttaggagatctgggccaatcaaaaagccagtgctgcgggacatgaaagaggagagggagcagagaaaggagaaggaaggagaaaaagcagaaaaggtcacggagaaagtcgtagttaagcccgagaaaaccgagaagaaggatctgccccctccacctccccctccccagccacccgctcccattcagccccaatccgtgcctccacctatccagcctgaggcagagaagttcccttccaccgaaactgcaacactggcgcagaaacccagccaggatacagagaaaccacttgaacctgtgtcgacagtgcaggtggaacctgccgtgaaaaccgtgaatcaacagaccatggcagcgcctgttgttaaggaggagaagcagccagagaaggtcattagcaaagatctcgtgattgagcggccacgaccagacagccgtccagccgtcaaaaaggagtccaccttaccgcctcggacctattggaaggaggcccgagaaagggattggtttcccgaccagggctacagaggccgaggcaggggcgagtactactcccgcggtaggagttatcggggaagctacgggggaagggggaggggcggaagagggcatactagagactatccccagtatagggataataaacctagagccgaacatatcccttctggacccctgaggcagagggaggagagtgagactcgatccgaatctagtgactttgaagttgtaccaaaacgcagaaggcaaagaggtagtgagactgacacagacagtgaaatccacgagtctgcctctgataaggactcactgagtaaaggcaagctgcccaaacgcgaagagaggccggagaataagaaacccgttaagccccattctagctttaagcccgataatcacgtgcgcatagataatagacttctcgagaagccctatgtgcgggatgacgacaaggccaaaccaggtttcctcccgaaaggggaacctacccgacgcggaagagggggtaccttccgcagggggggacgggaccctggcggacggccttctagaccatcaacactgaggcgacccgcatatcgcgacaaccagtggaatcccagacaaagcgaagttcccaagcctgaggatggggagccaccacgacgacacgaacagttcataccaatcgccgctgacaagcgcccaccaaagtttgaaagaaagttcgatcctgctcgggaacgcccaagaaggcaacgtcccactagacccccacggcaggataagccacccagatttaggcgactccgtgagcgcgaggctgcctccaaatcgaatgaagtagtggctgtgccaaccaacggcacagtcaacaacgtcgcccaggagccggtaaatacactcggtgacatatctgggaacaagacaccagatctaagcaatcaaaatagcagcgaccaggccaatgaggaatgggagacggcatctgaatcttccgactttaatgagagaagagaaagggacgagaagaagaatgcggacctgaacgcacagaccgtagtgaaggtgggggaaaatgtactccctcctaagcgcgagatcgcaaaacgctcttttagcagtcagaggcccgtggatcgacagaatagaaggggaaataacggcccacccaagagcgggaggaacttctccggccctcgcaacgaacgcagaagcgggccaccgtctaagtccgggaagcgcggtccttttgatgaccaacccgctggaacaactggggtcgatctgataaacggctcgagtgcgcaccaccaggagggcgttccaaatggaacgggtcagaagaacagcaaagattcaactggaaaaaagcgagaggaccccaagcccggtcctaagaaacccaaggagaaggtggatgcattatcccagttcgacctgaacaactacgcgagcgtggtgattatagatgaccatcccgaagttactgtcatagaagatcctcaatccaacctgaatgatgacgggttcacagaagtggtcagtaagaagcagcagaaacgattacaggatgaggaaagaagaaagaaagaggaacaggtgatccaagtttggaataagaagaatgctaacgagaaggggaggagccagacaagcaaactgcctccccgatttgcgaaaaagcaggccaccggaatacagcaggcccaaagctcagcgagcgttcctcctctcgccagcgctcccctgcctccatccaccctggcaccggtgagtgcttctgcaagtgtgagcgcctctgtcccggcttcaacaagtgcggctgccataacttccagctccgcaccagcctcagcccctgcccctacgcccatcttagcctctgtgagtactccagcttccgtcacaattctggcttcagcctcaattccaattttggcttcggccctggctagtacctcggcaccaaccccggctccagctgcctcaagccctgccgctccagtcataaccgcaccaaccattccagcctccgcccctacggcttcggttcctctcgcccctgcttccgcctctgcaccagccccagcgccaacccctgtgtctgcgccaaatcccgctccaccggctcctgcacagacacaggcacagactcacaaacctgtccaaaatcctctccagaccacatcccaatccagcaaacaaccccctccatcaatacggttacctagtgcccagacaccgaatggcactgactacgtagcctccggcaagtcaatccagacgccccagagtcacggaacactgacagcagagctctgggacaacaaggtggccccacctgcagttctgaacgatatcagtaaaaagctggggcctatcagcccccctcagccgccatcagtgtctgcatggaacaaacccttgacatcgtttgggagtgcgccttcaagtgagggcgctaagaacggacaggaaagtgggctggagatcggcacagatactatccagttcggggcacctgcctccaatggcaatgagaacgaggtcgtgcctgtgctatccgaaaagagcgctgacaaaattcccgagcctaaggaacagagacagaaacaaccgagagctggcccaataaaagcccagaagctgcccgacctgtcacctgtcgagaataaagaacataaacccggtcctatcggaaaagagaggtctctgaaaaaccgcaaggtgaaggacgctcagcaggtggagcccgagggccaggagaagccttcacccgcaacggtgagatctacggacccagtcacaactaaagagacaaaggccgtctccgagatgtccaccgagataggcactatgattagcgtcagttccgccgaatacgggacaaatgctaaggaatctgtaaccgattacactacaccgtcttctagcctgcccaacacagtcgcgactaacaacacaaagatggaggacaccctcgtcaacaatgtgcctcttccaaatacactgcctctcccaaaacgcgaaacaatacaacagagttcgtctctgacctctgtccctcctacgactttctcgctgactttcaagatggagtcagcccgtaaagcgtgggagaactcgcccaacgtgagggaaaaggggtcgccggtgacttctacagcgccacctatagctactggggtatcttcttctgccagtgggccatctaccgctaactacaattcctttagcagcgcctcaatgccacaaattcccgtggcaagtgtgaccccgaccgccagcctttctggtgccggaacatatacgacatccagcctcagtacaaagagcactacaacttccgacccacccaatatttgcaaggttaaacctcagcagctgcaaacttcatccctgccttctgcctcacatttcagccagctctcatgtatgccttccctcattgctcagcaacagcagaatcctcaggtgtacgtttcacagagtgccgcagcccagatccctgccttttatatggacactagccacctgttcaacacccaacacgcgcgtctcgcgccaccaagtttggcccagcagcagggatttcagcccggtctgagtcaacctacttctgtgcagcaaattccaatcccaatatatgcacctctccaggggcagcatcaagcccagttgtcactaggagcaggtccagccgtgtcacaggcccaagagctgttcagcagctcgttgcagccttatcggtcacagcccgcttttatgcagagtagcttgtctcagccctcagtcgtcctgagtggcaccgcaatccataacttccctaccgtccagcaccaggagctggcaaaggcccagagtggcttggcctttcaacagacctctaatacccagccgattcccatcctctacgagcaccagctggggcaggcctccggactaggagggtcccaactcatcgatactcatctgctgcaggctagggctaaccttacccaggctagtaacctttactctgggcaggtgcaacagcctgggcagaccaatttttataataccgcccaaagtccgtcagccttgcaacaggtgacggtgcccctgccagccagtcagctgtccctcccgaattttggctctacagggcagcccctgatcgcgttgccccaaacactgcagccccctttacagcatactactccacaggctcaagcccaatctctcagcaggccggctcaggtctcgcagccattccgcggacttattcctgccggaactcagcactccatgattgccactaccggcaagatgagcgagatggaactcaaggcatttggctctgggatcgacatcaaaccagggacccccccaattgccggacggagtactactcccacatccagtcctttccgcgctacttctacaagcccaaactctcagagctctaaaatgaatagcattgtgtaccaaaagcagttccaatcagctcccgctactgtgagaatgacacagccattcccgacccagttcgcccctcagattctttcccagcctaacctggtccctcctttagtgcgagccccacacactaacacgtttcccgcaccggtacaaaggccacccatggcattggcaagccagatgccaccacctctgactacaggcctcatgtctcatgcgcgactgccacacgtggcacgtggcccatgtgggtcgttgagtggagtccgaggaaaccaagctcaggccgcactgaaagcagaacaggacatgaaggctaaacaaagggctgaggttctgcagtctacccaacgattcttttccgaacagcaacagtcaaaacagatcggcggagggaaagctcaaaaagtggacagtgactccagcaaacctccagaaacactcacagatccaccgggagtgtgccaggagaaagtggaggaaaaaccccctcccgcaccatcgatcgccaccaagcccgtgagaactggacccattaagccccaggcaatcaagactgaagagacaaagtctta

SEQ ID NO: 184947 - DNA, 10355 bp, Artificial Sequence
  derived and/or modified sequence
ctcgctccccctcggaaagctgcgaaagtgctttggcggtttgtccatccgcagcttcggcttttccagtctggtggcccttccggccacccctttaaccccagctttccctcccccttctttcgatcagagatcggcggagaccctcgaagtgcgcaaacttgacactcaccctgaccggactggggttttaaggggtgtggcaggaggttttggactcgatgagtttccaccgaaatgtcggagaagtcaggccagagcacaaaagcaaaggatgggaaaaagtatgcaacactcagtttatttaatacttacaaggggaaatcattagaaacacagaaaaccacagctcgacatggattacagagtcttggaaaagtcggtatttcacggcgtatgcctccacctgctaacctcccaagtcttaaagcagaaaacaaaggcaatgatcctaatgtaaacattgtacctaaagatggcacagggtgggcatcaaaacaagagcaacatgaagaagaaaaaacaccagaagtgccaccagcacagccaaaacctggggttgcagctcccccagaagtagcacctgctcccaaatcatgggccagtaacaagcaaggtgggcaaggagatggaatccaagtgaatagtcagtttcagcaagaatttcccagcctgcaggcagctggggatcaggaaaaaaaagaaaaggaaacaaatgatgacaactatggacctggacccagtttacgtccaccaaatgttgcttgttggagagatggtggtaaggctgctggctcaccttcgtcatctgatcaagatgaaaagctccctggccaggatgaaagcacagctggaacatcagagcaaaatgatatcctcaaagtggtggaaaagaggatagcttgtggtcctccacaggctaaactgaatggacagcaggctgctctcgcttcccagtatagagctatgatgcctccttatatgttccaacagtatccgaggatgacatatcctcctctacatggtcccatgagattcccaccttctttatctgaaacaaacaaaggccttcgaggaagaggcccacctccttcatgggcctctgagcctgaacgcccatccattcttagtgcatcagaactgaaggagcttgataaatttgataacctagatgctgaagctgatgaaggttgggcaggtgctcagatggaagtagattatacagagcaactgaatttcagtgatgatgatgaacaaggaagtaacagtcctaaagagaataacagtgaggatcaaggttcaaaagcctctgaaaacaacgaaaacaaaaaagaaacagatgaagtttccaacactaaatcatcttcccaaatacctgcccaaccatcagtagcaaaagttccctatgggaaaggaccttcatttaatcaggaacgtggaacatcttcacatctgccaccacctccaaagttgcttgcacagcagcatccacctccagatcgacaggcagtacctggaagaccaggcccctttccctccaagcagcaagtagctgatgaagatgaaatatggaagcaaagacgaagacaacaatcagaaatttctgcagcagtagaacgtgctcgtaaacggcgtgaagaggaagagcgaagaatggaagaacaaaggaaggcagcttgtgcggagaaactgaaacgattggatgagaagcttggcatcctggaaaaacaaccatctccagaggaaattagggaaagggagcgagaaaaagaacgggagcgtgagaaagaacttgaaaaagaacaagaacaggagcgagagaaggagagggaaaaagacagagagagacagcaggaaaaggagaaagagctggagaaggagcaggaaaaacaaagagaaatggagaaagaaagaaagcaagaaaaagaaaaagaactagaacggcagaaagaaaaggaaaaagaactacaaaagatgaaagaacaagaaaaggaatgtgagctggagaaggaaagggaaaaattagaggagaaaattgaacccagagaacctaatttagagcccatggtagaaaaacaagaaagtgaaaacagctgtaataaagaggaggaacccgttttcactagacaagacagcaatcgcagtgaaaaggaagccacaccagtggtgcatgaaacagaaccagaatcagggtctcaacctcggccggctgtattatctggctatttcaaacagtttcagaagtctttacctccacgattccagcggcagcaggaacagatgaaacagcagcagtggcagcagcagcaacagcaaggtgtacttccacagactgttccttcacaaccgtccagtagtactgtccctcctccaccacacagacctctttatcagcctatgcagcctcatcctcagcatttggcttctatgggttttgatccaaggtggctcatgatgcagtcctacatggatcctcgaatgatgtcaggaagacctgctatggatattccacccattcatcctggaatgattcctcctaaaccattaatgagaagagaccagatggaagggtcaccgaacagttctgagtcatttgagcatatagctcgatctgcaagagatcacgcaatttccctttctgagcctcgtatgctgtgggggtcagatccctatcctcatgctgagcctcaacaagcaactactcccaaagcaacagaagagcctgaggatgtaaggtctgaagctgcgttggaccaggaacagattactgctgcttattctgtagaacataatcaattagaggctcacccaaaggcagactttatcagagaatcaagtgaggcacaagtacaaaagtttttaagcagatctgtggaagatgttagacctcaccatactgatgcaaataatcagtctgcttgttttgaagcacctgatcaaaagaccttatccgctcctcaagaggagcggatttcagctgtagaaagtcagccttcccggaaaagaagtgtttcccatggatctaaccatacgcaaaaaccagacgagcagagaagtgaaccatctgcaggcattcctaaagtaaccagcagatgcattgattcaaaagaaccaatagaaaggccagaggagaaaccaaaaaaggaaggctttatacgatcttctgaaggaccaaaacctgaaaaagtatataaatctaaatcagaaactcgttggggcccacgaccaagctctaacagaagggaagaagttaatgatagacctgtgagaagatcaggtcccattaaaaaacctgtacttagagatatgaaagaggaacgggaacagaggaaggagaaagaaggagaaaaggccgaaaaggtcactgaaaaagtagttgtaaagcctgaaaagacggaaaagaaggatcttcctcctcccccaccaccacctcagccaccagcaccaattcagccacagtcagttccaccaccaattcaaccagaagcagagaaatttccttcaacagaaactgcaactttggctcaaaaaccatctcaggatactgagaagcctctggaacctgtgagtactgttcaggtagagcctgcagttaagactgtaaaccaacagactatggcagcaccagtagtcaaagaagaaaaacaacctgagaaagtcatcagcaaagaccttgttatagagaggcctcgaccagattcaagaccagcagttaaaaaagaatcaactttgcctcccaggacctattggaaagaagctagagagagagattggtttccagatcaaggatacagaggtcgaggccgaggtgaatattactccagaggtcgaagctatagaggttcttatggagggcgtggcaggggtggtaggggacacactcgagattatcctcagtatagagacaataagccaagagcagagcatataccctcagggcctctcagacagcgagaagaaagtgaaacacggagtgagagctctgattttgaagttgtccccaaaagaagacgacagcggggttcagagactgacacagacagtgaaattcatgaaagtgcaagtgacaaggacagtttaagtaaaggcaaacttcccaaaagagaggaacggcctgaaaacaaaaaacctgtaaagcctcattcttctttcaagcctgataatcatgttcgaatagataatagactgctagaaaagccttatgtaagggatgacgataaagctaaaccaggctttcttcctaaaggagagcctacaaggagaggcagagggggaacattcaggcgtggtggaagggatcctggaggccgtccatcacgcccttccactttacgaagaccagcttatcgggacaatcagtggaacccaaggcagtcagaagttcctaaaccagaagatggagagccgccaagaagacatgagcagtttattcctatagcagcagataaacgacctccaaaatttgagcgaaaatttgacccagctagagaaaggcctcgaaggcagcgtcctactcgaccaccaaggcaagacaagccacctcgatttagacggctaagagagagggaggctgcttcaaaatcaaatgaggtggtagcagtgcccacaaatggcacagttaataatgtggctcaagaaccagttaatactcttggggatatttccgggaataagacaccagatttatctaatcagaactcttcagatcaggcaaatgaagaatgggaaacagcttctgaaagcagtgatttcaatgagaggcgagagagggatgaaaaaaaaaatgctgacttgaatgcacaaacagttgtaaaggttggagagaatgttctacctccaaagagggaaattgcaaagagaagtttttctagtcagagaccagtagatcgtcagaatcgacgtggcaacaatggtccacccaaatcaggaaggaatttctcaggtcctagaaatgaaaggagaagtggcccaccatcaaaaagtgggaagagagggccatttgatgaccagcctgcaggcacaactggggttgacctcatcaatggcagctctgcacaccatcaggaaggagtacctaatggtacaggacaaaagaactccaaagattctactgggaaaaaaagagaagaccccaaaccaggccctaaaaaaccaaaagagaaagtggatgctctatcacagtttgatctcaacaattatgcaagtgttgttataattgatgatcatcctgaagtaacagtaattgaagatccccagtcaaatttgaatgatgatggttttactgaagtggtatccaaaaaacaacaaaaacgtttacaggatgaagaacgccgaaagaaggaagaacaagtcatacaggtctggaacaaaaagaatgcaaatgaaaaaggaagaagccagacttctaagcttcctccaagatttgccaaaaaacaggctacagggatccagcaagcacagtcttcagcctcagttccacctctagcttcggctccacttccaccttcaacctcagcttcagttccagcctcaacctcagctccacttccggcaaccttaactccagttccagcctcaacctcagctccggttccagcctcaactttagctccagttctggcctcaacctcagctccagttccagcctcacccttagctccagtttcagcctcagcctcagtctcagcttcagttccagcctctacttcagctgcagctataacctcttcttcagctccagcctcagccccagctccaacccccatccttgcctcagtttcaaccccagcttctgtcaccattcttgcctcagcctcaattcccattcttgcttcagccctagcatcaacttcagctccaacgccagccccagcagcctcttccccagctgccccagtcatcacagcaccaactatcccagcctcagccccaactgcctcagtcccacttgcccctgcctcagcttcagccccagccccagcccctaccccagtctcagccccaaatcctgccccacctgccccagcccagactcaggcacagacccacaaaccagtccagaatccactacagactacatctcagtcttcaaaacaaccaccaccatcaattaggctgccttcagctcaaacacctaatggcacagattatgtagcctcaggaaaatccatccagaccccacagtcacatggcactctgacagctgaattatgggataacaaggtggccccaccagctgtgctgaatgatatctctaagaaattaggtcccattagtccaccacagccaccttcagtcagtgcatggaataagcccttaacatcgtttggatcagctccttcatcagagggagcgaagaatggtcaagaaagtggactcgaaattggaactgacacaattcagtttggtgctccagcctcaaatggaaatgaaaatgaagttgttcctgtgctttcggaaaaatctgctgacaaaatacctgaacctaaagaacagcggcagaagcagccacgagcaggacctatcaaagcccagaagcttccagatttgagtccagtagaaaacaaagaacacaaacctggtcccattggaaaggaacgttcattaaaaaatagaaaagtaaaagatgcccaacaggtggagccagaaggacaagagaaaccaagcccagctacagtcagaagcacagatcctgtcacgacaaaggagactaaagcagtctcagaaatgtctactgaaataggaacaatgatctcggtatcatctgcagaatatggtactaatgcaaaggagtctgtaacagactatactacaccctcttcttctttgcctaacaccgtggctactaataatacaaagatggaggatactttggttaataatgtgcccctgcccaacacccttcccctccctaagagggagactatacaacagagctccagcctaacttcagttcctcccactactttcagcctcaccttcaagatggagtctgcacgcaaagcatgggagaattctccaaatgtaagggaaaaggggtctccagtaacttccacagcacctccaattgcaactggagtcagcagtagtgccagtggaccaagcactgctaattacaattcgttctcaagtgcatccatgccccagattcctgttgcttcagtcactcctacagcatcactatcaggagctggtacatacactacctcttctttgagcacaaaatctacaaccacatcggaccctccaaatatttgtaaagtgaaacctcagcagttacagacaagcagcctgccttctgcaagtcatttttcacagttaagctgtatgccttcccttattgcccagcagcaacagaatccgcaagtttatgtgtctcagtctgcagcagctcaaatcccagccttctatatggacacaagtcatttattcaatacccaacatgcacgattggctccgccatccttggctcaacaacagggtttccaaccaggtctctctcagccaacttcagttcagcagattccaatccctatttatgcaccactgcaagggcagcatcaagcccaactgagtttgggggctggccctgctgtttcccaggctcaggaattgttcagctcctcacttcaaccatatagatctcagccagcttttatgcaaagcagtttatcccagccatctgtggtcctttctggtactgctattcacaactttccaactgtccaacaccaagaacttgccaaggcacaatccggtcttgcctttcagcaaacatcaaatactcagcccattcctatattgtatgaacatcaactggggcaggcatcaggactaggaggttcccagctgattgacacacatcttctccaggccagagcaaatcttacccaggcctcaaatctttattctggacaagtacaacagcctggtcagacaaatttttataacactgcccagtcaccaagtgctctccagcaggttacagtacctttaccagcatcgcagctttccttgcctaattttggatctacagggcaacctctaattgctttgcctcagactcttcagcccccattacagcataccactccccaagcacaggctcagagtctgagtcgtcctgcacaagtaagccagcctttcagaggattaattcctgctggaacacagcatagcatgattgcaaccacaggaaaaatgtctgaaatggaactaaaagcctttggaagtggcattgatataaaaccaggcacacctccaatcgctggtagaagcaccacaccaacatctagtcccttccgggctacttctacaagtccgaacagccagtccagcaaaatgaacagcattgtctaccagaagcagttccagtcagcccctgccactgtgagaatgacacaaccatttcctacacagtttgcaccccaggcaaagcagagagcagaggttcttcagtccacgcaacggttcttctctgaacagcaacagagcaaacagataggaggaggcaaagcccagaaagtggacagtgattcaagtaaacctcctgaaacactgaccgaccctcctggggtctgtcaggaaaaagtagaagaaaagccaccccctgcaccctccatagccaccaaacctgttagaactggaccaatcaaacctcaggcgatcaaaaccgaagaaacaaaatcttaaaggctatggtttattgcaggggattgggaggggggcgggaaaacatggagaattaagtcagataatgctggcagccaaaggggcaaaatggcctgtgacattatcctgttcagagcttggagatgtacaagggacataggagcaatttacactgacacacagctgctgtaccagtgaaaacgaggctttgcaagcttgtacctactatataacatgtgcttggttgatggccatgcatcttcagtcagaatttatatataaatgtatgcacccatttttttgagtgcatataatttagacctaaaaatccttatgattagatgaaacaccaaaaatataaggaaaataacacagcagaggaatagctcagcctgaacagtgtgatggtcccagctactacatcagatgcggtttttttgctcccttatgttcttcggatatggttatggcatttgtaggcttggaggtaaagaactgaagataactggtgctggatagaggagccttattttttattatggcagcttgctatttttataacatggtgattgagttgaacacaatcaaagtacagtagtaactgatgtccccttcttcctggatgaatgagcagataaatattgatgtcagcatccttgaaccatatcaaagtgagcagtgtttggctactgcttctatttgaaatggtgctgtgttttggttgtggtctgaagctttgaagcgctacttagcatctcctttcttccatggagctctcacgattcaaacatgacagatttggtaaaatgctggttaggttgagtcttccttgcccccactcagtcatctttgtatgaatcccatgatttgggggtttttttctttttttttttataccagtttttagctggtgtttatgaagaacagtgagtacctagaactgtgccactaattaaaggaaatcctaagaaggtgcatttctttacagagctgtgtcatgccatcctttgggccctctgctggaaaagtagaatcaagtctcaaataatgcctttttaattgtatcctctagtattatagatataggacagtactgtatcatacctctgtgaatgtaaaatatcttgtacctgctttatgatacgtagtagtgaccgtgctttatcagagctgtttttaatgatgttattctagaatgttttctttccagatgatgattcagaagctaattttaaaaaacggtgccaggtaccacaacagtaacagaactttgcaattttctggggttttgttttttacctttttccccccttttttttaaatggagtgtgctggatgtctctataattttattcagatgactgcagaacctggaaaagctgttgctgctattgatgcataacatactgctattggtctttttatataaatatatatatatatatacatatatatatataatttgaatttttggaaactttagctgtgctgtcaactttggaaaaagtatcccggtttactgtgttgagttggcattgtacagaaattaacagccatattggtctagaaacgttaaacttaatttttttccatttgtacaggggtaacgcactgtattaaatatgtaaggtcttatctacatgggtttgattacagaaactaataaagtattctctaaataatga

SEQ ID NO: 184948 - DNA, 8978 bp, Artificial Sequence
  derived and/or modified sequence
cgtaggggctggctagccgccatcttgcttctttttctcgctcgctcgctccccctcggaaagctgcgaaagtgctttggcggtttgtccatccgcagcttcggcttttccagtctggtggcccttccggccacccctttaaccccagctttccctcccccttctttcgatcagagatcggcggagaccctcgaagtgcgcaaacttgacactcaccctgaccggactggggttttaaggggtgtggcaggaggttttggactcgatgagtttccaccgaaatgtcggagaagtcaggccagagcacaaaagcaaaggatgggaaaaagtatgcaacactcagtttatttaatacttacaaggggaaatcattagaaacacagaaaaccacagttgcagctcgacatggattacagagtcttggaaaagtcggtatttcacggcgtatgcctccacctgctaacctcccaagtcttaaagcagaaaacaaaggcaatgatcctaatgtaaacattgtacctaaagatggcacagggtgggcatcaaaacaagagcaacatgaagaagaaaaaacaccagaagtgccaccagcacagccaaaacctggggttgcagctcccccagaagtagcacctgctcccaaatcatgggccagtaacaagcaaggtgggcaaggagatggaatccaagtgaatagtcagtttcagcaagaatttcccagcctgcaggcagctggggatcaggaaaaaaaagaaaaggaaacaaatgatgacaactatggacctggacccagtttacgtccaccaaatgttgcttgttggagagatggtggtaaggctgctggctcaccttcgtcatctgatcaagatgaaaagctccctggccaggatgaaagcacagctggaacatcagagcaaaatgatatcctcaaagtggtggaaaagaggatagcttgtggtcctccacaggctaaactgaatggacagcaggctgctctcgcttcccagtatagagctatgatgcctccttatatgttccaacagtatccgaggatgacatatcctcctctacatggtcccatgagattcccaccttctttatctgaaacaaacaaaggccttcgaggaagaggcccacctccttcatgggcctctgagcctgaacgcccatccattcttagtgcatcagaactgaaggagcttgataaatttgataacctagatgctgaagctgatgaaggttgggcaggtgctcagatggaagtagattatacagagcaactgaatttcagtgatgatgatgaacaaggaagtaacagtcctaaagagaataacagtgaggatcaaggttcaaaagcctctgaaaacaacgaaaacaaaaaagaaacagatgaagtttccaacactaaatcatcttcccaaatacctgcccaaccatcagtagcaaaagttccctatgggaaaggaccttcatttaatcaggaacgtggaacatcttcacatctgccaccacctccaaagttgcttgcacagcagcatccacctccagatcgacaggcagtacctggaagaccaggcccctttccctccaagcagcaagtagctgatgaagatgaaatatggaagcaaagacgaagacaacaatcagaaatttctgcagcagtagaacgtgctcgtaaacggcgtgaagaggaagagcgaagaatggaagaacaaaggaaggcagcttgtgcggagaaactgaaacgattggatgagaagcttggcatcctggaaaaacaaccatctccagaggaaattagggaaagggagcgagaaaaagaacgggagcgtgagaaagaacttgaaaaagaacaagaacaggagcgagagaaggagagggaaaaagacagagagagacagcaggaaaaggagaaagagctggagaaggagcaggaaaaacaaagagaaatggagaaagaaagaaagcaagaaaaagaaaaagaactagaacggcagaaagaaaaggaaaaagaactacaaaagatgaaagaacaagaaaaggaatgtgagctggagaaggaaagggaaaaattagaggagaaaattgaacccagagaacctaatttagagcccatggtagaaaaacaagaaagtgaaaacagctgtaataaagaggaggaacccgttttcactagacaagacagcaatcgcagtgaaaaggaagccacaccagtggtgcatgaaacagaaccagaatcagggtctcaacctcggccggctgtattatctggctatttcaaacagtttcagaagtctttacctccacgattccagcggcagcaggaacagatgaaacagcagcagtggcagcagcagcaacagcaaggtgtacttccacagactgttccttcacaaccgtccagtagtactgtccctcctccaccacacagacctctttatcagcctatgcagcctcatcctcagcatttggcttctatgggttttgatccaaggtggctcatgatgcagtcctacatggatcctcgaatgatgtcaggaagacctgctatggatattccacccattcatcctggaatgattcctcctaaaccattaatgagaagagaccagatggaagggtcaccgaacagttctgagtcatttgagcatatagctcgatctgcaagagatcacgcaatttccctttctgagcctcgtatgctgtgggggtcagatccctatcctcatgctgagcctcaacaagcaactactcccaaagcaacagaagagcctgaggatgtaaggtctgaagctgcgttggaccaggaacagattactgctgcttattctgtagaacataatcaattagaggctcacccaaaggcagactttatcagagaatcaagtgaggcacaagtacaaaagtttttaagcagatctgtggaagatgttagacctcaccatactgatgcaaataatcagtctgcttgttttgaagcacctgatcaaaagaccttatccgctcctcaagaggagcggatttcagctgtagaaagtcagccttcccggaaaagaagtgtttcccatggatctaaccatacgcaaaaaccagacgagcagagaagtgaaccatctgcaggcattcctaaagtaaccagcagatgcattgattcaaaagaaccaatagaaaggccagaggagaaaccaaaaaaggaaggctttatacgatcttctgaaggaccaaaacctgaaaaagtatataaatctaaatcagaaactcgttggggcccacgaccaagctctaacagaagggaagaagttaatgatagacctgtgagaagatcaggtcccattaaaaaacctgtacttagagatatgaaagaggaacgggaacagaggaaggagaaagaaggagaaaaggccgaaaaggtcactgaaaaagtagttgtaaagcctgaaaagacggaaaagaaggatcttcctcctcccccaccaccacctcagccaccagcaccaattcagccacagtcagttccaccaccaattcaaccagaagcagagaaatttccttcaacagaaactgcaactttggctcaaaaaccatctcaggatactgagaagcctctggaacctgtgagtactgttcaggtagagcctgcagttaagactgtaaaccaacagactatggcagcaccagtagtcaaagaagaaaaacaacctgagaaagtcatcagcaaagaccttgttatagagaggcctcgaccagattcaagaccagcagttaaaaaagaatcaactttgcctcccaggacctattggaaagaagctagagagagagattggtttccagatcaaggatacagaggtcgaggccgaggtgaatattactccagaggtcgaagctatagaggttcttatggagggcgtggcaggggtggtaggggacacactcgagattatcctcagtatagagacaataagccaagagcagagcatataccctcagggcctctcagacagcgagaagaaagtgaaacacggagtgagagctctgattttgaagttgtccccaaaagaagacgacagcggggttcagagactgacacagacagtgaaattcatgaaagtgcaagtgacaaggacagtttaagtaaaggcaaacttcccaaaagagaggaacggcctgaaaacaaaaaacctgtaaagcctcattcttctttcaagcctgataatcatgttcgaatagataatagactgctagaaaagccttatgtaagggatgacgataaagctaaaccaggctttcttcctaaaggagagcctacaaggagaggcagagggggaacattcaggcgtggtggaagggatcctggaggccgtccatcacgcccttccactttacgaagaccagcttatcgggacaatcagtggaacccaaggcagtcagaagttcctaaaccagaagatggagagccgccaagaagacatgagcagtttattcctatagcagcagataaacgacctccaaaatttgagcgaaaatttgacccagctagagaaaggcctcgaaggcagcgtcctactcgaccaccaaggcaagacaagccacctcgatttagacggctaagagagagggaggctgcttcaaaatcaaatgaggtggtagcagtgcccacaaatggcacagttaataatgtggctcaagaaccagttaatactcttggggatatttccgggaataagacaccagatttatctaatcagaactcttcagatcaggcaaatgaagaatgggaaacagcttctgaaagcagtgatttcaatgagaggcgagagagggatgaaaaaaaaaatgctgacttgaatgcacaaacagttgtaaaggttggagagaatgttctacctccaaagagggaaattgcaaagagaagtttttctagtcagagaccagtagatcgtcagaatcgacgtggcaacaatggtccacccaaatcaggaaggaatttctcaggtcctagaaatgaaaggagaagtggcccaccatcaaaaagtgggaagagagggccatttgatgaccagcctgcaggcacaactggggttgacctcatcaatggcagctctgcacaccatcaggaaggagtacctaatggtacaggacaaaagaactccaaagattctactgggaaaaaaagagaagaccccaaaccaggccctaaaaaaccaaaagagaaagtggatgctctatcacagtttgatctcaacaattatgcaagtgttgttataattgatgatcatcctgaagtaacagtaattgaagatccccagtcaaatttgaatgatgatggttttactgaagtggtatccaaaaaacaacaaaaacgtttacaggatgaagaacgccgaaagaaggaagaacaagtcatacaggtctggaacaaaaagaatgcaaatgaaaaaggaagaagccagacttctaagcttcctccaagatttgccaaaaaacaggctacagggatccagcaagcacagtcttcagcctcagttccacctctagcttcggctccacttccaccttcaacctcagcttcagttccagcctcaacctcagctccacttccggcaaccttaactccagttccagcctcaacctcagctccggttccagcctcaactttagctccagttctggcctcaacctcagctccagttccagcctcacccttagctccagtttcagcctcagcctcagtctcagcttcagttccagcctctacttcagctgcagctataacctcttcttcagctccagcctcagccccagctccaacccccatccttgcctcagtttcaaccccagcttctgtcaccattcttgcctcagcctcaattcccattcttgcttcagccctagcatcaacttcagctccaacgccagccccagcagcctcttccccagctgccccagtcatcacagcaccaactatcccagcctcagccccaactgcctcagtcccacttgcccctgcctcagcttcagccccagccccagcccctaccccagtctcagccccaaatcctgccccacctgccccagcccagactcaggcacagacccacaaaccagtccagaatccactacagactacatctcagtcttcaaaacaaccaccaccatcaattaggctgccttcagctcaaacacctaatggcacagattatgtagcctcaggaaaatccatccagaccccacagtcacatggcactctgacagctgaattatgggataacaaggtggccccaccagctgtgctgaatgatatctctaagaaattaggtcccattagtccaccacagccaccttcagtcagtgcatggaataagcccttaacatcgtttggatcagctccttcatcagagggagcgaagaatggtcaagaaagtggactcgaaattggaactgacacaattcagtttggtgctccagcctcaaatggaaatgaaaatgaagttgttcctgtgctttcggaaaaatctgctgacaaaatacctgaacctaaagaacagcggcagaagcagccacgagcaggacctatcaaagcccagaagcttccagatttgagtccagtagaaaacaaagaacacaaacctggtcccattggaaaggaacgttcattaaaaaatagaaaagtaaaagatgcccaacaggtggagccagaaggacaagagaaaccaagcccagctacagtcagaagcacagatcctgtcacgacaaaggagactaaagcagtctcagaaatgtctactgaaataggaacaatgatctcggtatcatctgcagaatatggtactaatgcaaaggagtctgtaacagactatactacaccctcttcttctttgcctaacaccgtggctactaataatacaaagatggaggatactttggttaataatgtgcccctgcccaacacccttcccctccctaagagggagactatacaacagagctccagcctaacttcagttcctcccactactttcagcctcaccttcaagatggagtctgcacgcaaagcatgggagaattctccaaatgtaagggaaaaggggtctccagtaacttccacagcacctccaattgcaactggagtcagcagtagtgccagtggaccaagcactgctaattacaattcgttctcaagtgcatccatgccccagattcctgttgcttcagtcactcctacagcatcactatcaggagctggtacatacactacctcttctttgagcacaaaatctacaaccacatcggaccctccaaatatttgtaaagtgaaacctcagcagttacagacaagcagcctgccttctgcaagtcatttttcacagttaagctgtatgccttcccttattgcccagcagcaacagaatccgcaagtttatgtgtctcagtctgcagcagctcaaatcccagccttctatatggacacaagtcatttattcaatacccaacatgcacgattggctccgccatccttggctcaacaacagggtttccaaccaggtctctctcagccaacttcagttcagcagattccaatccctatttatgcaccactgcaagggcagcatcaagcccaactgagtttgggggctggccctgctgtttcccaggctcaggaattgttcagctcctcacttcaaccatatagatctcagccagcttttatgcaaagcagtttatcccagccatctgtggtcctttctggtactgctattcacaactttccaactgtccaacaccaagaacttgccaaggcacaatccggtcttgcctttcagcaaacatcaaatactcagcccattcctatattgtatgaacatcaactggggcaggcatcaggactaggaggttcccagctgattgacacacatcttctccaggccagagcaaatcttacccaggcctcaaatctttattctggacaagtacaacagcctggtcagacaaatttttataacactgcccagtcaccaagtgctctccagcaggttacagtacctttaccagcatcgcagctttccttgcctaattttggatctacagggcaacctctaattgctttgcctcagactcttcagcccccattacagcataccactccccaagcacaggctcagagtctgagtcgtcctgcacaagtaagccagcctttcagaggattaattcctgctggaacacagcatagcatgattgcaaccacaggaaaaatgtctgaaatggaactaaaagcctttggaagtggcattgatataaaaccaggcacacctccaatcgctggtagaagcaccacaccaacatctagtcccttccgggctacttctacaagtccgaacagccagtccagcaaaatgaacagcattgtctaccagaagcagttccagtcagcccctgccactgtgagaatgacacaaccatttcctacacagtttgcaccccagattctctcccagcctaacctggtccctccattggtaagagccccacatactaacaccttcccagcgcctgttcagaggccaccaatggcactggccagtcagatgcctcctccgctgaccacaggcctcatgagccatgctcgtttgccacatgtagccaggggtccttgtggatcactatctggagtcagaggtaatcaggcccaggctgcgttgaaggctgaacaagacatgaaggcaaagcagagagcagaggttcttcagtccacgcaacggttcttctctgaacagcaacagagcaaacagataggaggaggcaaagcccagaaagtggacagtgattcaagtaaacctcctgaaacactgaccgaccctcctggggtctgtcaggaaaaagtagaagaaaagccaccccctgcaccctccatagccaccaaacctgttagaactggaccaatcaaacctcaggcgatcaaaaccgaagaaacaaaatcttaa

SEQ ID NO: 184949 - DNA, 7962 bp, Artificial Sequence
  derived and/or modified sequence
gtacccaatcagatgttccaacagtatccgaggatgacatatcctcctctacatggtcccatgagattcccaccttctttatctgaaacaaacaaaggccttcgaggaagaggcccacctccttcatgggcctctgagcctgaacgcccatccattcttagtgcatcagaactgaaggagcttgataaatttgataacctagatgctgaagctgatgaaggttgggcaggtgctcagatggaagtagattatacagagcaactgaatttcagtgatgatgatgaacaaggaagtaacagtcctaaagagaataacagtgaggatcaaggttcaaaagcctctgaaaacaacgaaaacaaaaaagaaacagatgaagtttccaacactaaatcatcttcccaaatacctgcccaaccatcagtagcaaaagttccctatgggaaaggaccttcatttaatcaggaacgtggaacatcttcacatctgccaccacctccaaagttgcttgcacagcagcatccacctccagatcgacaggcagtacctggaagaccaggcccctttccctccaagcagcaagtagctgatgaagatgaaatatggaagcaaagacgaagacaacaatcagaaatttctgcagcagtagaacgtgctcgtaaacggcgtgaagaggaagagcgaagaatggaagaacaaaggaaggcagcttgtgcggagaaactgaaacgattggatgagaagcttggcatcctggaaaaacaaccatctccagaggaaattagggaaagggagcgagaaaaagaacgggagcgtgagaaagaacttgaaaaagaacaagaacaggagcgagagaaggagagggaaaaagacagagagagacagcaggaaaaggagaaagagctggagaaggagcaggaaaaacaaagagaaatggagaaagaaagaaagcaagaaaaagaaaaagaactagaacggcagaaagaaaaggaaaaagaactacaaaagatgaaagaacaagaaaaggaatgtgagctggagaaggaaagggaaaaattagaggagaaaattgaacccagagaacctaatttagagcccatggtagaaaaacaagaaagtgaaaacagctgtaataaagcagaggaggaacccgttttcactagacaagacagcaatcgcagtgaaaaggaagccacaccagtggtgcatgaaacagaaccagaatcagggtctcaacctcggccggctgtattatctggctatttcaaacagtttcagaagtctttacctccacgattccagcggcagcaggaacagatgaaacagcagcagtggcagcagcagcaacagcaaggtgtacttccacagactgttccttcacaaccgtccagtagtactgtccctcctccaccacacagacctctttatcagcctatgcagcctcatcctcagcatttggcttctatgggttttgatccaaggtggctcatgatgcagtcctacatggatcctcgaatgatgtcaggaagacctgctatggatattccacccattcatcctggaatgattcctcctaaaccattaatgagaagagaccagatggaagggtcaccgaacagttctgagtcatttgagcatatagctcgatctgcaagagatcacgcaatttccctttctgagcctcgtatgctgtgggggtcagatccctatcctcatgctgagcctcaacaagcaactactcccaaagcaacagaagagcctgaggatgtaaggtctgaagctgcgttggaccaggaacagattactgctgcttattctgtagaacataatcaattagaggctcacccaaaggcagactttatcagagaatcaagtgaggcacaagtacaaaagtttttaagcagatctgtggaagatgttagacctcaccatactgatgcaaataatcagtctgcttgttttgaagcacctgatcaaaagaccttatccgctcctcaagaggagcggatttcagctgtagaaagtcagccttcccggaaaagaagtgtttcccatggatctaaccatacgcaaaaaccagacgagcagagaagtgaaccatctgcaggcattcctaaagtaaccagcagatgcattgattcaaaagaaccaatagaaaggccagaggagaaaccaaaaaaggaaggctttatacgatcttctgaaggaccaaaacctgaaaaagtatataaatctaaatcagaaactcgttggggcccacgaccaagctctaacagaagggaagaagttaatgatagacctgtgagaagatcaggtcccattaaaaaacctgtacttagagatatgaaagaggaacgggaacagaggaaggagaaagaaggagaaaaggccgaaaaggtcactgaaaaagtagttgtaaagcctgaaaagacggaaaagaaggatcttcctcctcccccaccaccacctcagccaccagcaccaattcagccacagtcagttccaccaccaattcaaccagaagcagagaaatttccttcaacagaaactgcaactttggctcaaaaaccatctcaggatactgagaagcctctggaacctgtgagtactgttcaggtagagcctgcagttaagactgtaaaccaacagactatggcagcaccagtagtcaaagaagaaaaacaacctgagaaagtcatcagcaaagaccttgttatagagaggcctcgaccagattcaagaccagcagttaaaaaagaatcaactttgcctcccaggacctattggaaagaagctagagagagagattggtttccagatcaaggatacagaggtcgaggccgaggtgaatattactccagaggtcgaagctatagaggttcttatggagggcgtggcaggggtggtaggggacacactcgagattatcctcagtatagagacaataagccaagagcagagcatataccctcagggcctctcagacagcgagaagaaagtgaaacacggagtgagagctctgattttgaagttgtccccaaaagaagacgacagcggggttcagagactgacacagacagtgaaattcatgaaagtgcaagtgacaaggacagtttaagtaaaggcaaacttcccaaaagagaggaacggcctgaaaacaaaaaacctgtaaagcctcattcttctttcaagcctgataatcatgttcgaatagataatagactgctagaaaagccttatgtaagggatgacgataaagctaaaccaggctttcttcctaaaggagagcctacaaggagaggcagagggggaacattcaggcgtggtggaagggatcctggaggccgtccatcacgcccttccactttacgaagaccagcttatcgggacaatcagtggaacccaaggcagtcagaagttcctaaaccagaagatggagagccgccaagaagacatgagcagtttattcctatagcagcagataaacgacctccaaaatttgagcgaaaatttgacccagctagagaaaggcctcgaaggcagcgtcctactcgaccaccaaggcaagacaagccacctcgatttagacggctaagagagagggaggctgcttcaaaatcaaatgaggtggtagcagtgcccacaaatggcacagttaataatgtggctcaagaaccagttaatactcttggggatatttccgggaataagacaccagatttatctaatcagaactcttcagatcaggcaaatgaagaatgggaaacagcttctgaaagcagtgatttcaatgagaggcgagagagggatgaaaaaaaaaatgctgacttgaatgcacaaacagttgtaaaggttggagagaatgttctacctccaaagagggaaattgcaaagagaagtttttctagtcagagaccagtagatcgtcagaatcgacgtggcaacaatggtccacccaaatcaggaaggaatttctcaggtcctagaaatgaaaggagaagtggcccaccatcaaaaagtgggaagagagggccatttgatgaccagcctgcaggcacaactggggttgacctcatcaatggcagctctgcacaccatcaggaaggagtacctaatggtacaggacaaaagaactccaaagattctactgggaaaaaaagagaagaccccaaaccaggccctaaaaaaccaaaagagaaagtggatgctctatcacagtttgatctcaacaattatgcaagtgttgttataattgatgatcatcctgaagtaacagtaattgaagatccccagtcaaatttgaatgatgatggttttactgaagtggtatccaaaaaacaacaaaaacgtttacaggatgaagaacgccgaaagaaggaagaacaagtcatacaggtctggaacaaaaagaatgcaaatgaaaaaggaagaagccagacttctaagcttcctccaagatttgccaaaaaacaggctacagggatccagcaagcacagtcttcagcctcagttccacctctagcttcggctccacttccaccttcaacctcagcttcagttccagcctcaacctcagctccacttccggcaaccttaactccagttccagcctcaacctcagctccggttccagcctcaactttagctccagttctggcctcaacctcagctccagttccagcctcacccttagctccagtttcagcctcagcctcagtctcagcttcagttccagcctctacttcagctgcagctataacctcttcttcagctccagcctcagccccagctccaacccccatccttgcctcagtttcaaccccagcttctgtcaccattcttgcctcagcctcaattcccattcttgcttcagccctagcatcaacttcagctccaacgccagccccagcagcctcttccccagctgccccagtcatcacagcaccaactatcccagcctcagccccaactgcctcagtcccacttgcccctgcctcagcttcagccccagccccagcccctaccccagtctcagccccaaatcctgccccacctgccccagcccagactcaggcacagacccacaaaccagtccagaatccactacagactacatctcagtcttcaaaacaaccaccaccatcaattaggctgccttcagctcaaacacctaatggcacagattatgtagcctcaggaaaatccatccagaccccacagtcacatggcactctgacagctgaattatgggataacaaggtggccccaccagctgtgctgaatgatatctctaagaaattaggtcccattagtccaccacagccaccttcagtcagtgcatggaataagcccttaacatcgtttggatcagctccttcatcagagggagcgaagaatggtcaagaaagtggactcgaaattggaactgacacaattcagtttggtgctccagcctcaaatggaaatgaaaatgaagttgttcctgtgctttcggaaaaatctgctgacaaaatacctgaacctaaagaacagcggcagaagcagccacgagcaggacctatcaaagcccagaagcttccagatttgagtccagtagaaaacaaagaacacaaacctggtcccattggaaaggaacgttcattaaaaaatagaaaagtaaaagatgcccaacaggtggagccagaaggacaagagaaaccaagcccagctacagtcagaagcacagatcctgtcacgacaaaggagactaaagcagtctcagaaatgtctactgaaataggaacaatgatctcggtatcatctgcagaatatggtactaatgcaaaggagtctgtaacagactatactacaccctcttcttctttgcctaacaccgtggctactaataatacaaagatggaggatactttggttaataatgtgcccctgcccaacacccttcccctccctaagagggagactatacaacagagctccagcctaacttcagttcctcccactactttcagcctcaccttcaagatggagtctgcacgcaaagcatgggagaattctccaaatgtaagggaaaaggggtctccagtaacttccacagcacctccaattgcaactggagtcagcagtagtgccagtggaccaagcactgctaattacaattcgttctcaagtgcatccatgccccagattcctgttgcttcagtcactcctacagcatcactatcaggagctggtacatacactacctcttctttgagcacaaaatctacaaccacatcggaccctccaaatatttgtaaagtgaaacctcagcagttacagacaagcagcctgccttctgcaagtcatttttcacagttaagctgtatgccttcccttattgcccagcagcaacagaatccgcaagtttatgtgtctcagtctgcagcagctcaaatcccagccttctatatggacacaagtcatttattcaatacccaacatgcacgattggctccgccatccttggctcaacaacagggtttccaaccaggtctctctcagccaacttcagttcagcagattccaatccctatttatgcaccactgcaagggcagcatcaagcccaactgagtttgggggctggccctgctgtttcccaggctcaggaattgttcagctcctcacttcaaccatatagatctcagccagcttttatgcaaagcagtttatcccagccatctgtggtcctttctggtactgctattcacaactttccaactgtccaacaccaagaacttgccaaggcacaatccggtcttgcctttcagcaaacatcaaatactcagcccattcctatattgtatgaacatcaactggggcaggcatcaggactaggaggttcccagctgattgacacacatcttctccaggccagagcaaatcttacccaggcctcaaatctttattctggacaagtacaacagcctggtcagacaaatttttataacactgcccagtcaccaagtgctctccagcaggttacagtacctttaccagcatcgcagctttccttgcctaattttggatctacagggcaacctctaattgctttgcctcagactcttcagcccccattacagcataccactccccaagcacaggctcagagtctgagtcgtcctgcacaagtaagccagcctttcagaggattaattcctgctggaacacagcatagcatgattgcaaccacaggaaaaatgtctgaaatggaactaaaagcctttggaagtggcattgatataaaaccaggcacacctccaatcgctggtagaagcaccacaccaacatctagtcccttccgggctacttctacaagtccgaacagccagtccagcaaaatgaacagcattgtctaccagaagcagttccagtcagcccctgccactgtgagaatgacacaaccatttcctacacagtttgcaccccagattctctcccagcctaacctggtccctccattggtaagagccccacatactaacaccttcccagcgcctgttcagaggccaccaatggcactggccagtcagatgcctcctccgctgaccacaggcctcatgagccatgctcgtttgccacatgtagccaggggtccttgtggatcactatctggagtcagaggtaatcaggcccaggctgcgttgaaggctgaacaagacatgaaggcaaagcagagagcagaggttcttcagtccacgcaacggttcttctctgaacagcaacagagcaaacagataggaggaggcaaagcccagaaagtggacagtgattcaagtaaacctcctgaaacactgaccgaccctcctggggtctgtcaggaaaaagtagaagaaaagccaccccctgcaccctccatagccaccaaacctgttagaactggaccaatcaaacctcaggcgatcaaaaccgaagaaacaaaatcttaa

SEQ ID NO: 184950 - DNA, 8540 bp, Artificial Sequence
  derived and/or modified sequence
cgtaggggctggctagccgccatcttgcttctttttctcgctcgctcgctccccctcggaaagctgcgaaagtgctttggcggtttgtccatccgcagcttcggcttttccagtctggtggcccttccggccacccctttaaccccagctttccctcccccttctttcgatcagagatcggcggagaccctcgaagtgcgcaaacttgacactcaccctgaccggactggggttttaaggggtgtggcaggaggttttggactcgatgagtttccaccgaaatgtcggagaagtcaggccagagcacaaaagcaaaggatgggaaaaagtatgcaacactcagtttatttaatacttacaaggggaaatcattagaaacacagaaaaccacagctcgacatggattacagagtcttggaaaagtcggtatttcacggcgtatgcctccacctgctaacctcccaagtcttaaagcagaaaacaaaggcaatgatcctaatgtaaacattgtacctaaagatggcacagggtgggcatcaaaacaagagcaacatgaagaagaaaaaacaccagaagtgccaccagcacagccaaaacctggggttgcagctcccccagaagtagcacctgctcccaaatcatgggccagtaacaagcaaggtgggcaaggagatggaatccaagtgaatagtcagtttcagcaagaatttcccagcctgcaggcagctggggatcaggaaaaaaaagaaaaggaaacaaatgatgacaactatggacctggacccagtttacgtccaccaaatgttgcttgttggagagatggtggtaaggctgctggctcaccttcgtcatctgatcaagatgaaaagctccctggccaggatgaaagcacagctggaacatcagagcaaaatgatatcctcaaagtggtggaaaagaggatagcttgtggtcctccacaggctaaactgaatggacagcaggctgctctcgcttcccagtatagagctatgatgcctccttatatgttccaacagtatccgaggatgacatatcctcctctacatggtcccatgagattcccaccttctttatctgaaacaaacaaaggccttcgaggaagaggcccacctccttcatgggcctctgagcctgaacgcccatccattcttagtgcatcagaactgaaggagcttgataaatttgataacctagatgctgaagctgatgaaggttgggcaggtgctcagatggaagtagattatacagagcaactgaatttcagtgatgatgatgaacaaggaagtaacagtcctaaagagaataacagtgaggatcaaggttcaaaagcctctgaaaacaacgaaaacaaaaaagaaacagatgaagtttccaacactaaatcatcttcccaaatacctgcccaaccatcagtagcaaaagttccctatgggaaaggaccttcatttaatcaggaacgtggaacatcttcacatctgccaccacctccaaagttgcttgcacagcagcatccacctccagatcgacaggcagtacctggaagaccaggcccctttccctccaagcagcaagtagctgatgaagatgaaatatggaagcaaagacgaagacaacaatcagaaatttctgcagcagtagaacgtgctcgtaaacggcgtgaagaggaagagcgaagaatggaagaacaaaggaaggcagcttgtgcggagaaactgaaacgattggatgagaagcttggcatcctggaaaaacaaccatctccagaggaaattagggaaagggagcgagaaaaagaacgggagcgtgagaaagaacttgaaaaagaacaagaacaggagcgagagaaggagagggaaaaagacagagagagacagcaggaaaaggagaaagagctggagaaggagcaggaaaaacaaagagaaatggagaaagaaagaaagcaagaaaaagaaaaagaactagaacggcagaaagaaaaggaaaaagaactacaaaagatgaaagaacaagaaaaggaatgtgagctggagaaggaaagggaaaaattagaggagaaaattgaacccagagaacctaatttagagcccatggtagaaaaacaagaaagtgaaaacagctgtaataaagaggaggaacccgttttcactagacaagacagcaatcgcagtgaaaaggaagccacaccagtggtgcatgaaacagaaccagaatcagggtctcaacctcggccggctgtattatctggctatttcaaacagtttcagaagtctttacctccacgattccagcggcagcaggaacagatgaaacagcagcagtggcagcagcagcaacagcaaggtgtacttccacagactgttccttcacaaccgtccagtagtactgtccctcctccaccacacagacctctttatcagcctatgcagcctcatcctcagcatttggcttctatgggttttgatccaaggtggctcatgatgcagtcctacatggatcctcgaatgatgtcaggaagacctgctatggatattccacccattcatcctggaatgattcctcctaaaccattaatgagaagagaccagatggaagggtcaccgaacagttctgagtcatttgagcatatagctcgatctgcaagagatcacgcaatttccctttctgagcctcgtatgctgtgggggtcagatccctatcctcatgctgagcctcaacaagcaactactcccaaagcaacagaagagcctgaggatgtaaggtctgaagctgcgttggaccaggaacagattactgctgcttattctgtagaacataatcaattagaggctcacccaaaggcagactttatcagagaatcaagtgaggcacaagtacaaaagtttttaagcagatctgtggaagatgttagacctcaccatactgatgcaaataatcagtctgcttgttttgaagcacctgatcaaaagaccttatccgctcctcaagaggagcggatttcagctgtagaaagtcagccttcccggaaaagaagtgtttcccatggatctaaccatacgcaaaaaccagacgagcagagaagtgaaccatctgcaggcattcctaaagtaaccagcagatgcattgattcaaaagaaccaatagaaaggccagaggagaaaccaaaaaaggaaggctttatacgatcttctgaaggaccaaaacctgaaaaagtatataaatctaaatcagaaactcgttggggcccacgaccaagctctaacagaagggaagaagttaatgatagacctgtgagaagatcaggtcccattaaaaaacctgtacttagagatatgaaagaggaacgggaacagaggaaggagaaagaaggagaaaaggccgaaaaggtcactgaaaaagtagttgtaaagcctgaaaagacggaaaagaaggatcttcctcctcccccaccaccacctcagccaccagcaccaattcagccacagtcagttccaccaccaattcaaccagaagcagagaaatttccttcaacagaaactgcaactttggctcaaaaaccatctcaggatactgagaagcctctggaacctgtgagtactgttcaggtagagcctgcagttaagactgtaaaccaacagactatggcagcaccagtagtcaaagaagaaaaacaacctgagaaagtcatcagcaaagaccttgttatagagaggcctcgaccagattcaagaccagcagttaaaaaagaatcaactttgcctcccaggacctattggaaagaagctagagagagagattggtttccagatcaaggatacagaggtcgaggccgaggtgaatattactccagaggtcgaagctatagaggttcttatggagggcgtggcaggggtggtaggggacacactcgagattatcctcagtatagagacaataagccaagagcagagcatataccctcagggcctctcagacagcgagaagaaagtgaaacacggagtgagagctctgattttgaagttgtccccaaaagaagacgacagcggggttcagagactgacacagacagtgaaattcatgaaagtgcaagtgacaaggacagtttaagtaaaggcaaacttcccaaaagagaggaacggcctgaaaacaaaaaacctgtaaagcctcattcttctttcaagcctgataatcatgttcgaatagataatagactgctagaaaagccttatgtaagggatgacgataaagctaaaccaggctttcttcctaaaggagagcctacaaggagaggcagagggggaacattcaggcgtggtggaagggatcctggaggccgtccatcacgcccttccactttacgaagaccagcttatcgggacaatcagtggaacccaaggcagtcagaagttcctaaaccagaagatggagagccgccaagaagacatgagcagtttattcctatagcagcagataaacgacctccaaaatttgagcgaaaatttgacccagctagagaaaggcctcgaaggcagcgtcctactcgaccaccaaggcaagacaagccacctcgatttagacggctaagagagagggaggctgcttcaaaatcaaatgaggtggtagcagtgcccacaaatggcacagttaataatgtggctcaagaaccagttaatactcttggggatatttccgggaataagacaccagatttatctaatcagaactcttcagatcaggcaaatgaagaatgggaaacagcttctgaaagcagtgatttcaatgagaggcgagagagggatgaaaaaaaaaatgctgacttgaatgcacaaacagttgtaaaggttggagagaatgttctacctccaaagagggaaattgcaaagagaagtttttctagtcagagaccagtagatcgtcagaatcgacgtggcaacaatggtccacccaaatcaggaaggaatttctcaggtcctagaaatgaaaggagaagtggcccaccatcaaaaagtgggaagagagggccatttgatgaccagcctgcaggcacaactggggttgacctcatcaatggcagctctgcacaccatcaggaaggagtacctaatggtacaggacaaaagaactccaaagattctactgggaaaaaaagagaagaccccaaaccaggccctaaaaaaccaaaagagaaagtggatgctctatcacagtttgatctcaacaattatgcaagtgttgttataattgatgatcatcctgaagtaacagtaattgaagatccccagtcaaatttgaatgatgatggttttactgaagtggtatccaaaaaacaacaaaaacgtttacaggatgaagaacgccgaaagaaggaagaacaagtcatacaggtctggaacaaaaagaatgcaaatgaaaaaggaagaagccagacttctaagcttcctccaagatttgccaaaaaacaggctacagggatccagcaagcacagtcttcagcctcagttccacctctagcttcggctccacttccaccttcaacctcagcttcagttccagcctcaacctcagctccacttccggcaaccttaactccagttccagcctcaacctcagctccggttccagcctcaactttagctccagttctggcctcaacctcagctccagttccagcctcacccttagctccagtttcagcctcagcctcagtctcagcttcagttccagcctctacttcagctgcagctataacctcttcttcagctccagcctcagccccagctccaacccccatccttgcctcagtttcaaccccagcttctgtcaccattcttgcctcagcctcaattcccattcttgcttcagccctagcatcaacttcagctccaacgccagccccagcagcctcttccccagctgccccagtcatcacagcaccaactatcccagcctcagccccaactgcctcagtcccacttgcccctgcctcagcttcagccccagccccagcccctaccccagtctcagccccaaatcctgccccacctgccccagcccagactcaggcacagacccacaaaccagtccagaatccactacagactacatctcagtcttcaaaacaaccaccaccatcaattaggctgccttcagctcaaacacctaatggcacagattatgtagcctcaggaaaatccatccagaccccacagtcacatggcactctgacagctgaattatgggataacaaggtggccccaccagctgtgctgaatgatatctctaagaaattaggtcccattagtccaccacagccaccttcagtcagtgcatggaataagcccttaacatcgtttggatcagctccttcatcagagggagcgaagaatggtcaagaaagtggactcgaaattggaactgacacaattcagtttggtgctccagcctcaaatggaaatgaaaatgaagttgttcctgtgctttcggaaaaatctgctgacaaaatacctgaacctaaagaacagcggcagaagcagccacgagcaggacctatcaaagcccagaagcttccagatttgagtccagtagaaaacaaagaacacaaacctggtcccattggaaaggaacgttcattaaaaaatagaaaagtaaaagatgcccaacaggtggagccagaaggacaagagaaaccaagcccagctacagtcagaagcacagatcctgtcacgacaaaggagactaaagcagtctcagaaatgtctactgaaataggaacaatgatctcggtatcatctgcagaatatggtactaatgcaaagatggagtctgcacgcaaagcatgggagaattctccaaatgtaagggaaaaggggtctccagtaacttccacagcacctccaattgcaactggagtcagcagtagtgccagtggaccaagcactgctaattacaattcgttctcaagtgcatccatgccccagattcctgttgcttcagtcactcctacagcatcactatcaggagctggtacatacactacctcttctttgagcacaaaatctacaaccacatcggaccctccaaatatttgtaaagtgaaacctcagcagttacagacaagcagcctgccttctgcaagtcatttttcacagttaagctgtatgccttcccttattgcccagcagcaacagaatccgcaagtttatgtgtctcagtctgcagcagctcaaatcccagccttctatatggacacaagtcatttattcaatacccaacatgcacgattggctccgccatccttggctcaacaacagggtttccaaccaggtctctctcagccaacttcagttcagcagattccaatccctatttatgcaccactgcaagggcagcatcaagcccaactgagtttgggggctggccctgctgtttcccaggctcaggaattgttcagctcctcacttcaaccatatagatctcagccagcttttatgcaaagcagtttatcccagccatctgtggtcctttctggtactgctattcacaactttccaactgtccaacaccaagaacttgccaaggcacaatccggtcttgcctttcagcaaacatcaaatactcagcccattcctatattgtatgaacatcaactggggcaggcatcaggactaggaggttcccagctgattgacacacatcttctccaggccagagcaaatcttacccaggcctcaaatctttattctggacaagtacaacagcctggtcagacaaatttttataacactgcccagtcaccaagtgctctccagcaggttacagtacctttaccagcatcgcagctttccttgcctaattttggatctacagggcaacctctaattgctttgcctcagactcttcagcccccattacagcataccactccccaagcacaggctcagagtctgagtcgtcctgcacaagtaagccagcctttcagaggattaattcctgctggaacacagcatagcatgattgcaaccacaggaaaaatgtctgaaatggaactaaaagcctttggaagtggcattgatataaaaccaggcacacctccaatcgctggtagaagcaccacaccaacatctagtcccttccgggctacttctacaagtccgaacagccagtccagcaaaatgaacagcattgtctaccagaagcagttccagtcagcccctgccactgtgagaatgacacaaccatttcctacacagtttgcaccccaggcaaagcagagagcagaggttcttcagtccacgcaacggttcttctctgaacagcaacagagcaaacagataggaggaggcaaagcccagaaagtggacagtgattcaagtaaacctcctgaaacactgaccgaccctcctggggtctgtcaggaaaaagtagaagaaaagccaccccctgcaccctccatagccaccaaacctgttagaactggaccaatcaaacctcaggcgatcaaaaccgaagaaacaaaatcttaa

SEQ ID NO: 184951 - DNA, 8834 bp, Artificial Sequence
  derived and/or modified sequence
cgtaggggctggctagccgccatcttgcttctttttctcgctcgctcgctccccctcggaaagctgcgaaagtgctttggcggtttgtccatccgcagcttcggcttttccagtctggtggcccttccggccacccctttaaccccagctttccctcccccttctttcgatcagagatcggcggagaccctcgaagtgcgcaaacttgacactcaccctgaccggactggggttttaaggggtgtggcaggaggttttggactcgatgagtttccaccgaaatgtcggagaagtcaggccagagcacaaaagcaaaggatgggaaaaagtatgcaacactcagtttatttaatacttacaaggggaaatcattagaaacacagaaaaccacagctcgacatggattacagagtcttggaaaagtcggtatttcacggcgtatgcctccacctgctaacctcccaagtcttaaagcagaaaacaaaggcaatgatcctaatgtaaacattgtacctaaagatggcacagggtgggcatcaaaacaagagcaacatgaagaagaaaaaacaccagaagtgccaccagcacagccaaaacctggggttgcagctcccccagaagtagcacctgctcccaaatcatgggccagtaacaagcaaggtgggcaaggagatggaatccaagtgaatagtcagtttcagcaagaatttcccagcctgcaggcagctggggatcaggaaaaaaaagaaaaggaaacaaatgatgacaactatggacctggacccagtttacgtccaccaaatgttgcttgttggagagatggtggtaaggctgctggctcaccttcgtcatctgatcaagatgaaaagctccctggccaggatgaaagcacagctggaacatcagagcaaaatgatatcctcaaagtggtggaaaagaggatagcttgtggtcctccacaggctaaactgaatggacagcaggctgctctcgcttcccagtatagagctatgatgcctccttatatgttccaacagtatccgaggatgacatatcctcctctacatggtcccatgagattcccaccttctttatctgaaacaaacaaaggccttcgaggaagaggcccacctccttcatgggcctctgagcctgaacgcccatccattcttagtgcatcagaactgaaggagcttgataaatttgataacctagatgctgaagctgatgaaggttgggcaggtgctcagatggaagtagattatacagagcaactgaatttcagtgatgatgatgaacaaggaagtaacagtcctaaagagaataacagtgaggatcaaggttcaaaagcctctgaaaacaacgaaaacaaaaaagaaacagatgaagtttccaacactaaatcatcttcccaaatacctgcccaaccatcagtagcaaaagttccctatgggaaaggaccttcatttaatcaggaacgtggaacatcttcacatctgccaccacctccaaagttgcttgcacagcagcatccacctccagatcgacaggcagtacctggaagaccaggcccctttccctccaagcagcaagtagctgatgaagatgaaatatggaagcaaagacgaagacaacaatcagaaatttctgcagcagtagaacgtgctcgtaaacggcgtgaagaggaagagcgaagaatggaagaacaaaggaaggcagcttgtgcggagaaactgaaacgattggatgagaagcttggcatcctggaaaaacaaccatctccagaggaaattagggaaagggagcgagaaaaagaacgggagcgtgagaaagaacttgaaaaagaacaagaacaggagcgagagaaggagagggaaaaagacagagagagacagcaggaaaaggagaaagagctggagaaggagcaggaaaaacaaagagaaatggagaaagaaagaaagcaagaaaaagaaaaagaactagaacggcagaaagaaaaggaaaaagaactacaaaagatgaaagaacaagaaaaggaatgtgagctggagaaggaaagggaaaaattagaggagaaaattgaacccagagaacctaatttagagcccatggtagaaaaacaagaaagtgaaaacagctgtaataaagcagaggaggaacccgttttcactagacaagacagcaatcgcagtgaaaaggaagccacaccagtggtgcatgaaacagaaccagaatcagggtctcaacctcggccggctgtattatctggctatttcaaacagtttcagaagtctttacctccacgattccagcggcagcaggaacagatgaaacagcagcagtggcagcagcagcaacagcaaggtgtacttccacagactgttccttcacaaccgtccagtagtactgtccctcctccaccacacagacctctttatcagcctatgcagcctcatcctcagcatttggcttctatgggttttgatccaaggtggctcatgatgcagtcctacatggatcctcgaatgatgtcaggaagacctgctatggatattccacccattcatcctggaatgattcctcctaaaccattaatgagaagagaccagatggaagggtcaccgaacagttctgagtcatttgagcatatagctcgatctgcaagagatcacgcaatttccctttctgagcctcgtatgctgtgggggtcagatccctatcctcatgctgagcctcaacaagcaactactcccaaagcaacagaagagcctgaggatgtaaggtctgaagctgcgttggaccaggaacagattactgctgcttattctgtagaacataatcaattagaggctcacccaaaggcagactttatcagagaatcaagtgaggcacaagtacaaaagtttttaagcagatctgtggaagatgttagacctcaccatactgatgcaaataatcagtctgcttgttttgaagcacctgatcaaaagaccttatccgctcctcaagaggagcggatttcagctgtagaaagtcagccttcccggaaaagaagtgtttcccatggatctaaccatacgcaaaaaccagacgagcagagaagtgaaccatctgcaggcattcctaaagtaaccagcagatgcattgattcaaaagaaccaatagaaaggccagaggagaaaccaaaaaaggaaggctttatacgatcttctgaaggaccaaaacctgaaaaagtatataaatctaaatcagaaactcgttggggcccacgaccaagctctaacagaagggaagaagttaatgatagacctgtgagaagatcaggtcccattaaaaaacctgtacttagagatatgaaagaggaacgggaacagaggaaggagaaagaaggagaaaaggccgaaaaggtcactgaaaaagtagttgtaaagcctgaaaagacggaaaagaaggatcttcctcctcccccaccaccacctcagccaccagcaccaattcagccacagtcagttccaccaccaattcaaccagaagcagagaaatttccttcaacagaaactgcaactttggctcaaaaaccatctcaggatactgagaagcctctggaacctgtgagtactgttcaggtagagcctgcagttaagactgtaaaccaacagactatggcagcaccagtagtcaaagaagaaaaacaacctgagaaagtcatcagcaaagaccttgttatagagaggcctcgaccagattcaagaccagcagttaaaaaagaatcaactttgcctcccaggacctattggaaagaagctagagagagagattggtttccagatcaaggatacagaggtcgaggccgaggtgaatattactccagaggtcgaagctatagaggttcttatggagggcgtggcaggggtggtaggggacacactcgagattatcctcagtatagagacaataagccaagagcagagcatataccctcagggcctctcagacagcgagaagaaagtgaaacacggagtgagagctctgattttgaagttgtccccaaaagaagacgacagcggggttcagagactgacacagacagtgaaattcatgaaagtgcaagtgacaaggacagtttaagtaaaggcaaacttcccaaaagagaggaacggcctgaaaacaaaaaacctgtaaagcctcattcttctttcaagcctgataatcatgttcgaatagataatagactgctagaaaagccttatgtaagggatgacgataaagctaaaccaggctttcttcctaaaggagagcctacaaggagaggcagagggggaacattcaggcgtggtggaagggatcctggaggccgtccatcacgcccttccactttacgaagaccagcttatcgggacaatcagtggaacccaaggcagtcagaagttcctaaaccagaagatggagagccgccaagaagacatgagcagtttattcctatagcagcagataaacgacctccaaaatttgagcgaaaatttgacccagctagagaaaggcctcgaaggcagcgtcctactcgaccaccaaggcaagacaagccacctcgatttagacggctaagagagagggaggctgcttcaaaatcaaatgaggtggtagcagtgcccacaaatggcacagttaataatgtggctcaagaaccagttaatactcttggggatatttccgggaataagacaccagatttatctaatcagaactcttcagatcaggcaaatgaagaatgggaaacagcttctgaaagcagtgatttcaatgagaggcgagagagggatgaaaaaaaaaatgctgacttgaatgcacaaacagttgtaaaggttggagagaatgttctacctccaaagagggaaattgcaaagagaagtttttctagtcagagaccagtagatcgtcagaatcgacgtggcaacaatggtccacccaaatcaggaaggaatttctcaggtcctagaaatgaaaggagaagtggcccaccatcaaaaagtgggaagagagggccatttgatgaccagcctgcaggcacaactggggttgacctcatcaatggcagctctgcacaccatcaggaaggagtacctaatggtacaggacaaaagaactccaaagattctactgggaaaaaaagagaagaccccaaaccaggccctaaaaaaccaaaagagaaagtggatgctctatcacagtttgatctcaacaattatgcaagtgttgttataattgatgatcatcctgaagtaacagtaattgaagatccccagtcaaatttgaatgatgatggttttactgaagtggtatccaaaaaacaacaaaaacgtttacaggatgaagaacgccgaaagaaggaagaacaagtcatacaggtctggaacaaaaagaatgcaaatgaaaaaggaagaagccagacttctaagcttcctccaagatttgccaaaaaacaggctacagggatccagcaagcacagtcttcagcctcagttccacctctagcttcggctccacttccaccttcaaccttagctccagtttcagcctcagcctcagtctcagcttcagttccagcctctacttcagctgcagctataacctcttcttcagctccagcctcagccccagctccaacccccatccttgcctcagtttcaaccccagcttctgtcaccattcttgcctcagcctcaattcccattcttgcttcagccctagcatcaacttcagctccaacgccagccccagcagcctcttccccagctgccccagtcatcacagcaccaactatcccagcctcagccccaactgcctcagtcccacttgcccctgcctcagcttcagccccagccccagcccctaccccagtctcagccccaaatcctgccccacctgccccagcccagactcaggcacagacccacaaaccagtccagaatccactacagactacatctcagtcttcaaaacaaccaccaccatcaattaggctgccttcagctcaaacacctaatggcacagattatgtagcctcaggaaaatccatccagaccccacagtcacatggcactctgacagctgaattatgggataacaaggtggccccaccagctgtgctgaatgatatctctaagaaattaggtcccattagtccaccacagccaccttcagtcagtgcatggaataagcccttaacatcgtttggatcagctccttcatcagagggagcgaagaatggtcaagaaagtggactcgaaattggaactgacacaattcagtttggtgctccagcctcaaatggaaatgaaaatgaagttgttcctgtgctttcggaaaaatctgctgacaaaatacctgaacctaaagaacagcggcagaagcagccacgagcaggacctatcaaagcccagaagcttccagatttgagtccagtagaaaacaaagaacacaaacctggtcccattggaaaggaacgttcattaaaaaatagaaaagtaaaagatgcccaacaggtggagccagaaggacaagagaaaccaagcccagctacagtcagaagcacagatcctgtcacgacaaaggagactaaagcagtctcagaaatgtctactgaaataggaacaatgatctcggtatcatctgcagaatatggtactaatgcaaaggagtctgtaacagactatactacaccctcttcttctttgcctaacaccgtggctactaataatacaaagatggaggatactttggttaataatgtgcccctgcccaacacccttcccctccctaagagggagactatacaacagagctccagcctaacttcagttcctcccactactttcagcctcaccttcaagatggagtctgcacgcaaagcatgggagaattctccaaatgtaagggaaaaggggtctccagtaacttccacagcacctccaattgcaactggagtcagcagtagtgccagtggaccaagcactgctaattacaattcgttctcaagtgcatccatgccccagattcctgttgcttcagtcactcctacagcatcactatcaggagctggtacatacactacctcttctttgagcacaaaatctacaaccacatcggaccctccaaatatttgtaaagtgaaacctcagcagttacagacaagcagcctgccttctgcaagtcatttttcacagttaagctgtatgccttcccttattgcccagcagcaacagaatccgcaagtttatgtgtctcagtctgcagcagctcaaatcccagccttctatatggacacaagtcatttattcaatacccaacatgcacgattggctccgccatccttggctcaacaacagggtttccaaccaggtctctctcagccaacttcagttcagcagattccaatccctatttatgcaccactgcaagggcagcatcaagcccaactgagtttgggggctggccctgctgtttcccaggctcaggaattgttcagctcctcacttcaaccatatagatctcagccagcttttatgcaaagcagtttatcccagccatctgtggtcctttctggtactgctattcacaactttccaactgtccaacaccaagaacttgccaaggcacaatccggtcttgcctttcagcaaacatcaaatactcagcccattcctatattgtatgaacatcaactggggcaggcatcaggactaggaggttcccagctgattgacacacatcttctccaggccagagcaaatcttacccaggcctcaaatctttattctggacaagtacaacagcctggtcagacaaatttttataacactgcccagtcaccaagtgctctccagcaggttacagtacctttaccagcatcgcagctttccttgcctaattttggatctacagggcaacctctaattgctttgcctcagactcttcagcccccattacagcataccactccccaagcacaggctcagagtctgagtcgtcctgcacaagtaagccagcctttcagaggattaattcctgctggaacacagcatagcatgattgcaaccacaggaaaaatgtctgaaatggaactaaaagcctttggaagtggcattgatataaaaccaggcacacctccaatcgctggtagaagcaccacaccaacatctagtcccttccgggctacttctacaagtccgaacagccagtccagcaaaatgaacagcattgtctaccagaagcagttccagtcagcccctgccactgtgagaatgacacaaccatttcctacacagtttgcaccccagattctctcccagcctaacctggtccctccattggtaagagccccacatactaacaccttcccagcgcctgttcagaggccaccaatggcactggccagtcagatgcctcctccgctgaccacaggcctcatgagccatgctcgtttgccacatgtagccaggggtccttgtggatcactatctggagtcagaggtaatcaggcccaggctgcgttgaaggctgaacaagacatgaaggcaaagcagagagcagaggttcttcagtccacgcaacggttcttctctgaacagcaacagagcaaacagataggaggaggcaaagcccagaaagtggacagtgattcaagtaaacctcctgaaacactgaccgaccctcctggggtctgtcaggaaaaagtagaagaaaagccaccccctgcaccctccatagccaccaaacctgttagaactggaccaatcaaacctcaggcgatcaaaaccgaagaaacaaaatcttaa

SEQ ID NO: 184952 - protein, 1168 aa, Artificial Sequence
  derived and/or modified sequence
MEPITFTARKHLLSNEVSVDFGLQLVGSLPVHSLTTMPMLPWVVAEVRRLSRQSTRKEPVTKQVRLCVSPSGLRCEPEPGRSQQWDPLIYSSIFECKPQRVHKLIHNSHDPSYFACLIKEDAVHRQSICYVFKADDQTKVPEIISSIRQAGKIARQEELHCPSEFDDTFSKKFEVLFCGRVTVAHKKAPPALIDECIEKFNHVSGSRGSESPRPNPPHAAPTGSQEPVRRPMRKSFSQPGLRSLAFRKELQDGGLRSSGFFSSFEESDIENHLISGHNIVQPTDIEENRTMLFTIGQSEVYLISPDTKKIALEKNFKEISFCSQGIRHVDHFGFICRESSGGGGFHFVCYVFQCTNEALVDEIMMTLKQAFTVAAVQQTAKAPAQLCEGCPLQSLHKLCERIEGMNSSKTKLELQKHLTTLTNQEQATIFEEVQKLRPRNEQRENELIISFLRCLYEEKQKEHIHIGEMKQTSQMAAENIGSELPPSATRFRLDMLKNKAKRSLTESLESILSRGNKARGLQEHSISVDLDSSLSSTLSNTSKEPSVCEKEALPISESSFKLLGSSEDLSSDSESHLPEEPAPLSPQQAFRRRANTLSHFPIECQEPPQPARGSPGVSQRKLMRYHSVSTETPHERKDFESKANHLGDSGGTPVKTRRHSWRQQIFLRVATPQKACDSSSRYEDYSELGELPPRSPLEPVCEDGPFGPPPEEKKRTSRELRELWQKAILQQILLLRMEKENQKLQASENDLLNKRLKLDYEEITPCLKEVTTVWEKMLSTPGRSKIKFDMEKMHSAVGQGVPRHHRGEIWKFLAEQFHLKHQFPSKQQPKDVPYKELLKQLTSQQHAILIDLGRTFPTHPYFSAQLGAGQLSLYNILKAYSLLDQEVGYCQGLSFVAGILLLHMSEEEAFKMLKFLMFDMGLRKQYRPDMIILQIQMYQLSRLLHDYHRDLYNHLEEHEIGPSLYAAPWFLTMFASQFPLGFVARVFDMIFLQGTEVIFKVALSLLGSHKPLILQHENLETIVDFIKSTLPNLGLVQMEKTINQVFEMDIAKQLQAYEVEYHVLQEELIDSSPLSDNQRMDKLEKTNSSLRKQNLDLLEQLQVANGRIQSLEATIEKLLSSESKLKQAMLTLELERSALLQTVEELRRRSAEPSDREPECTQPEPTGD

SEQ ID NO: 184953 - DNA, 3507 bp, Artificial Sequence
  derived and/or modified sequence
atggagcccatcaccttcaccgccagaaagcacctgctgagcaacgaggtgagcgtggacttcggcctgcagctggtgggcagcctgcccgtgcacagcctgaccaccatgcccatgctgccctgggtggtggccgaggtgagaagactgagcagacagagcaccagaaaggagcccgtgaccaagcaggtgagactgtgcgtgagccccagcggcctgagatgcgagcccgagcccggcagaagccagcagtgggaccccctgatctacagcagcatcttcgagtgcaagccccagagagtgcacaagctgatccacaacagccacgaccccagctacttcgcctgcctgatcaaggaggacgccgtgcacagacagagcatctgctacgtgttcaaggccgacgaccagaccaaggtgcccgagatcatcagcagcatcagacaggccggcaagatcgccagacaggaggagctgcactgccccagcgagttcgacgacaccttcagcaagaagttcgaggtgctgttctgcggcagagtgaccgtggcccacaagaaggccccccccgccctgatcgacgagtgcatcgagaagttcaaccacgtgagcggcagcagaggcagcgagagccccagacccaaccccccccacgccgcccccaccggcagccaggagcccgtgagaagacccatgagaaagagcttcagccagcccggcctgagaagcctggccttcagaaaggagctgcaggacggcggcctgagaagcagcggcttcttcagcagcttcgaggagagcgacatcgagaaccacctgatcagcggccacaacatcgtgcagcccaccgacatcgaggagaacagaaccatgctgttcaccatcggccagagcgaggtgtacctgatcagccccgacaccaagaagatcgccctggagaagaacttcaaggagatcagcttctgcagccagggcatcagacacgtggaccacttcggcttcatctgcagagagagcagcggcggcggcggcttccacttcgtgtgctacgtgttccagtgcaccaacgaggccctggtggacgagatcatgatgaccctgaagcaggccttcaccgtggccgccgtgcagcagaccgccaaggcccccgcccagctgtgcgagggctgccccctgcagagcctgcacaagctgtgcgagagaatcgagggcatgaacagcagcaagaccaagctggagctgcagaagcacctgaccaccctgaccaaccaggagcaggccaccatcttcgaggaggtgcagaagctgagacccagaaacgagcagagagagaacgagctgatcatcagcttcctgagatgcctgtacgaggagaagcagaaggagcacatccacatcggcgagatgaagcagaccagccagatggccgccgagaacatcggcagcgagctgccccccagcgccaccagattcagactggacatgctgaagaacaaggccaagagaagcctgaccgagagcctggagagcatcctgagcagaggcaacaaggccagaggcctgcaggagcacagcatcagcgtggacctggacagcagcctgagcagcaccctgagcaacaccagcaaggagcccagcgtgtgcgagaaggaggccctgcccatcagcgagagcagcttcaagctgctgggcagcagcgaggacctgagcagcgacagcgagagccacctgcccgaggagcccgcccccctgagcccccagcaggccttcagaagaagagccaacaccctgagccacttccccatcgagtgccaggagcccccccagcccgccagaggcagccccggcgtgagccagagaaagctgatgagataccacagcgtgagcaccgagaccccccacgagagaaaggacttcgagagcaaggccaaccacctgggcgacagcggcggcacccccgtgaagaccagaagacacagctggagacagcagatcttcctgagagtggccaccccccagaaggcctgcgacagcagcagcagatacgaggactacagcgagctgggcgagctgccccccagaagccccctggagcccgtgtgcgaggacggccccttcggccccccccccgaggagaagaagagaaccagcagagagctgagagagctgtggcagaaggccatcctgcagcagatcctgctgctgagaatggagaaggagaaccagaagctgcaggccagcgagaacgacctgctgaacaagagactgaagctggactacgaggagatcaccccctgcctgaaggaggtgaccaccgtgtgggagaagatgctgagcacccccggcagaagcaagatcaagttcgacatggagaagatgcacagcgccgtgggccagggcgtgcccagacaccacagaggcgagatctggaagttcctggccgagcagttccacctgaagcaccagttccccagcaagcagcagcccaaggacgtgccctacaaggagctgctgaagcagctgaccagccagcagcacgccatcctgatcgacctgggcagaaccttccccacccacccctacttcagcgcccagctgggcgccggccagctgagcctgtacaacatcctgaaggcctacagcctgctggaccaggaggtgggctactgccagggcctgagcttcgtggccggcatcctgctgctgcacatgagcgaggaggaggccttcaagatgctgaagttcctgatgttcgacatgggcctgagaaagcagtacagacccgacatgatcatcctgcagatccagatgtaccagctgagcagactgctgcacgactaccacagagacctgtacaaccacctggaggagcacgagatcggccccagcctgtacgccgccccctggttcctgaccatgttcgccagccagttccccctgggcttcgtggccagagtgttcgacatgatcttcctgcagggcaccgaggtgatcttcaaggtggccctgagcctgctgggcagccacaagcccctgatcctgcagcacgagaacctggagaccatcgtggacttcatcaagagcaccctgcccaacctgggcctggtgcagatggagaagaccatcaaccaggtgttcgagatggacatcgccaagcagctgcaggcctacgaggtggagtaccacgtgctgcaggaggagctgatcgacagcagccccctgagcgacaaccagagaatggacaagctggagaagaccaacagcagcctgagaaagcagaacctggacctgctggagcagctgcaggtggccaacggcagaatccagagcctggaggccaccatcgagaagctgctgagcagcgagagcaagctgaagcaggccatgctgaccctggagctggagagaagcgccctgctgcagaccgtggaggagctgagaagaagaagcgccgagcccagcgacagagagcccgagtgcacccagcccgagcccaccggcgactag

SEQ ID NO: 184954 - DNA, 3507 bp, Artificial Sequence
  derived and/or modified sequence
atggagcctataacattcaccgcgaggaagcacctcctctccaacgaagtgagcgtggacttcggacttcaattggtgggcagtctgcccgttcactcgctcacaaccatgcccatgctcccttgggtcgtggccgaagtaagacgtttgagtaggcaatcaacacgtaaggaaccagtgacaaagcaggtcaggttatgcgtgagtccctccggcctgaggtgcgagcctgagcctggcagaagccaacaatgggaccctctgatatattcatcgatatttgagtgtaaacctcaaagagtgcataaactgatccacaactcccacgatccgagctacttcgcatgcctcattaaagaggatgccgtacaccgacaaagcatctgttacgtgttcaaggccgacgatcagactaaggttcctgagattataagcagtatccgccaggctggcaaaatcgcccgtcaggaagaactgcactgtccaagcgaatttgacgatacgttctcgaagaaatttgaggtgctcttctgtggcagggtcactgtggcccacaaaaaggctcctccagccctgatagacgagtgtatcgaaaaattcaatcatgtgtctggcagtagaggcagcgagagcccaaggcctaatccacctcacgcagcccccaccggatcccaagagcccgtaaggcgaccaatgaggaagagcttttcacaacccggtttacgttctctcgccttccgcaaggagttgcaggacgggggactgaggtcctcaggattcttttcctccttcgaggagtctgatatcgagaaccatctgatcagtggccacaatatcgtgcagcccaccgatattgaggagaacaggactatgttgtttacaattgggcaaagcgaagtttatctcatttccccggataccaagaaaattgctctggagaagaattttaaggaaatttcattttgctctcaaggcattcgtcatgtggaccattttggtttcatctgtcgggaatctagcggtgggggcggctttcattttgtgtgctacgtgtttcagtgcacgaacgaggcactggtggatgaaatcatgatgaccctgaagcaggccttcacagtcgctgctgtgcagcagaccgcaaaggcaccagcccagctatgcgagggctgtccgctgcagtctctgcataagttgtgcgaacgaattgaggggatgaattctagcaagactaagctcgaactgcagaaacacctgactaccttaacaaatcaagagcaggccactatcttcgaagaagtccagaagctcagacctcgtaatgagcagcgagaaaacgagctgataattagcttcctgagatgtttgtacgaggagaagcagaaggaacacatacacatcggcgaaatgaaacagacaagtcaaatggccgccgaaaatatcggcagcgaattgccaccctctgcgacaagatttcgtctggatatgctgaaaaacaaagccaaacgcagtctgacagagtccctcgagtccatcctgagcagaggaaataaagcccgtggtctgcaggaacatagcatatccgtcgatttggatagcagcctctcctcaaccctgtctaatacctctaaggagccatccgtatgtgagaaggaggccctaccaatttctgaaagctcatttaaactcctcggatcaagtgaggacctcagttcagatagcgaaagccacctgcccgaagagccagcccccctctcaccccagcaagcattccgccggcgcgccaatactctcagtcactttccgatcgagtgtcaggaaccaccccagccagcgaggggctccccaggcgttagccagcgaaagctgatgcgctatcactccgtgtccacagaaacccctcacgaaaggaaagatttcgaatctaaggcgaaccacctgggagattctggggggacgcccgtgaagacccgacgccattcctggcggcagcagattttcttgcgcgtcgccacccctcagaaggcttgcgattcttcctcccgctacgaagactactcagaactaggagagttacctccccggtccccacttgagcctgtgtgcgaagatggaccatttggaccacctcctgaagaaaaaaaacgcactagccgcgaactaagggaactctggcagaaggctattcttcaacagatcctcctgttacgcatggagaaggaaaatcagaagctacaagcaagcgagaatgatttgctgaataaaaggttgaaactcgactacgaggagataaccccttgtctgaaggaagtcaccaccgtttgggaaaaaatgttatcaacaccaggacgctctaagattaaatttgatatggagaaaatgcacagtgccgtcgggcagggagtgcctaggcaccacagaggggagatctggaagtttttagccgagcagtttcatctgaagcatcagttcccgtcaaagcagcagccaaaagatgtgccctataaggagctgctaaagcagctgactagtcagcagcatgctatcttaatcgacctgggacgcacttttcccacacacccctattttagtgctcagctgggcgccggacagctatctttgtacaacattctcaaggcatactctttacttgaccaggaggtcggctattgtcaggggctcagcttcgtggccggtatcctcctgctgcatatgagcgaagaggaagcattcaaaatgctgaaattcctgatgtttgatatggggttaaggaaacagtatcggcctgatatgatcattttgcagatccagatgtatcagctttcacggctcctacacgattaccatcgagatttgtataaccatttggaggagcacgagatcggcccttcactctatgcagctccatggtttctgactatgttcgcgagccaatttcccttaggctttgtggcgcgcgtgtttgacatgatctttctccagggcaccgaggtgatatttaaggtggccctcagtctgctcggtagccacaaacccctaatcctgcagcacgagaatctcgagaccatcgttgactttatcaaatccactctgcccaatctgggactggtgcagatggaaaagacaattaaccaggtctttgaaatggacatcgcaaaacagttacaggcatacgaggtcgagtaccatgttctgcaagaggagcttatcgattcttcaccgctcagtgacaaccaaagaatggataaacttgagaaaacaaattccagtctgcgcaaacagaacctggatctattagagcagttgcaggtcgcgaatggccgaattcaaagtctggaggcaacaatcgaaaaactgcttagttccgaatctaaactgaagcaggccatgctgacactcgaattggaacgatccgctctgctacaaaccgttgaggagctgcgcaggcgttcagcagaaccgagtgatagggaacctgagtgtacacaaccagagccaaccggcgactag

SEQ ID NO: 184955 - DNA, 3507 bp, Artificial Sequence
  derived and/or modified sequence
atggagcccatcaccttcaccgccaggaagcacctgctgagcaatgaggtgtctgtggactttggcctgcagctggtgggcagcctgcctgtgcacagcctgaccaccatgcccatgctgccctgggtggtggccgaggtgcggcggctgagccggcagagcaccaggaaggagcctgtgaccaagcaggtgcggctgtgtgtgagccccagcggcctgcgctgtgagcctgagcccggccgcagccagcagtgggaccccctcatctacagcagcatctttgagtgcaagccccagagggtgcacaagctgatccacaacagccatgaccccagctactttgcctgcctgatcaaggaggatgctgtgcaccggcagagcatctgctacgtgttcaaggcagatgaccagaccaaggtgcctgagatcatcagcagcatccggcaggccggcaagatcgcccggcaggaggagctgcactgccccagcgagtttgatgacaccttcagcaagaagtttgaggtgctcttctgtggccgggtgacagtggcccacaagaaggcccccccagccctgattgatgaatgtattgagaagttcaaccacgtgtctggcagccggggcagcgagagcccccggcccaacccccctcatgctgcccccaccggcagccaggagcctgtgagaagacccatgaggaagagcttcagccagcccggcctgcggagcctggccttcaggaaggagctgcaggacggcggcctgcggagcagcggcttcttcagcagctttgaggagagtgacatcgagaaccacctgatcagcggccacaacatcgtgcagcccacagacattgaagaaaatagaaccatgctgttcaccatcggccagagcgaggtgtacctgatcagcccagacaccaagaagatcgccctggagaagaacttcaaggagatctccttctgcagccagggcatccgccacgtggaccacttcggcttcatctgccgggagagcagcggcggcggcggcttccactttgtgtgctacgtgttccagtgcaccaatgaggccctggtggatgagatcatgatgaccctgaagcaggccttcaccgtggccgctgtgcagcagacagccaaggccccagcccagctgtgtgagggctgccccctgcagagcctgcacaagctgtgtgagcgcatcgagggcatgaacagcagcaagaccaagctggagctgcagaagcacctgaccaccctgaccaaccaggagcaggccaccatctttgaggaggtgcagaagctgcggcccagaaatgagcagcgggagaatgaactcatcatctccttcctgcgctgcctgtatgaggagaagcagaaggagcacatccacatcggggagatgaagcagaccagccagatggctgctgagaacatcggcagcgagctgcccccatctgccacccgcttccggctggacatgctgaagaacaaggccaagaggagcctgacagagagcctggagagcatcctgagccggggcaacaaggcccggggcctgcaggagcacagcatctctgtggacctggacagcagcctgagcagcaccctgagcaacaccagcaaggagcccagcgtgtgtgagaaggaggccctgcccatcagcgagagcagcttcaagctgctgggcagcagcgaggacctgagcagtgacagcgagagccacctgcctgaggagcccgcccccctgagcccccagcaggccttcagaagaagagccaacaccctgagccacttccccatcgagtgccaggagcccccccagcctgcccggggcagccctggggtgtcccagaggaagctgatgagataccacagcgtgtccacagagacccctcatgagaggaaggactttgagagcaaggccaaccacctgggggacagcggcggcacccctgtgaagaccaggaggcacagctggaggcagcagatcttcctgcgggtggccaccccccagaaggcctgtgacagcagcagccgctatgaggactacagcgagctgggggagctgccccccaggagccccctggagcctgtgtgtgaagatggccccttcggccccccacctgaggagaagaagaggaccagccgggagctgcgggagctgtggcagaaggccatcctgcagcagatcctgctgctgaggatggagaaggagaaccagaagctgcaggcctctgaaaatgacctgctgaacaagaggctgaagctggactatgaggagatcaccccctgcctgaaggaggtgaccaccgtgtgggagaagatgctgagcaccccaggccgcagcaagatcaagtttgacatggagaagatgcacagcgctgtgggccagggcgtgcccaggcaccacagaggagagatctggaagttcctggccgagcagttccacctgaagcaccagttccccagcaagcagcagcccaaggatgtgccctacaaggagctgctgaagcagctgaccagccagcagcacgccatcctgattgacctgggccgcaccttccccacccacccctacttcagcgcccagctgggcgccggccagctgagcctgtacaacatcctgaaggcctacagcctgctggaccaggaggtgggctactgccagggcctgagctttgtggccggcatcctgctgctgcacatgtctgaggaggaggccttcaagatgctgaagttcctgatgtttgacatgggcctgaggaagcagtacagaccagacatgatcatcctgcagatccagatgtaccagctgagccggctgctgcatgactaccaccgggacctgtacaaccacctggaggagcacgagatcggccccagcctgtatgctgccccctggttcctgaccatgtttgccagccagttccccctgggctttgtggcccgggtgtttgacatgatcttcctgcagggcacagaggtgatcttcaaggtggccctgagcctgctgggcagccacaagcccctcatcctgcagcacgagaacctggagaccatcgtggacttcatcaagagcaccctgcccaacctgggcctggtgcagatggagaagaccatcaaccaggtgtttgagatggacatcgccaagcagctgcaggcctatgaggtggagtaccacgtgctgcaggaggagctgattgacagcagccccctgagtgacaaccagaggatggacaagctggagaagaccaacagcagcctgaggaagcagaacctggacctgctggagcagctgcaggtggccaacggccgcatccagagcctggaggccaccatcgagaagctgctgagcagcgagagcaagctgaagcaggccatgctgaccctggagctggagaggtctgccctgctgcagacagtggaggagctgcggcggcgctctgctgagcccagcgaccgggagccagaatgtacccagcctgagcccaccggggactag

SEQ ID NO: 184956 - DNA, 3507 bp, Artificial Sequence
  derived and/or modified sequence
atggagcccatcaccttcaccgcccggaagcacctgctgagcaacgaggtgtccgtcgattttggattgcagctggttggcagtctgccagtgcacagcctgactaccatgccaatgctcccctgggtggtggccgaggtacgacggctgtcgagacaaagtaccagaaaggagccggtgacaaaacaggtcagactctgtgtatctcctagcggcttaagatgtgaacccgagccgggccggtcacagcaatgggaccctctgatttacagctccatctttgagtgcaagcctcagagagttcacaagttgatacacaactcccacgatcctagttacttcgcatgtctgatcaaagaagatgcagttcaccgccagagtatctgctatgtgtttaaagcagatgatcagaccaaagtgccagagataatttcatccatacggcaggctgggaagattgcaaggcaagaggaactgcactgccctagcgagttcgatgacacgtttagcaagaagtttgaggtgctcttttgcggtagagtcaccgtcgcccacaaaaaggccccccctgcactaatagatgagtgcattgagaagtttaaccacgtgtctggttcacgaggttccgagtcacctagaccgaatcccccccacgctgcacctacgggcagccaagagccagtcagacgtccgatgcgcaagtccttctcccaacctgggctgaggtccctggccttcagaaaggagctgcaagatggaggcctacgctcaagcggattcttcagtagcttcgaagagtctgacatcgagaaccatttgatttcaggccacaatattgtgcagccgaccgacattgaggagaacagaactatgctattcactattggccagtcagaggtatatctgatttcgccggacaccaaaaaaattgccctagagaaaaacttcaaagagatctctttttgcagccagggcatcaggcatgttgatcatttcggattcatatgtcgggagagcagcggcggaggcggatttcacttcgtgtgctacgtcttccagtgtacaaatgaagccctcgtggatgaaattatgatgacgcttaaacaggcgtttacagtcgccgcagtgcaacagactgccaaggcacccgcccagctgtgtgagggatgccccttgcaatcacttcacaagttgtgtgaacgcatcgagggtatgaacagttccaagacaaaactcgaactgcagaagcacttgactactttaacaaaccaagagcaggctacaatatttgaggaagtgcagaagctaaggccgcggaatgaacagagggagaatgaactcattataagtttcttacgatgcctatatgaggagaaacagaaggaacacatacacattggcgagatgaaacagacaagtcaaatggcagccgaaaacatcggctctgagctaccacccagcgccaccaggtttaggctggatatgctcaagaataaagccaagcggtccttgactgagtccctcgaatctatactgagtaggggtaacaaggctcgcggtctgcaggagcatagcatctccgtggacttggattcttccttgagcagcaccctttcaaatactagtaaggagccgtccgtttgtgaaaaagaagcccttcccatatcagagtcttccttcaagctgcttggcagctccgaggatctcagctccgatagcgagagccatttgccagaggagcccgccccgctgtcacctcagcaggcttttcgccggagggccaataccctctcacattttccaatcgagtgtcaggagccgcctcagccggccagaggaagtcccggagtgagccagcgaaagctgatgaggtatcacagcgtttccacagaaaccccacacgagcgaaaggatttcgagtctaaagcaaaccacctgggcgattcaggcggcacacctgtgaaaaccagacggcacagttggagacagcagatcttcctccgtgtcgccacccctcagaaggcctgcgactcctcttcccggtacgaggactacagcgaactgggcgagcttcctcccagatctcctctggaacccgtgtgcgaggacggacccttcggtccgcccccagaagagaagaagcggactagccgggagctcagagagctatggcagaaagctattctccagcaaattctgttgctgagaatggaaaaggagaaccagaaacttcaagccagtgagaacgatctattgaacaagcgccttaagctagactacgaagagattactccctgtcttaaggaagtgactaccgtgtgggaaaagatgctgtccactcctggaagaagtaagatcaaatttgacatggagaaaatgcacagcgcagttggccaaggggtacctcgccaccaccgcggcgaaatctggaaatttctggccgagcaatttcacctgaaacatcagtttcctagcaaacagcagcccaaggacgtaccctacaaagagcttcttaagcagctcacgtctcaacagcacgctattctcatcgatctgggcagaacctttccaactcacccatatttttccgcccagttaggcgccggtcagctgtctctttataacatcctaaaagcatactcccttctcgatcaggaggtgggatactgtcaggggttaagcttcgttgccggaatcctattgctacatatgtccgaggaggaggcattcaagatgctgaagttccttatgtttgacatggggctgcgcaagcaatacagaccagatatgatcatcctgcagatccagatgtaccagctcagtcggcttctgcacgactaccaccgcgacctgtacaaccacctcgaagagcacgagatcggtcccagcctgtatgcagccccgtggtttctcaccatgtttgcctcccagttcccgcttggttttgtggctagagtttttgatatgatcttcctgcaaggtacagaagtgatatttaaagttgcactctccttgctgggatcgcacaaacccctgatactgcaacacgagaacctagagaccatcgtcgattttatcaagagcacactgccaaatctcggcctggtacagatggagaagaccatcaaccaggtgttcgaaatggatattgcaaagcaattgcaggcctacgaggtggagtatcacgtcttacaggaagagcttatcgattccagccctctcagcgataaccagagaatggacaaactggaaaagaccaattcctcccttcgaaaacagaaccttgatttgctggaacagttgcaggtggctaatggacgtatccagagcctggaggctacaatagagaagctgttaagctctgagagcaagctgaaacaggccatgttaactctggagctggagcggagtgccctcttacagactgtcgaagagctacgccggcgatccgctgagccctcggatcgggagccggaatgcacccagcccgaacccacaggagattag

SEQ ID NO: 184957 - DNA, 3507 bp, Artificial Sequence
  derived and/or modified sequence
atggagccgataacgtttactgctaggaagcatctgctctcaaacgaggtcagcgtcgacttcggattacagctcgttggtagcttaccagttcactctctaacaacgatgccaatgctcccctgggttgtggcagaggtgcgccgactgagccgacaaagtacccgcaaggagcccgtcactaagcaggttaggctttgtgtttcgccttctggcctgcggtgtgagccagagcccggaagaagtcagcaatgggatccactcatttactcaagtatatttgaatgcaagccccaacgtgttcataagcttatccacaatagccacgatcctagctacttcgcctgccttatcaaggaagacgcagtacacagacagtcaatatgctacgttttcaaagcggacgaccagaccaaagttcccgagatcatcagcagcatccgtcaggctggcaagatcgctcgccaagaagaactgcactgtcccagcgagttcgacgatacgttctcaaagaagtttgaggtccttttctgtgggagggtgacagtggcacacaaaaaggctccgccagccttaatcgacgaatgcatagaaaaatttaaccacgtaagcggctccagagggtccgagtcgcctcggccaaaccctccacacgccgctcccaccggcagtcaggaaccggtcaggaggcctatgcggaaatcattttcccagccaggcctccgaagcctggcgtttcgcaaggaactacaggacggtggcctgagatcaagcggttttttctcctcattcgaggagagcgatatcgagaatcacctgatctccgggcacaacatagtgcaacccactgatatcgaagaaaataggaccatgttatttactatcggccagagcgaggtttacctgatttcccccgatacaaaaaaaatcgcgttagagaagaactttaaagagatatcattctgctctcagggcattagacatgtcgatcactttggttttatatgtcgggaaagcagcgggggaggcggatttcactttgtgtgctacgtcttccagtgcactaacgaagccctggtcgacgaaattatgatgaccttaaagcaggcttttaccgtcgctgccgttcagcaaaccgccaaagctccagcccaattgtgtgaagggtgtccactacagtccctgcataaattatgtgagcgcatagagggaatgaatagtagcaaaacaaagcttgaactgcagaagcatctcaccacccttaccaaccaggaacaggctaccattttcgaagaagtccagaaactcaggccccgaaatgagcagcgggagaatgagctgatcatttcttttctacgatgtctatatgaggaaaaacagaaagagcatatccatattggggagatgaaacagacttcacagatggccgctgaaaatattggatctgaactccccccatccgccacccggttccgcttggacatgctaaagaataaggcaaaaaggtccctaaccgagtctctggagagtatccttagcaggggtaacaaagccagagggctgcaggagcacagcatttctgttgatcttgatagtagtctttcgtcaacactcagcaatacttccaaggagccctccgtctgtgagaaggaagccctgcctatcagcgagagttcctttaagcttcttgggtcaagcgaggacctctcttctgatagcgagtcgcacctaccagaggagccagcccctctcagccctcaacaggcgttccggagacgcgctaataccctgtcgcacttccctatcgagtgtcaggagccaccgcaacccgctcgcggttccccaggcgtctcccagcgcaaattaatgcggtaccacagcgtgtccaccgagacgccacatgaaaggaaagactttgagtcaaaggcgaatcacctgggcgattcgggcggaacgcctgtgaaaacaaggcgacacagctggagacagcaaatatttctacgggtggccactccacagaaagcatgtgattccagctcacggtacgaggattattctgaactgggggaactaccccctcgcagtccgttggaacctgtttgcgaggacggaccctttggccctccacccgaggaaaagaaaaggactagtcgtgagttgagggaactgtggcagaaggcaatcctgcagcagatactgttgctgcgcatggaaaaagagaaccagaagctccaagcttcagagaatgatttgctcaataagcgcctgaagctcgactacgaagagatcacaccttgcctgaaggaggttacgaccgtctgggagaagatgctgtcaactccgggaaggagtaagattaagtttgacatggaaaagatgcacagcgcagttggccagggggttcctcggcatcacagaggggaaatttggaaattcttagcagaacagtttcacctgaagcaccagttcccttctaagcagcaaccaaaggacgtgccctataaggagctccttaagcaactcacctcccagcagcacgctatcttaatcgacctcggtaggactttccctacccatccatatttttccgcacagcttggtgccggacagttgtctctgtataatatcctcaaggcttatagtcttcttgaccaggaggttggctactgccagggcttgtccttcgtcgccggtatattgctgttacatatgtccgaagaggaggccttcaagatgttaaagttcctcatgtttgatatggggcttaggaaacaatatcggcctgacatgattatactgcagatccagatgtaccaattatcccgtctcctgcacgactatcatcgggatctgtataatcatctggaagagcacgagatcgggcctagtctttacgccgctccttggtttctaaccatgttcgcctcccagtttcctctgggattcgtggcacgcgtgttcgatatgatttttctgcaaggcacagaggtgatcttcaaagtcgccctttccctgctggggagccacaagcccctcattctgcagcacgaaaaccttgagactattgtagacttcataaaatcaaccctccctaatttggggctggtgcaaatggagaagacgatcaatcaagtgtttgaaatggatattgctaagcaactacaagcctacgaagtggaatatcatgtgctccaggaggaactgattgattccagccctttaagcgacaaccagcgcatggataagctcgagaagacaaactcctcactcagaaaacagaatctggatctcctggaacagctacaagttgcaaacggccgtatccagtcgctcgaggccaccatagagaagctgctcagctccgagtccaagctcaaacaggcaatgctcaccctggagctcgaaagatccgccctcctgcagactgtggaggagctgcggagacggagcgccgaaccgagcgatcgagagcccgagtgcacgcagcccgagcccacgggcgactag

SEQ ID NO: 184958 - DNA, 5700 bp, Artificial Sequence
  derived and/or modified sequence
ctcttcggctgctgctcctggtgccgccaccgtccgccggtgcctgttgctgccgccgccgcgggacctgctgtgtcctcagctgggtggagaagaggcgggcgccgagccgaggggagccccctccccgtccccccgcggcgggaagagcgcagccagccgggtgcgatggactccccgcccgcccaggccgtccccaggatgcccccaagcacctgcgcgtcccggcccggccccgggctctgagcgcgccgcggcacaggtttctgcatatgaagtgtgtaaaatagattgcttgatccaaaacagaaaaacagtgataactgttttgctgagttcccagacccttcccaagatggaaccaataacattcacagcaaggaaacatctgctttctaacgaggtctcggtggattttggcctgcagctggtgggctccctgcctgtgcattccctgaccaccatgcccatgctgccctgggttgtggctgaggtgcgaagactcagcaggcagtccaccagaaaggaacctgtaaccaagcaagtccggctttgcgtttcaccctctggactgagatgtgaacctgagccagggagaagtcaacagtgggatcccctgatctattccagcatctttgagtgcaagcctcagcgtgttcacaaactgattcacaacagtcatgacccaagttactttgcttgtctgattaaggaagacgctgtccaccggcagagtatctgctatgtgttcaaagccgatgatcaaacaaaagtgcctgagatcatcagctccatccgtcaggcggggaagatcgcccggcaggaggagctgcactgcccgtccgagttcgacgacacgttttccaagaagttcgaggtgctcttctgcggccgcgtgacggtggcgcacaagaaggctccgccggccctgatcgacgagtgcatcgagaagttcaatcacgtcagcggcagccgggggtccgagagcccccgccccaacccgccccatgccgcgcccacagggagccaggagcctgtgcgcaggcccatgcgcaagtccttctcccagcccggcctgcgctcgctggcctttaggaaggagctgcaggatgggggcctccgaagcagcggcttcttcagctccttcgaggagagcgacattgagaaccacctcattagcggacacaatattgtgcagcccacagatatcgaggaaaatcgaactatgctcttcacgattggccagtctgaagtttacctcatcagtcctgacaccaaaaaaatagcattggagaaaaattttaaggagatatccttttgctctcagggcatcagacacgtggaccactttgggtttatctgtcgggagtcttccggaggtggcggctttcattttgtctgttacgtgtttcagtgcacaaatgaggctctggttgatgaaattatgatgaccctgaaacaggccttcacggtggccgcagtgcagcagacagctaaggcgccagcccagctgtgtgagggctgccccctgcaaagcctgcacaagctctgtgagaggatagagggaatgaattcttccaaaacaaaactagaactgcaaaagcacctgacgacattaaccaatcaggagcaggcgactatttttgaagaggttcagaaattgagaccgagaaatgagcagcgagagaatgaattgattatttcttttctgagatgtttatatgaagagaaacagaaagaacacatccatattggggagatgaagcagacatcgcagatggcagcagagaatattggaagtgaattaccacccagtgccactcgatttaggctagatatgctgaaaaacaaagcaaagagatctttaacagagtctttagaaagtattttgtcccggggtaataaagccagaggcctgcaggaacactccatcagtgtggatctggatagctccctgtctagtacattaagtaacaccagcaaagagccatctgtgtgtgaaaaggaggccttgcccatctctgagagctcctttaagctcctcggctcctcggaggacctgtccagtgactcggagagtcatctcccagaagagccagctccgctgtcgccccagcaggccttcaggaggcgagcaaacaccctgagtcacttccccatcgaatgccaggaacctccacaacctgcccgggggtccccgggggtttcgcaaaggaaacttatgaggtatcactcagtgagcacagagacgcctcatgaacgaaaggactttgaatccaaagcaaaccatcttggtgattctggtgggactcctgtgaagacccggaggcattcctggaggcagcagatattcctccgagtagccaccccgcagaaggcgtgcgattcttccagcagatatgaagattattcagagctgggagagcttcccccacgatctcctttagaaccagtttgtgaagatgggccctttggccccccaccagaggaaaagaaaaggacatctcgtgagctccgagagctgtggcaaaaggctattcttcaacagatactgctgcttagaatggagaaggaaaatcagaagctccaagcctctgaaaatgatttgctgaacaagcgcctgaagctcgattatgaagaaattactccctgtcttaaagaagtaactacagtgtgggaaaagatgcttagcactccaggaagatcaaaaattaagtttgacatggaaaaaatgcactcggctgttgggcaaggtgtgccacgtcatcaccgaggtgaaatctggaaatttctagctgagcaattccaccttaaacaccagtttcccagcaaacagcagccaaaggatgtgccatacaaagaactcttaaagcagctgacttcccagcagcatgcgattcttattgaccttgggcgaacctttcctacacacccatacttctctgcccagcttggagcaggacagctatcgctttacaacattttgaaggcctactcacttctagaccaggaagtgggatattgccaaggtctcagctttgtagcaggcattttgcttcttcatatgagtgaggaagaggcgtttaaaatgctcaagtttctgatgtttgacatggggctgcggaaacagtatcggccagacatgattattttacagatccagatgtaccagctctcgaggttgcttcatgattaccacagagacctctacaatcacctggaggagcacgagatcggccccagcctctacgctgccccctggttcctcaccatgtttgcctcacagttcccgctgggattcgtagccagagtctttgatatgatttttcttcagggaacagaggtcatatttaaagtggctttaagtctgttgggaagccataagcccttgattctgcagcatgaaaacctagaaaccatagttgactttataaaaagcacgctacccaaccttggcttggtacagatggaaaagaccatcaatcaggtatttgaaatggacatcgctaaacagttacaagcttatgaagttgagtaccacgtccttcaagaagaacttatcgattcctctcctctcagtgacaaccaaagaatggataaattagagaaaaccaacagcagcttacgcaaacagaaccttgacctccttgaacagttgcaggtggcaaatggtaggatccaaagccttgaggccaccattgagaagctcctgagcagtgagagcaagctgaagcaggccatgcttaccttagaactggagcggtcggccctgctgcagacggtggaggagctgcggcggcggagcgcagagcccagcgaccgggagcctgagtgcacgcagcccgagcccacgggcgactgacagctctgcaggagagattgcaacaccatcccacactgtccaggccttaactgagagggacagaagacgctggaaggagagaaggaagcgggaagtgtgcttctcagggaggaaaccggcttgccagcaagtagattcttacgaactccaacttgcaattcagggggcatgtcccagtgttttttttgttgtttttagatactaaatcgtcccttctccagtcctgattactgtacacagtagctttagatggcgtggacgtgaataaatgcaacttatgttttcttgttggttcctttttgagtgtcactgtgtttgtaaagagcattcacaatacggtggaatttcaaaagctggaagagctcgagatcatgcctcaggcaaaggcgtgggtccatcgttcttccgagagggtttgtgtggcgactacaccctcagcgtccctggcaaggtgcagttggctctcgcccattcttgttatggaaacctaagatgatcattgggaagatcagtgatcttgggtcattgatccctggctcagaggatagcggtttccatcataaaccaagatgatgagttcagcctttatccctcgtggttccactagatgtaacttaaaggagttaacatttgaggactttgttctacatcagattttactatttgaatgtttaagatcactttattgaatttgaagatcatcaaattaaataaaatgatttatttaatttggatatcctgatcactgtcaagtgaaatggatctctctctttggtatttaaggaagtttgtctttaaaaaaaaaatagagtgttttcatacatttttgcttatcccataagtacagttgatcaaagtcatagtaggtaaatgctttatgggacagctgacaccttttagaccctaccaggtattgctagcatgtgagctgcagttgtggggtctgagatatttctttgtggtagtttcatacccatactatagagtcatgtatttatttttgcctgttgtgtgatgtaatgcaatcatgttcctttgagtctccatcccttggaaatctgacttcttgcagaaggagtaggcacatcaagatattcaggggtgccccaagagtctgggactttcaaaaaaaaaagatcaggctgaaactgcagtcagatttatgacagctgacagtttttcagaggtcgcacacagtgactctcctctctcaggatgacgaggacctgtgccttcaacaagcaaaatgctgctcacggttgtcctgcttgcagccagtcactgtgtaaagcctctctgatgtgcacttaagagtgggttgctttctcacaaagatggggttctgtgcagtcacaggtcacttccttgacaacacaatcatttctgatctttatcactgtaaccacgtcttctattccataggagtttcttttgattctctcagttgcggggggcatctcttaatcctggggtaaaaggagagattgccatacttagactcactgtgagtctccccggccatttcacgaggagaccacagtgctgccaccagtgcctaaacaggtggctggcattcgagacttcctcctgttccctgggtcagaggatagcggtttccatcataaaccaagatgatgagttcagcctttatccctcgtggttccgctagatgtaacttataggagttaacatttgaggactttgttctgcatcagatcttactatttgaatgtttactgttggattttgggcatcttattactgttactcaaaaacattgactctgcatcaagaaagaaacaagaaagcaataaaacaagaaataattcatgctcaca

SEQ ID NO: 184959 - DNA, 2383 bp, Artificial Sequence
  derived and/or modified sequence
cccaggtttctgcatatgaagtgtgtaaaatagattgcttgatccaaaacagaaaaacagtgataactgttttgctgagttcccagacccttcccaagatggaaccaataacattcacagcaaggaaacatctgctttctaacgaggtctcggtggattttggcctgcagctggtgggctccctgcctgtgcattccctgaccaccatgcccatgctgccctgggttgtggctgaggtgcgaagactcagcaggcagtccaccagaaaggaacctgtaaccaagcaagtccggctttgcgtttcaccctctggactgagatgtgaacctgagccagggagaagtcaacagtgggatcccctgatctattccagcatctttgagtgcaagcctcagcgtgttcacaaactgattctggtgggactcctgtgaagacccggaggcattcctggaggcagcagatattcctccgagtagccaccccgcagaaggcgtgcgattcttccagcagatatgaagattattcagagctgggagagcttcccccacgatctcctttagaaccagtttgtgaagatgggccctttggccccccaccagaggaaaagaaaaggacatctcgtgagctccgagagctgtggcaaaaggctattcttcaacagatactgctgcttagaatggagaaggaaaatcagaagctccaagcctctgaaaatgatttgctgaacaagcgcctgaagctcgattatgaagaaattactccctgtcttaaagaagtaactacagtgtgggaaaagatgcttagcactccaggaagatcaaaaattaagtttgacatggaaaaaatgcactcggctgttgggcaaggtgtgccacgtcatcaccgaggtgaaatctggaaatttctagctgagcaattccaccttaaacaccagtttcccagcaaacagcagccaaaggatgtgccatacaaagaactcttaaagcagctgacttcccagcagcatgcgattcttattgaccttgggcgaacctttcctacacacccatacttctctgcccagcttggagcaggacagctatcgctttacaacattttgaaggcctactcacttctagaccaggaagtgggatattgccaaggtctcagctttgtagcaggcattttgcttcttcatatgagtgaggaagaggcgtttaaaatgctcaagtttctgatgtttgacatggggctgcggaaacagtatcggccagacatgattattttacagatccagatgtaccagctctcgaggttgcttcatgattaccacagagacctctacaatcacctggaggagcacgagatcggccccagcctctacgctgccccctggttcctcaccatgtttgcctcacagttcccgctgggattcgtagccagagtctttgatatgatttttcttcagggaacagaggtcatatttaaagtggctttaagtctgttgggaagccataagcccttgattctgcagcatgaaaacctagaaaccatagttgactttataaaaagcacgctacccaaccttggcttggtacagatggaaaagaccatcaatcaggtatttgaaatggacatcgctaaacagttacaagcttatgaagttgagtaccacgtccttcaagaagaacttatcgattcctctcctctcagtgacaaccaaagaatggataaattagagaaaaccaacagcagcttacgcaaacagaaccttgacctccttgaacagttgcaggtggcaaatggtaggatccaaagccttgaggccaccattgagaagctcctgagcagtgagagcaagctgaagcaggccatgcttaccttagaactggagcggtcggccctgctgcagacggtggaggagctgcggcggcggagcgcagagcccagcgaccgggagcctgagtgcacgcagcccgagcccacgggcgactgacagctctgcaggagagattgcaacaccatcccacactgtccaggccttaactgagagggacagaagacgctggaaggagagaaggaagcgggaagtgtgcttctcagggaggaaaccggcttgccagcaagtagattcttacgaactccaacttgcaattcagggggcatgtcccagtgttttttttgttgtttttagatactaaatcgtcccttctccagtcctgattactgtacacagtagctttagatggcgtggacgtgaataaatgcaacttatgttttcttgttggttcctttttgagtgtcactgtgtttgtaaagagcattcacaatacggtggaatttcaaaagctggaagagctcgagatcatgcctcaggcaaaggcgtgggtccatcgttcttccg

SEQ ID NO: 184960 - protein, 939 aa, Artificial Sequence
  derived and/or modified sequence
MATSQYFDFAQGGGPQYSAQPPTLPLPTVGASYTAQPTPGMDPAVNPAFPPAAPAGYGGYQPHSGQDFAYGSRPQEPVPTATTMATYQDSYSYGQSAAARSYEDRPYFQSAALQSGRMTAADSGQPGTQEACGQPSPHGSHSHAQPPQQAPIVESGQPASTLSSGYTYPTATGVQPESSASIVTSYPPPSYNPTCTAYTAPSYPNYDASVYSAASPFYPPAQPPPPPGPPQQLPPPPAPAGSGSSPRADSKPPLPSKLPRPKAGPRQLQLHYCDICKISCAGPQTYREHLGGQKHRKKEAAQKTGVQPNGSPRGVQAQLHCDLCAVSCTGADAYAAHIRGSKHQKVFKLHAKLGKPIPTLEPALATESPPGAEAKPTSPTGPSVCASSRPALAKRPVASKALCEGPPEPQAAGCRPQWGKPAQPKLEGPGAPTQGGSKEAPAGCSDAQPVGPEYVEEVFSDEGRVLRFHCKLCECSFNDLNAKDLHVRGRRHRLQYRKKVNPDLPIATEPSSRARKVLEERMRKQRHLAEERLEQLRRWHAERRRLEEEPPQDVPPHAPPDWAQPLLMGRPESPASAPLQPGRRPASSDDRHVMCKHATIYPTEQELLAVQRAVSHAERALKLVSDTLAEEDRGRREEEGDKRSSVAPQTRVLKGVMRVGILAKGLLLRGDRNVRLALLCSEKPTHSLLRRIAQQLPRQLQMVTEDEYEVSSDPEANIVISSCEEPRMQVTISVTSPLMREDPSTDPGVEEPQADAGDVLSPKKCLESLAALRHARWFQARASGLQPCVIVIRVLRDLCRRVPTWGALPAWAMELLVEKAVSSAAGPLGPGDAVRRVLECVATGTLLTDGPGLQDPCERDQTDALEPMTLQEREDVTASAQHALRMLAFRQTHKVLGMDLLPPRHRLGARFRKRQRGPGEGEEGAGEKKRGRRGGEGLV

SEQ ID NO: 184961 - protein, 366 aa, Artificial Sequence
  derived and/or modified sequence
MATSQYFDFAQGGGPQYSAQPPTLPLPTVGASYTAQPTPGMDPAVNPAFPPAAPAGYGGYQPHSGQDFAYGSRPQEPVPTATTMATYQDSYSYGQSAAARSYEDRPYFQSAALQSGRMTAADSGQPGTQEACGQPSPHGSHSHAQPPQQAPIVESGQPASTLSSGYTYPTATGVQPESSASIVTSYPPPSYNPTCTAYTAPSYPNYDASVYSAASPFYPPAQPPPPPGPPQQLPPPPAPAGSGSSPRADSKPPLPSKLPRPKAGPRQLQLHYCDICKISCAGPQTYREHLGGQKHRKKEAAQKTGVQPNGSPRGVQAQLHCDLCAVSCTGADAYAAHIRGSKHQKGLLSHRQQAADPSGGNQPNLN

SEQ ID NO: 184962 - DNA, 4757 bp, Artificial Sequence
  derived and/or modified sequence
gaagacgccaagatggcgacgagtcagtatttcgacttcgcgcagggcggcggcccgcagtacagcgcccagcctccgacccttcccctgcccactgtgggggccagctatactgcacaacccactcctgggatggaccctgccgtgaacccggcctttcccccagctgccccggcagggtacggtggataccagccccactccggccaggacttcgcctacggcagccgaccccaggagcccgtccccacggccaccaccatggctacctaccaggacagttacagctacggacagtcagcagctgccaggagctatgaggacaggccgtacttccagtctgctgccctccagtctgggcgcatgacagccgcagactccggccagccagggacccaagaagcctgcgggcagcccagcccccatggcagtcacagccacgctcagcccccacagcaggcgcccatagtggagtccggacagccagcgagcaccttgtcctcgggatacacctaccccacggcgacaggcgtccagcccgagtcgtcagcttccatcgtgacctcctaccccccgccctcctacaaccccacctgcaccgcctacacggcaccaagctacccgaactatgacgcgtcggtgtactccgctgccagccctttctatcctccagcgcagcccccgcctcccccgggacccccgcagcagctgcccccgccgcccgcgcctgcaggctcaggaagcagccccagggccgactcgaagccaccgcttcccagcaagctgccgagacccaaggcggggcccaggcagctccagcttcactactgcgacatctgcaagatcagctgcgctggcccccagacctaccgggaacatctgggagggcagaagcacagaaagaaggaggcggcccagaagacaggcgtgcagcccaacgggagcccgcgcggggtgcaggcgcagctgcattgcgacctgtgcgccgtgtcctgcaccggggcggacgcctacgcggcccacatccggggatccaagcaccagaaggtcttcaagctgcacgccaaactggggaagcccattcccaccctcgagcctgcactggccacagagagcccccccggggcagaggccaagcccacgtcccccactggccccagcgtgtgtgcctcgagcaggccagcgctggccaagagacccgtggcctcgaaggccttatgcgaggggcctcctgagccacaggcagcaggctgcagaccccagtgggggaaaccagcccaacctaaattagagggtcccggagcacctacccaaggaggctcaaaggaagctcccgcgggctgctctgatgcgcagccggtgggcccggaatatgtggaggaggtgttcagcgacgaagggcgagtgcttcgcttccactgcaagctgtgcgagtgcagtttcaacgaccttaacgcgaaggacctgcacgtgagggggcggcggcaccggctgcagtaccggaagaaagtgaacccggaccttcccattgccacggagcccagcagccgggctcggaaggtcctggaggagcgcatgaggaagcagcggcacctggcggaggagcggctggagcagctgcggcgctggcacgcggagaggaggcggctggaggaggagccaccccaggacgtgccgccccacgcgccgcccgactgggcccagcctctgctcatgggcaggccggagtcacccgccagcgccccactccagcccgggcggcggccggcgtccagcgacgaccggcacgtcatgtgcaagcacgccaccatctaccccacggagcaggagctcctggccgtgcagagggccgtgtcccacgcagagcgggccctcaagctggtgtccgacacactggccgaggaggaccggggccgccgagaggaagagggtgacaagcgcagcagcgttgccccccagactcgggtcctgaaaggcgtcatgcgagtaggcatcctggcgaaaggcctcctcctgcgtggggacaggaacgtgcgcctcgctctgctctgctccgagaagcccacgcacagcctgctgcggaggatcgcccagcagctgccccggcagctccagatggtgaccgaggatgagtatgaggtctcctccgaccctgaagccaacattgtcatctcctcctgtgaggagcccaggatgcaggtcaccatatctgtcacctcacctctgatgcgggaggacccctccacagacccaggtgtggaggagcctcaggctgatgcaggtgatgtcctgagccccaagaagtgcctcgagtccctggccgccctccgtcatgccaggtggtttcaggctcgagccagcggcctgcagccatgcgtgatcgtcatcagggtcctgagggacctctgccggcgtgtgcccacctggggggccctgccagcctgggccatggagctgctggtggagaaggctgtgagcagtgcggctgggcccctgggccccggggatgcagtcaggcgagtcctggagtgcgtggccacagggacgctcctgacagacgggcccgggctccaggatccctgcgagagagaccagacagatgccctcgagcccatgaccctccaagagcgggaagacgtgaccgccagcgcccagcacgccctgcgaatgctggccttccggcagacccacaaggtcctgggcatggatctcctgccgcccagacaccggctgggggcccgcttccggaagaggcaacggggacctggcgagggagaggagggcgcaggggagaagaagcggggccggcggggcggagaggggctcgtgtgagccgcctacctcccccacctgcgggcctttgcatccctgcactcctggacgtgtgcgcgccgaccaatggctgcttcatccccgacgttggacaatggtcatttccttttgagtaacgctctgtaggtttcctttaaaacacctgtgcttcagaccgggcactgtggctcatgcctttaatcccagcactttgggaggctgagttgcttgagcctgagagttcaaggccagcccagacaacagagtgagacccccatctctccaaaatatttttaaaaatcagcttggcatggttggtggccaggcgcggtgattcacgcctgtaatcccagcactttgagaggccgaggtgggcagatcgcctgaggtcaggagttcgagaccggcctggtcaacatggtgaaaccctgtctctagtaaaaaacacaacaattagcctggcgtggtggtgtgcacctgtagtcccagctacttgggaggctgagtccggagccttgaggccaggagggcagtgagctgtgattgcaccgtgacactccagcctgggcaacagaagaagactttgtcacttaaaagaaatgttttttaacatttgtgcttaaattgttacagaaatgacaccatccagccctgggagtggcaccccttcctcgagggccccatcccccacagccaggggggccagcagtacagcaagcagattctaaactcgggggcatcttgctggctctaaactcacctcgtggtacaggaaggggttttaaaatacttcctctgggctgcgcatggtggctcacacctataatcccagcactttgggaggccaagcttggtggatcgcttgagcccagcggtttaagatcagtctgggcaatatggtgacaccccatctctacaaaaaattagccagttgtggtggcccaagcctgtagtcccagctactcgggaggctgaggccgtaggatcccttgagcccaggagttcgaggctgcagcgagccgagattgcgctactgaactccagcctgggttacagagcgagaccctgtctcaaagaaacaaacaaacaaacaaacaaacaaacaaaactttctttggatgcggctgcggcatggatttgaaatcacgtgggcaggccctgttctggggccccaccacatgtgcaggacaagcccaggggagctcccagccggcatccccacgcccccagcccagcctgctccaaacagaccccccacccacctccacagccaggatgtcagcagggcctgagccaggctcgtcccctgtggggagagccacagggccaggtggacacgccgacgggcgatgaggatcctggctgggcctcccccgggaacagctgtgctggacagtcagacccggagcccagaggcacccccacccaccccccgccccgagccctgtaccactgagtgcctttcacagagaaaacccactctgccatgtgtcactgaggcctggatttgagcttccgtccttccttcctccctctctccctgatgtaggccttggctggccctgaggcagggggtccccaatccccccttgtggtagcagggcccgggacccgtgcctgggggacccggggaggggccgccgtcttgtggatgctggccatggtgggcaggcgcctcctggcactgatggatgtgggggcacccccttctgagtccccaccccaacctgttcaaaccttccgcttggtcagtttttttttctttggccagctgcccagtggcattgaatgagaaaagtccacctttgggcagatgtgatctccagccagtggctcagttttgtttctctgtgtttgaaggacagcctgcatgtggctctgtctgaatgtctttgtagagctacctggaaattgggaggcagggggaataaaggaaatcatttgtc

SEQ ID NO: 184963 - DNA, 2820 bp, Artificial Sequence
  derived and/or modified sequence
atggccaccagccagtacttcgacttcgcccagggcggcggcccccagtacagcgcccagccccccaccctgcccctgcccaccgtgggcgccagctacaccgcccagcccacccccggcatggaccccgccgtgaaccccgccttcccccccgccgcccccgccggctacggcggctaccagccccacagcggccaggacttcgcctacggcagcagaccccaggagcccgtgcccaccgccaccaccatggccacctaccaggacagctacagctacggccagagcgccgccgccagaagctacgaggacagaccctacttccagagcgccgccctgcagagcggcagaatgaccgccgccgacagcggccagcccggcacccaggaggcctgcggccagcccagcccccacggcagccacagccacgcccagcccccccagcaggcccccatcgtggagagcggccagcccgccagcaccctgagcagcggctacacctaccccaccgccaccggcgtgcagcccgagagcagcgccagcatcgtgaccagctaccccccccccagctacaaccccacctgcaccgcctacaccgcccccagctaccccaactacgacgccagcgtgtacagcgccgccagccccttctacccccccgcccagcccccccccccccccggccccccccagcagctgccccccccccccgcccccgccggcagcggcagcagccccagagccgacagcaagccccccctgcccagcaagctgcccagacccaaggccggccccagacagctgcagctgcactactgcgacatctgcaagatcagctgcgccggcccccagacctacagagagcacctgggcggccagaagcacagaaagaaggaggccgcccagaagaccggcgtgcagcccaacggcagccccagaggcgtgcaggcccagctgcactgcgacctgtgcgccgtgagctgcaccggcgccgacgcctacgccgcccacatcagaggcagcaagcaccagaaggtgttcaagctgcacgccaagctgggcaagcccatccccaccctggagcccgccctggccaccgagagcccccccggcgccgaggccaagcccaccagccccaccggccccagcgtgtgcgccagcagcagacccgccctggccaagagacccgtggccagcaaggccctgtgcgagggcccccccgagccccaggccgccggctgcagaccccagtggggcaagcccgcccagcccaagctggagggccccggcgcccccacccagggcggcagcaaggaggcccccgccggctgcagcgacgcccagcccgtgggccccgagtacgtggaggaggtgttcagcgacgagggcagagtgctgagattccactgcaagctgtgcgagtgcagcttcaacgacctgaacgccaaggacctgcacgtgagaggcagaagacacagactgcagtacagaaagaaggtgaaccccgacctgcccatcgccaccgagcccagcagcagagccagaaaggtgctggaggagagaatgagaaagcagagacacctggccgaggagagactggagcagctgagaagatggcacgccgagagaagaagactggaggaggagcccccccaggacgtgcccccccacgccccccccgactgggcccagcccctgctgatgggcagacccgagagccccgccagcgcccccctgcagcccggcagaagacccgccagcagcgacgacagacacgtgatgtgcaagcacgccaccatctaccccaccgagcaggagctgctggccgtgcagagagccgtgagccacgccgagagagccctgaagctggtgagcgacaccctggccgaggaggacagaggcagaagagaggaggagggcgacaagagaagcagcgtggccccccagaccagagtgctgaagggcgtgatgagagtgggcatcctggccaagggcctgctgctgagaggcgacagaaacgtgagactggccctgctgtgcagcgagaagcccacccacagcctgctgagaagaatcgcccagcagctgcccagacagctgcagatggtgaccgaggacgagtacgaggtgagcagcgaccccgaggccaacatcgtgatcagcagctgcgaggagcccagaatgcaggtgaccatcagcgtgaccagccccctgatgagagaggaccccagcaccgaccccggcgtggaggagccccaggccgacgccggcgacgtgctgagccccaagaagtgcctggagagcctggccgccctgagacacgccagatggttccaggccagagccagcggcctgcagccctgcgtgatcgtgatcagagtgctgagagacctgtgcagaagagtgcccacctggggcgccctgcccgcctgggccatggagctgctggtggagaaggccgtgagcagcgccgccggccccctgggccccggcgacgccgtgagaagagtgctggagtgcgtggccaccggcaccctgctgaccgacggccccggcctgcaggacccctgcgagagagaccagaccgacgccctggagcccatgaccctgcaggagagagaggacgtgaccgccagcgcccagcacgccctgagaatgctggccttcagacagacccacaaggtgctgggcatggacctgctgccccccagacacagactgggcgccagattcagaaagagacagagaggccccggcgagggcgaggagggcgccggcgagaagaagagaggcagaagaggcggcgagggcctggtgtag

SEQ ID NO: 184964 - DNA, 2820 bp, Artificial Sequence
  derived and/or modified sequence
atggccacctcgcagtacttcgatttcgctcaggggggaggtccccagtactctgcacagccccctacgctgccactgccaaccgtaggcgctagttatactgcgcagccaacccctgggatggaccccgcggtcaacccagcattcccccccgcagcaccagcgggctacgggggctaccaaccacactccggccaggattttgcttacggatccaggccacaggagcccgtgcccacagcgacaaccatggccacttatcaggatagttattcatacggacaaagcgccgccgcacggagctacgaagatcggccttacttccagtctgccgccttacaaagcggtaggatgactgctgccgactctggacagccaggaacacaggaggcttgcggccagccctctccccacggttctcatagccacgcgcagccacctcagcaggcgccaatcgtcgagtcggggcagccagcttcgacattaagtagtggatatacataccctacagctacaggtgtccagcctgagtccagcgcttcaattgtaacgtcctatcctcctcccagttacaacccaacttgcactgcatataccgccccctcttatccaaactatgatgccagcgtgtactcggctgccagtcccttctacccccctgcacagccgcctcccccgccaggtccgccccagcaattgcccccgcccccagcccccgccggcagtggctcaagtccccgcgccgattcaaagcctcccctccctagcaaactgccaagacccaaggcgggccccagacagctgcaactgcactattgtgacatttgtaagatctcgtgcgctgggccgcagacctatcgggagcacttgggtgggcagaagcaccggaaaaaagaggccgcccagaaaaccggtgtgcaacctaatgggagccccaggggcgtgcaggcacaactccattgcgatttgtgcgccgtgtcctgcaccggcgccgacgcatatgccgcccacataaggggaagcaaacaccagaaagtattcaagttgcatgccaaattaggaaaacctatccccacacttgaaccagccctggctaccgaaagtccgccaggcgccgaggccaagcccaccagccctacagggccgtccgtgtgcgcatcatctagaccggcgctcgccaagcgccccgtggcgagcaaggccctgtgcgaaggcccgccagagccacaggccgcaggttgccggccccagtggggcaaaccggcccagcctaagcttgaaggcccaggcgccccaactcaggggggcagtaaggaggctcccgccgggtgttctgacgcccagccagtcggcccggagtatgtcgaggaggtattcagcgacgagggcagggtgttaaggttccactgtaaactgtgtgaatgtagcttcaatgacctgaacgctaaagatctgcatgtgaggggcaggagacatcgactccagtaccggaaaaaggttaatcctgaccttcccatcgccacagagccctcctccagggctaggaaggtcctggaggaaaggatgcggaaacaaaggcatctagccgaggagcggttagagcaactgcgacggtggcacgccgaacgtcgtcggttggaagaggagcccccacaggatgtcccgccccatgccccccctgactgggcacaaccactgctcatgggaaggccagagtctccggcgtcagcccctctacagcccggcaggagacccgcatcttccgacgataggcacgtgatgtgtaagcatgcaactatttatcccaccgagcaggagctcttggccgttcagagagccgtatctcacgccgaacgagcgttaaaactagtgagtgacacactggctgaggaagataggggaagacgggaggaggaaggggacaaacggagctccgtcgctccacaaacgcgcgtcctcaagggcgttatgcgggttggaatcttggcaaaaggcctcctcctgaggggcgaccgcaatgttagactggccttgctgtgctccgagaaacccacacacagtctgctgcgcaggatcgcacagcagttaccaaggcaattacagatggtgacagaggatgagtatgaagtgagctctgaccccgaggcaaacatcgtgatttcctcttgtgaggagccacgcatgcaggtaactatcagcgtgacctctcccttgatgcgcgaagatccttctaccgaccctggggtcgaggaaccacaggcagacgccggcgatgtcctgtctcccaagaagtgcctcgagagtcttgccgcgctgcggcatgcaagatggttccaggcccgcgcttcggggctgcagccgtgtgtgatcgtgattcgcgtgctgagagatctttgccggcgggtacccacctggggagccctacccgcatgggctatggaacttctcgtcgagaaagccgtcagctcagctgccgggcctctcggaccaggagacgctgtcagacgagtgttggagtgtgtcgctaccggaacacttcttacagacggtcccgggctgcaagacccatgtgaaagagatcagaccgatgccctggaaccgatgacactgcaagaaagggaagatgtcaccgccagtgctcagcatgccttgcggatgcttgctttccgccaaacacacaaggtcctcggcatggacttgctaccacctaggcacaggctgggagctcgcttccgaaagagacagcggggcccgggcgagggtgaagagggtgccggcgaaaagaagcgcgggagaagaggcggagagggactagtgtag

SEQ ID NO: 184965 - DNA, 2820 bp, Artificial Sequence
  derived and/or modified sequence
atggccaccagccagtactttgattttgcccagggcggcggcccccagtacagcgcccagccccccaccctgcccctgcccaccgtgggcgccagctacacagcccagcccaccccaggcatggaccctgctgtgaacccagccttccccccagctgccccagctggctatggaggctaccagccccacagcggccaggactttgcctacggcagccggccccaggagcctgtgcccacagccaccaccatggccacctaccaggacagctacagctatggccagagcgctgctgcccggagctatgaagatcggccctacttccagagcgctgccctgcagagcggccgcatgacagctgctgacagcggccagcccggcacccaggaggcctgtggccagcccagcccccacggcagccacagccacgcccagcccccccagcaggcccccatcgtggagagcggccagcctgccagcaccctgagcagcggctacacctaccccacagccaccggggtgcagcctgagagcagcgccagcatcgtgaccagctaccccccacccagctacaaccccacctgcacagcctacacagcccccagctaccccaactatgatgcctctgtgtacagcgctgccagccccttctaccccccagcccagcccccacctcctcctggccccccccagcagctgcccccacctccagccccagctggcagcggcagcagccccagggctgacagcaagccacccctgcccagcaagctgccccggcccaaggccggcccccggcagctgcagctgcactactgtgacatctgcaagatcagctgtgccggcccccagacctaccgggagcacctgggcggccagaagcacaggaagaaggaggccgcccagaagacaggagtgcagcccaacggcagcccccggggcgtgcaggcccagctgcactgtgacctgtgtgctgtgtcctgcacaggagcagatgcctatgctgcccacatccggggcagcaagcaccagaaggtgttcaagctgcacgccaagctgggcaagcccatccccaccctggagcccgccctggccacagagagccccccaggagctgaggccaagcccaccagccccaccggccccagcgtgtgtgccagcagcaggcctgccctggccaagaggcctgtggccagcaaggccctgtgtgagggccccccagagccccaggccgccggctgccggccccagtggggcaagccagcccagcccaagctggagggccctggggcccccacccagggcggcagcaaggaggccccagctggctgcagtgatgcccagcctgtgggcccagaatatgtggaggaggtgttcagtgatgagggccgggtgctgcgcttccactgcaagctgtgtgagtgcagcttcaatgacctgaatgccaaggacctgcacgtgcggggccgccgccaccggctgcagtacaggaagaaggtgaacccagacctgcccatcgccacagagcccagcagccgggccaggaaggtgctggaggagaggatgaggaagcagaggcacctggccgaggagcggctggagcagctgcggcgctggcatgctgagcggcggcggctggaggaggagcccccccaggatgtgccccctcatgcccccccagactgggcccagcccctgctgatgggccggcctgagagccctgccagcgcccccctgcagcctggaagaagacctgccagcagtgatgacagacatgtgatgtgcaagcacgccaccatctaccccacagagcaggagctgctggccgtgcagagagctgtgtcccatgctgagcgggccctgaagctggtgtctgacaccctggccgaggaggaccggggcagaagagaggaggagggggacaagaggagctctgtggccccccagaccagggtgctgaagggcgtgatgagggtgggcatcctggccaagggcctgctgctgcggggggacagaaatgtgcggctggccctgctgtgcagcgagaagcccacccacagcctgctgcggcgcatcgcccagcagctgccccggcagctgcagatggtgacagaagatgaatatgaggtgtccagtgaccctgaggccaacatcgtcatcagcagctgtgaggagcccaggatgcaggtgaccatctctgtgaccagccccctgatgagggaggaccccagcacagatcctggggtggaggagccccaggctgatgctggagatgtgctgagccccaagaagtgcctggagagcctggccgccctgcggcatgcccgctggttccaggcccgggccagcggcctgcagccctgcgtcatcgtcatccgggtgctgcgggacctgtgccggcgggtgcccacctggggcgccctgcctgcctgggccatggagctgctggtggagaaggctgtgtcctctgctgctggccccctgggccctggagatgctgtgagaagagtgctggagtgtgtggccaccggcaccctgctgacagatggccctggcctgcaggacccctgtgagcgggaccagacagatgccctggagcccatgaccctgcaggagcgggaggatgtgacagccagcgcccagcacgccctgaggatgctggccttccggcagacccacaaggtgctgggcatggacctgctgccccccaggcaccggctgggcgcccgcttcaggaagaggcagaggggccctggagagggggaggagggcgctggggagaagaagaggggccggcggggcggggagggcctggtgtag

SEQ ID NO: 184966 - DNA, 2820 bp, Artificial Sequence
  derived and/or modified sequence
atggccaccagccagtacttcgacttcgcccagggcggcggcccccagtattctgcacagcctcctacactccctttacccacagtcggcgcgtcatacaccgcccagccgaccccaggaatggatcctgccgtcaaccctgcattcccacccgcagccccagcaggctacggcggctaccagccccattcaggccaggattttgcttacgggtctagacctcaggagccggtaccgaccgcgactaccatggctacatatcaggactcatacagttacggccagagtgcggctgccagaagctacgaagaccggccatactttcaatctgccgcccttcagtcaggacgcatgacagccgcagattctggccagcctggcactcaggaggcatgtggccagccgtcaccccacgggagtcactcacacgcgcagccgccccagcaggcccctatcgttgagtctggccagccagcttccactctgtctagcggatatacatatcccactgctacaggggttcagccagagtccagtgcatccattgttacctcttatccgccaccctcctacaacccgacctgcacagcttacacggctccctcgtaccctaactacgacgcatccgtgtactcagctgctagtccattctatccccctgcccagcccccacctccaccaggtcctccccagcaactccctccacccccagcccccgctgggagcggctcaagtccgagggcagacagcaaaccgcctctgccatccaagctccctaggcccaaggccgggcctcggcagctgcagttgcattattgtgatatctgcaagatctcctgcgccggcccacagacttacagagaacatctgggaggccagaagcataggaaaaaagaagctgctcagaagactggggtccaacccaatggatccccccggggggtgcaggcccaactgcattgcgacctctgcgctgtcagctgtaccggtgctgacgcttatgctgcccacatccgcggctcaaaacatcagaaagtctttaaactgcacgctaagctgggcaaacccattcccacactcgagcccgcactggccactgagtcaccccctggagctgaagccaaacccacctccccaacgggcccgagcgtctgtgcaagcagcaggcctgccctggctaaaagaccggttgctagcaaagctttatgtgaaggtcccccagaacctcaggctgcgggatgcaggccccaatggggcaaaccagcacagcccaagcttgagggccccggggctccaacccagggtgggtctaaggaagctcccgcaggttgcagcgatgcgcagccggtcggaccagaatatgtggaggaggtgttcagtgacgaaggacgggtgcttaggttccactgcaaactgtgcgaatgcagtttcaatgatctgaacgccaaggacctacacgtgagaggcagacgtcatcggctccaataccgcaaaaaggtgaatcccgacctgcccattgctacagaaccctcctcaagagctagaaaggtcctcgaagagcgaatgcgcaaacagcggcatcttgccgaggaacggctcgagcagcttagacgctggcatgctgagcggagacgtttagaagaggagcccccccaggatgtgccacctcacgcacctccagattgggcccagccgttacttatgggccgaccagaatctcccgctagcgctcccctgcaacccggccgtaggcctgcctcttcagatgaccggcatgtcatgtgtaagcatgcaacaatctatcctacagaacaggaacttttggctgtccagcgagccgtgtcccacgctgaacgggccttgaaactcgtcagcgatactctggcggaagaggatcggggaagacgggaggaagaaggggacaaacgctcttccgttgctccgcagactcgggtgctgaagggagtgatgagggtgggaatcttggcaaaaggcctgctcctgaggggtgacaggaacgtgagactggccctgttatgtagcgagaaacctacgcactctctgctgaggcgcatagctcagcagctccctcggcagttgcaaatggtgaccgaagatgagtacgaggtgtcttcagatcccgaggcaaatattgtgatttccagctgcgaggaacccaggatgcaggttaccattagcgtgacgagccccttgatgcgggaggacccttcaacagaccccggagttgaggaaccccaagccgacgccggcgacgtcctctctcctaagaagtgcttggagtctctagcagctttgcgacatgcaaggtggttccaggccagagcgagcggcctgcagccttgtgttatcgtcatccgtgtgctgcgagacctctgtagaagggttccaacatggggcgccttacctgcttgggcaatggaactattggtagaaaaggccgtgtctagcgcggcgggtcccctgggccccggagacgccgtgagaagagtgcttgaatgtgtggcaacaggcacactgctgacagacggccccggacttcaggatccctgtgaaagggaccaaaccgacgcattggaacccatgaccttgcaggagagagaggatgtgacagccagcgcccagcatgccctgcgtatgctggcctttcgacagactcataaagttctcgggatggacctacttccgcccagacatcggctgggggcgaggtttaggaagcggcagcggggcccaggcgaaggcgaagaaggcgctggcgagaaaaaaagaggaaggaggggaggtgaaggactcgtgtag

SEQ ID NO: 184967 - DNA, 2820 bp, Artificial Sequence
  derived and/or modified sequence
atggccacaagtcaatattttgattttgctcagggtggcggacctcagtattccgcacaaccccctacactgcccctccctaccgttggcgctagctatacagcccagccaaccccaggcatggatcccgcagtgaaccccgcatttccacctgcagctcctgctggctacggcggataccagcctcacagtggtcaggattttgcgtatggcagcaggccccaagaaccagttccaacggccacaactatggccacataccaagacagctactcctatggacagtccgcagctgctaggtcttatgaggacaggccgtatttccagagtgccgcattgcagtctggtcggatgaccgccgctgatagcggtcagcccggaacccaggaggcttgtggtcagccatccccacatggttcacatagccacgcacagcctcctcaacaggcgcctattgtggaaagtggccagcccgcatctacattgagcagtggctacacctatcctactgcaacgggggtacagccagaaagttccgctagcatcgtcacttcctatccacccccatcctacaatcctacttgtactgcctacacggctccaagttatccaaattacgacgcctccgtgtacagcgccgcttccccattttacccgccagctcagcccccacctcctcccggaccgcctcagcaactgcccccacccccagcccctgcaggttctggctcatccccacgggcagactcaaaaccgccactgccctcgaaactacctaggcctaaagcagggcctcgacagctgcagctgcactactgtgatatttgcaaaatctcttgtgcgggaccgcagacttatagagaacatctggggggtcagaaacataggaaaaaggaggcagcccagaagacaggcgtgcagcctaacgggtcacctcgcggagtgcaagcgcagctacactgcgacctgtgtgccgtaagctgcacgggcgcagatgcatatgctgcccacatacggggaagcaaacatcaaaaagtgttcaaactgcacgccaaactgggcaaaccgatccccaccttggaacccgcactcgcgaccgagagcccgccaggcgcagaggcgaagcctacatcacccaccggtccaagtgtttgtgccagctccagacctgcactggctaaacgcccagtcgcaagtaaagctctgtgtgagggacctccggagccccaggccgcaggatgcagacctcaatggggcaagccggctcagcctaaacttgaaggccctggggctccgacacagggcggttcaaaagaggccccagcaggatgttctgatgctcagcctgttggaccggagtatgtggaagaagtgtttagcgatgaaggcagggttctcagatttcactgcaagctgtgtgaatgttcctttaatgacctcaacgcaaaggacttacacgtgaggggcaggaggcatcggctacaatacagaaaaaaagtaaaccccgacctgcccatagccacagaacccagctcacgagccagaaaagtcctggaagagcggatgcgcaaacagcggcatctcgccgaagaaaggctggagcagctgaggagatggcatgccgaaagacgacgactggaggaggagcctcctcaggacgtcccccctcacgcccctcccgactgggcccagcccctgctgatgggacggcctgagagtcccgctagcgctccgcttcagcctggcaggcgaccggctagctctgatgatcggcacgttatgtgcaaacacgccactatatacccaacagaacaggagctgcttgccgtgcagagggctgtgagtcatgctgaaagggccctgaaactcgtgagtgacacgctggccgaggaagatcggggacgcagggaggaagaaggtgataagcgatcgagtgtagccccacagactcgcgttctgaaaggtgttatgcgggtgggaatactcgccaaaggcttgcttctccgtggggatcggaatgtgcggctcgccctgctatgctcagaaaagccaactcactctctcttgagacgtatcgcccagcagctgccacgccagttacagatggtaacagaggatgaatacgaggtgtcgtccgatccagaggccaacatcgttatttcgtcgtgtgaagagccgaggatgcaggtgaccatctctgtgacgtccccactgatgcgtgaggatcccagtaccgacccaggagtggaagagccgcaggcagatgcgggagacgttctctctccaaaaaaatgtctcgaatccctggctgccctgcgtcacgcgagatggtttcaggccagagctagcggtctgcaaccttgcgtgattgttattcgggttcttcgggatctttgccggagagtgccgacttggggcgcactgccggcatgggcaatggagttgttggtggagaaggcagtctcgtccgctgccggaccactgggcccaggtgatgccgtaaggcgggttcttgagtgtgtggccaccggaacactgctgactgatggacccggactccaggatccatgcgaacgggaccaaactgacgccctggagcccatgacattgcaggaaagagaggatgtaaccgcttcagcccaacacgccctgcggatgcttgcatttcgtcaaacccataaagttctgggaatggacctcttgcccccaagacatcgcctgggggcacggtttcgcaagaggcaacggggaccaggcgaaggtgaggaaggtgctggagagaagaagagggggagaaggggaggagaagggctggtgtag

SEQ ID NO: 184968 - protein, 2754 aa, Artificial Sequence
  derived and/or modified sequence
MAASERLYELWLLYYAQKDLGYLQQWLKAFVGAFKKSISLSSLEPRRPEEAGAEVPLLPLDELHVLAEQLHQADLEQALLLLKLFIILCRNLENIEAGRGQVLVPRVLALLTKLVAELKGCPPPQGRGTQLENVALHALLLCEGLFDPYQTWRRQRSGEVISSKEKSKYKFPPAALPQEFSAFFQESLQNADHLPPILLLRLIHLFCAVLAGGKENGQMAVSDGSVKGLLSVVRGWSRGPAPDPCLVPLALEALVGAVHVLHASRAPPRGPELRALLESYFHVLNADWPAGLSSGPEEALVTLRVSMLDAIPMMLACEDRPVLQATFLSNNCFEHLTRLIQNSKLYLQSRAPPEGDSDLATRLLTEPDVQKVLDQDTDAIAVHVVRVLTCIMSDSPSAKEVFKERIGYPHLQEVLQSHGPPTHRLLQELLNMAVEGDHSMCPPPPIRNEQPVLVLAQWLPSLPTAELRLFLAQRLRWLCDSCPASRATCVQAGLVGCLLETLSTGLALEARCQEQLLALLQALGRVSIRPMELRHLLRPRPGLDSEPGGAEAGKARHAGAVIRTLSGMARHQGPARALRYFDLTPSMAGIMVPPVQRWPGPGFTFHAWLCLHPMDTAPTPAPTRPLQRKQLYSFFTSSGSGFEAFFTAAGTLVVAVCTRKEYLTMSLPEVSFADSAWHCVAIVHVPGRRPFSQNLVHVYKDGHLVKTAPLRCPSLSEPFSSCCIGSAGYRTTTTTTGLPTPPVPATLAYTHPALTRSQSVPASTGLGWGSGLVAPLQEGSIDSTLAGTQDTRWGSPTSLEGELGAVAIFHEALQATALRTLCTLGPNETAPFKPEGELHELSTRLLLHYSPQACKNNICLDLSPSHGLDGRLTGHRVETWDVKDVVNCVGGMGALLPLLERVAAQPKEAEAGPAETHDLVGPELTSGHNTQGLVLPLGKSSEERMERNAVAAFLLMLRNFLQGHMVNQESLVQCQGPAIIGALLRKVPSWAMDMNVLMSAQLLMEQVAAEGSGPLLYLLYQHLLFNFHLWTLSDFAVRLGHIQYMSSIVREHRQKLRKKYGVQFILDALRTHYSPQRERPLAADDLRTVQTSLLGLAREFLVRSLSADDVQVTQTMLSFLAATGDDGQAVGALDLLLALLHGSLVQESLAVFLLEPGNLEVLLALLVRPGSLPLLPDRVCKILRRLQQNERLPERSRQRLRLRECGLQGLVACLPEGTVSPQLCQGLYKLFLGADCLNLSDLLAVVQLSLQADLSVRLDICRQLFHLIYGQPDVVRLLARQAGWQDVLTRLYVLEAATAGSPPPSSPESPTSPKPAPPKPPTESPAEPSDVFLPSEAPCPDPDGFYHALSPFCTPFDLGLERSSVGSGNTAGGGGSSGTLTPASQPGTPSPLDGPRPFPAAPGRHSSSLSNVLEDGSLPEPTISGDDTSNTSNPQQTSEEELCNLLTNVLFSVTWRGVEGSDEAAWRERGQVFSVLTQLGASATLVRPPDCIKRSLLEMMLESALTDIKEAPVGVLASLTQQALWLLRLLQDFLCAEGHGNQELWSEKLFEGVCSLLDRLGAWPHLANGTADLREMAQIGLRLVLGYILLEDPQLHAQAYVRLHMLLQTAVPARREEACYVLSKLEAALGRVLNTSSLESATDEAGSPLAAAAAAAAAERCSWLVPLVRTLLDRAYEPLGLQWGLPSLPPTNGSPTFFEDFQAFCATPEWRHFIDKQVQPTMSQFEMDTYAKSHDLMSGFWNACYDMLMSSGQRRQWERAQSRRAFQELVLEPAQRRARLEGLRYTAVLKQQATQHSMALLHWGALWRQLASPCGAWALRDTPIPRWKLSSAETYSRMRLKLVPNHHFDPHLEASALRDNLGEVPLTPTEEASLPLAVTKEAKVSTPPELLQEDQLGEDELAELETPMEAAELDEQREKLVLSAECQLVTVVAVVPGLLEVTTQNVYFYDGSTERVETEEGIGYDFRRPLAQLREVHLRRFNLRRSALELFFIDQANYFLNFPCKVGTTPVSSPSQTPRPQPGPIPPHTQVRNQVYSWLLRLRPPSQGYLSSRSPQEMLRASGLTQKWVQREISNFEYLMQLNTIAGRTYNDLSQYPVFPWVLQDYVSPTLDLSNPAVFRDLSKPIGVVNPKHAQLVREKYESFEDPAGTIDKFHYGTHYSNAAGVMHYLIRVEPFTSLHVQLQSGRFDCSDRQFHSVAAAWQARLESPADVKELIPEFFYFPDFLENQNGFDLGCLQLTNEKVGDVVLPPWASSPEDFIQQHRQALESEYVSAHLHEWIDLIFGYKQRGPAAEEALNVFYYCTYEGAVDLDHVTDERERKALEGIISNFGQTPCQLLKEPHPTRLSAEEAAHRLARLDTNSPSIFQHLDELKAFFAEVVSDGVPLVLALVPHRQPHSFITQGSPDLLVTVSASGLLGTHSWLPYDRNISNYFSFSKDPTMGSHKTQRLLSGPWVPGSGVSGQALAVAPDGKLLFSGGHWDGSLRVTALPRGKLLSQLSCHLDVVTCLALDTCGIYLISGSRDTTCMVWRLLHQGGLSVGLAPKPVQVLYGHGAAVSCVAISTELDMAVSGSEDGTVIIHTVRRGQFVAALRPLGATFPGPIFHLALGSEGQIVVQSSAWERPGAQVTYSLHLYSVNGKLRASLPLAEQPTALTVTEDFVLLGTAQCALHILQLNTLLPAAPPLPMKVAIRSVAVTKERSHVLVGLEDGKLIVVVAGQPSEVRSSQFARKLWRSSRRISQVSSGETEYNPTEAR

SEQ ID NO: 184969 - DNA, 7713 bp, Artificial Sequence
  derived and/or modified sequence
atggccgcttcagagaggttgtatgagctgtggttgctgtattatgctcagaaggacctgggttatctgcagcagtggctgaaagcctttgtcggcgcctttaaaaagtccatcagcctgagctctctcgaacctagaagacctgaagaggcgggggcagaagtccccctcttgcccctggatgagttgcacgtactggcagaacagctccaccaggccgatttagagcaagccctgctcctgttaaagctcttcattattctttgcagaaacctggaaaatatcgaggctggccgaggtcaagtgttggtacctcgcgtgctagcactcctaacaaagctagtggcggagctgaaaggatgtccacctccccaggggcggggcacgcagctggagaacgtggcccttcatgcactcctgttatgcgagggcttgtttgacccctatcagacctggcgcagacaaaggtccggagaagtgatttcttcgaaagaaaaaagcaagtacaaatttcccccagctgccctcccccaggagttctcagcgttttttcaggagtctctgcaaaatgcggaccacctcccacctattctgctactccggctgatccacctgttttgtgccgtactggctggcggtaaagaaaacgggcagatggctgtgagtgatggaagcgtcaagggcctcctgtcagtcgtgcgaggctggtctcgaggaccagctcccgacccgtgcctggttcccttggccttagaagccctcgtcggagccgtgcatgttctacatgcctcgagggctccaccacggggccctgagctgagggcactgctggaatcctattttcacgtgctgaacgcagattggcctgccggcttatcttccggacccgaagaagctctcgtgacccttcgcgtgtcgatgttggatgccattcctatgatgctggcctgtgaagacaggccagtgctccaggcaaccttcctcagtaataactgttttgaacatctaactcgcctgattcagaattctaaactctacctccagagccgggcacctcctgaaggcgattcagacctggctacacgcctgctcacggagccagacgttcagaaagtgttggaccaggacactgatgctattgcagtgcacgttgtgagggtgctgacgtgcatcatgagtgattctcccagtgccaaggaagtctttaaagaaagaattggttatccgcatctccaagaagtgctgcaatcccatggcccacctacgcataggctgctgcaagaactgctgaatatggctgtggagggcgaccacagtatgtgcccaccaccgccgatcaggaatgagcagccagttttggtcctcgctcagtggcttccctcattgcccacggcagagttacggcttttcttggctcagaggctgcgctggctgtgcgacagctgccccgccagccgggcaacctgtgtccaagcaggcctggtaggctgcctcttagagacactgagcacgggcctggctctggaagcccggtgccaggaacagctcttagccttgttgcaggcgttggggcgggtttcaatccgcccaatggagcttcggcacctactgagaccaagacctggtctcgacagcgaaccaggcggtgcggaggccgggaaggccaggcatgctggtgctgtcattagaactctgagcggcatggcaaggcaccagggccctgcgcgggctttgcgctattttgatctcactccgtcaatggccggcatcatggtcccacccgtgcagcggtggcctggccccggcttcacattccacgcttggctttgcctccatcctatggacactgctccaacccctgccccgactcgacctctgcagaggaaacaactctatagtttcttcacatcctcagggtccggttttgaggctttcttcactgcagcaggtaccctggtggtggccgtgtgcactaggaaggaatatctgactatgtcactaccagaagtctctttcgcagactccgcttggcactgcgtggcaatcgtgcacgtgcccgggcgcaggccgttcagtcagaatctcgttcacgtttataaggacggacatttggttaagaccgcaccacttcgctgcccctctctatccgaacccttttctagctgttgcattggttcggcaggataccgaaccactacgaccacaacaggacttccaacaccccctgtgccagcgaccctcgcttacacgcatcctgccctgacacgtagccagagtgttcccgcttcaacgggcctgggctggggatcggggctggtggcccctcttcaggaaggtagtatcgactccacgctagcggggacccaggacactaggtggggcagcccaaccagcctcgagggggagcttggagcagtggctatttttcatgaggccctgcaggccaccgcactgcgtaccctgtgtaccctcggcccaaacgaaaccgcgcctttcaagccggagggtgagctgcacgaattgagtacacgcctgctgctgcattactcccctcaggcttgtaaaaacaacatctgtctggatctgagtccatcacatggtctggatggtcgtttgaccggacatcgcgtggagacctgggacgtgaaggacgtggtcaactgcgtcggaggcatgggggctttattaccgcttctcgaacgcgtggccgcccaacctaaagaagcagaggctggtcccgccgagacccacgacctggtcggccctgaactcacgagcggacacaacacacagggtctagtgctccccctggggaagagtagcgaagagcggatggaacgaaatgccgtggcagcctttctgctaatgctgagaaactttctacagggccacatggtgaatcaggagtctctggtgcagtgtcagggccctgccatcataggtgctctgctgagaaaagtcccctcctgggccatggacatgaacgtgttaatgtccgctcagctactgatggagcaagtggcggccgaaggctccggcccattgctgtatctcctgtaccagcacctgctatttaacttccatttgtggacactgagtgattttgccgtgagactcggccatatacagtatatgagcagcatcgtgcgagaacacagacagaagcttcggaagaagtatggggtgcagttcattctggacgcgctgaggacacattattcaccacagagggagcgaccgttagctgccgatgatctacgaactgtccagacctcactcctgggactggcaagagagttcctggtcaggtcactgagcgcggatgacgtccaggtcactcagacgatgctgtctttcctggcagccaccggagacgatgggcagatcctccgacgcctgcagcaaaacgagcggctgcccgaaaggagtcgacagcgcctgcgcctcagagagtgtggtttacagggactcgtcgcctgtctgcccgaaggaaccgtttcaccccagctctgccaagggctctacaagctattcttgggtgctggaagcggtaacaccgccggaggaggaggatcctcaggcaccctcaccccagccagccaacccgggaccccaagccctctcgatggacccaggcctttccctgccgcccctgggcgacacagctcctccctgagcaacgtgctggaggacggaagcctgccagaaccgaccatttctggcgacgataccagcaacactagtaatccacagcaaacaagtgaggaagaactgtgtaacctcctaacaaacgtcctcttttcggttacttggcgcggcgtggagggctctgacgaggccgcttggagggagcgtggccaagtttttagtgtgcttacccagctcggggcttccgccacgttagtccggccaccagattgcataaagagaagcctgctggaaatgatgcttgaatcagccctcacagatattaaggaggccccagttggggtgctggccagccttactcagcaggcactgtggctgctgcggctgcttcaggatttcttatgcgccgaaggacacgggaaccaggagctgtggtcagaaaaactgttcgaaggggtgtgtagcctcctggatcggctgggagcctggcctcatctcgctaatgggaccgcagatcttcgcgaaatggcccagatcgggctcagactggtactggggtacatcttgctggaagacccacaactgcacgctcaggcatacgtacgactccatatgttgctgcagacggccgtccctgccagacgagaggaggcttgttatgtgcttagtaagttggaggctgcattaggccgtgtgctgaacacaagctccctggaatctgcaaccgatgaggccgggagtccgctcgccgctgccgctgcagctgccgcggctgaacggtgttcctggctggtccctctggttcgcactctgctcgaccgagcttacgagcctttggggttgcagtgggggctgccctctttgccacccacaaatggtagtcctaccttttttgaagatttccaggccttctgcgccacgcctgaatggaggcactttatcgataaacaggtgcaacctaccatgagtcagtttgagatggatacatacgccaaatcccacgacctgatgagcggcttctggaatgcctgctacgatatgttgatgtccagtgggcagagaagacagtgggagcgagcccaatcacggagagccttccaagagctcgtactggaacctgcccagagaagggcccgtctggaagggctccgttacactgcggtgcttaaacaacaggccacccagcactccatggctctgttgcactggggggccctgtggcggcagctggcatctccctgcggggcctgggccctcagggatactcctatcccacgttggaaactaagttccgcggagacgtattcacgaatgagacttaagctcgtccctaatcatcatttcgatccccatcttgaggcatcagcccttagagacaacctgggcgaggtccctttgacgcctacagaagaggcaagtttacccctggccgttactaaagaagcaaaagtgagtacaccacccgagttgctgcaggaggaccagctgggggaagacgagctcgctgaactcgagacccctatggaggcagctgagctcgacgaacagcgagagaaactggtcctctccgcggagtgtcagcttgtcactgttgttgccgtggttcccggcctcttggaggtgaccacacagaacgtgtacttctatgacggctccactgaacgggtcgaaacagaggaaggaattggatacgacttccgtagaccattagcccaactgcgcgaggttcacctgcggcgtttcaatctccgcaggtccgccctggagctgttttttattgaccaggcaaattacttcctgaatttcccttgcaaagtgggaacaacaccagtgtcctctcccagccagaccccgagaccccagcctgggccaataccacctcatacacaggtgagaaaccaggtgtactcctggttactcaggctgcgtccaccttcacagggttacctgagttctcggtcaccccaggaaatgctgagagctagcggcctgacacagaaatgggtgcaaagggagatttccaatttcgaatacttaatgcagctgaatactatcgctggcagaacttataacgacttatctcagtaccctgtctttccttgggtcctccaagattatgtcagtccgactttggatttgtccaatcccgctgtcttccgcgacctgtccaagccaatcggcgtggtgaatccgaagcacgctcaactggtgcgagaaaaatatgagtctttcgaggaccctgcaggaacgatagacaagtttcactacgggactcactactccaatgcggccggagtcatgcattaccttatccgcgtcgaaccttttacctccctgcacgttcaacttcaatctggacgatttgattgttctgatcggcaattccacagtgtcgcggccgcttggcaggcgagactagagagccctgccgacgtcaaggagttgatccccgagtttttctattttcctgattttctggaaaatcagaatgggtttgacctcgggtgcttgcaactgactaacgaaaaagtgggtgatgtcgtcctaccaccctgggcctcatcaccagaagatttcattcagcaacacaggcaggcactcgagagcgaatatgtttcggcacacctccatgaatggatcgacctcattttcggatataagcaacgtggcccagctgcagaggaggctttaaacgtattctactactgtacctatgagggcgctgtcgacttagaccatgtcacagatgagagagagagaaaagctttagaggggataatctcgaatttcggacagaccccctgtcaactcctgaaggagccccacccaacacgcctcagtgcagaggaggccgctcaccgtctggctagactcgacactaacagcccatctatctttcagcatttggacgagctgaaggcattcttcgccgaagtggtaagtgatggagtccccttggtacttgcactggtgccacataggcagccgcactcatttataactcagggctccccagacctgctggtgacagtctcagcaagtgggttgctgggcacccattcgtggctcccctacgaccggaatatctccaattattttagcttcagtaaggatcctaccatgggatcccacaagacccaaagattattgtctggtccctgggtccccggctcaggagtttccggccaagccttagcagttgcgcctgacggaaaactgctcttctctggcggccactgggacggctcgctgcgagtgacggcccttccaagaggcaaattgctgtcccagcttagttgccacctagacgtggttacatgcctggccttggatacctgcggcatctatctgatctctggatctcgggatacgacctgcatggtgtggagattgctccaccaggggggtctgtccgtagggctagcaccgaaacctgttcaggtattgtacgggcacggagcagccgtgtcctgtgtagcaatctccactgagttagacatggctgtgtccggctccgaggacggaactgtgatcattcacactgtgcgacgtggacagtttgttgccgccttgaggcccctgggagcaacctttcctggacccatcttccatcttgctctcggcagcgagggtcagattgtcgtccagagctccgcatgggagcgcccgggcgcccaagtgacgtattctctccacctatacagtgtcaacggcaagctacgcgcatcactcccactcgcagaacagcctacagccttgaccgtcaccgaggactttgtgcttcttggcactgctcaatgtgcactgcacatcctccagctgaacaccctccttcccgctgctcctcctttaccgatgaaagtggccatccgatctgttgccgttactaaagagcgatcgcacgtgctggttgggctggaggacgggaaactgattgttgtggtggccgggcagccgagtgaagtaagaagcagtcaattcgctaggaagctgtggaggagtagtcgccgaatatcgcaggtctccagcggcgagacggaatacaatcctacagaagccagatag

SEQ ID NO: 184970 - DNA, 2094 bp, Artificial Sequence
  derived and/or modified sequence
atgcttcgggcctcgggcctgacgcaaaagtgggtgcaacgggagatctcaaactttgagtatctcatgcagctgaacactatcgccggacggacatataacgaccttagccagtaccccgtttttccttgggtgcttcaggactacgtgtccccaacactcgatctatctaacccagctgtgtttcgagacttaagtaagccaattggggtcgtgaaccctaaacatgcacagctggtgcgggagaagtacgagtccttcgaggatcccgcaggcacaatagacaaattccactatggcacccattacagcaatgcggcaggggttatgcattatctgattagggtcgagccattcacaagtctccatgtgcagctccaaagtggacgttttgattgtagtgacaggcagtttcatagcgtggctgccgcctggcaggcacgactcgaatcgcctgcggatgtcaaggagcttatcccagaattcttctatttccctgactttctcgagaaccagaacggtttcgacctaggatgccttcaactaaccaacgaaaaagtgggcgacgttgtccttcccccctgggcaagttctcctgaagactttattcagcagcacagacaggctcttgagtctgagtacgtttcggcacacctgcatgaatggattgatctgatcttcggctacaagcaacgcgggcccgcagccgaggaggctctgaatgtgttctattattgcacttacgagggtgccgtggacttagaccacgtcactgacgagagagagcggaaagctctggaggggatcatatccaacttcggacagactccgtgccagttactgaaggagccacatcctacgcggctctctgcagaggaggccgcacatcgactggccaggctcgatacaaattctccatcaatcttccagcacttggacgagttaaaagcttttttcgccgaggtggtttctgacggagtgccactagttctggccctggtcccgcatcgccagccacacagtttcatcactcaggggtcgccggacctactggttactgtatcagcatctggcttactaggcactcatagctggcttccttatgacagaaatatttcgaactacttttcattctcaaaggatcctacaatgggatcacacaaaacccaacggctgttgagcggcccgtgggtgccgggaagtggagtgagcggtcaggcactagccgttgcgccagacgggaagttactcttttcgggcgggcactgggatggttcactgcgagtgactgccctacccagaggaaagctcctatcacaactttcatgccacctggacgttgtgacatgtctggcactggatacctgtggaatctaccttatctcgggatcacgggacaccacatgcatggtctggcgactcttgcatcagggcggcctgtctgttggattagccccgaaacctgtccaagtgctctacgggcacggcgcagccgtaagctgcgtcgcaatttccacagaactggatatggccgtgtcaggctccgaggacggtactgtcattatacacaccgtcaggcggggtcagtttgtggctgccctgaggccgctcggcgccacatttccgggaccaattttccacttggcattagggtctgagggacagattgtcgttcagtcttccgcatgggaaagacccggagctcaggtaacatattcactgcatctgtacagcgtgaatggtaagttacgagcctcactgcctcttgccgaacagcccaccgctttaaccgtgacagaagacttcgtactgctcgggacagctcaatgtgccctgcacatcctgcaacttaacacgttgcttcctgcagcgcctccactgccaatgaaggtcgccattaggtccgtggctgttactaaggagagatcccatgtcttagtggggctcgaagacggaaagctcatcgtggtggttgcaggccagccgagcgaagtgaggagttcacagtttgctcggaagctctggcgctccagcaggaggataagccaagtgagctccggcgagactgaatacaatccaacagaggccagatag

SEQ ID NO: 184971 - DNA, 8265 bp, Artificial Sequence
  derived and/or modified sequence
atggcggcatccgagcggctctacgagttgtggctgctctactatgcacagaaggatctcggttatctacagcaatggctgaaggccttcgtgggcgcttttaaaaagagcattagcctttcatccttggaaccaagacgcccagaagaagccggcgctgaagtgcctctcttacccctggatgagctgcatgtcctcgccgagcaattgcaccaggctgatctggagcaggctctcctgctactcaaactcttcatcattttgtgtagaaacctggagaacatagaagcaggccgggggcaggtgttggttccacgggtgttggctctcttgacaaagctggtggccgaactgaaaggctgtcctccaccccaaggcagaggtacccaattagagaacgtggctctccacgcactgctcctgtgtgaaggtctgtttgacccataccaaacctggcggcggcagcgtagtggtgaggtgatttcgtccaaggagaagtccaaatacaaatttccccccgctgccctcccccaagaattttcggccttttttcaagagagcttgcaaaatgccgatcatctgccccccattctcttacttcggttgattcatctattctgcgcggtgttagcaggtggcaaggaaaatggacagatggctgtgtcagatgggtccgtcaagggcctgctttccgtggtccgcggctggagtaggggacccgcaccagacccttgccttgttcctctggctctggaggccctggttggagcagttcatgtgctgcatgcttcaagagccccccctcgggggccagaattgagggctctgcttgaatcatacttccacgtgctcaatgctgactggcccgccgggttgagctcaggacctgaggaggcgctggtgaccctgcgggttagtatgctagacgccatacccatgatgctggcctgcgaggatagacccgttctccaggctacattcctatctaataattgctttgaacatctcacgagattaattcagaactcaaagttgtatctccagagtagggcaccacccgagggggacagcgacctcgccactaggttactcaccgagcccgacgtgcagaaggtgctggatcaggatacagacgcgattgcagttcacgtggtacgggttctgacctgtattatgtctgacagcccaagtgcaaaggaagtctttaaggaacggattggataccctcaccttcaggaggttctgcaatcccacggcccacccacgcaccgcctgctgcaggagctgttaaacatggcagttgaaggtgaccattctatgtgccctcctcctcccattcgcaatgagcagccggtgttggtcttagcccaatggcttccgtccttaccaactgccgaactgagactctttttggctcagaggctccgctggctctgcgacagctgtccggcatcccgtgccacatgcgttcaagctggcctggtgggctgccttctggaaaccctgtcgactggccttgcacttgaggccagatgtcaggaacaactcctggctttgctccaagcgcttggacgcgtgtcaattcgacctatggagttgcggcatctgttgaggccaaggcccggccttgactccgagccaggaggggctgaggcggggaaggcccgacacgcaggagctgtgattcggacattatccggaatggcgcggcaccagggacccgcgagggccctccggtactttgacctgaccccctccatggcaggaatcatggtccctcctgtccagcggtggcccggacccggctttaccttccacgcatggttgtgtctgcacccaatggataccgccccaacgccagccccaactcggcccctgcaacgcaagcagttatactcctttttcacttcttctgggagcggctttgaggcgttttttacggcggccgggacactcgttgtcgctgtgtgcacaagaaaggaatacctgaccatgagcctacccgaggtttctttcgcagatagtgcatggcattgcgtggctatcgtccacgtaccgggtagaagaccgttttctcaaaacctggtgcatgtgtataaagatggacacttagtgaaaaccgctcccctcaggtgccccagcctgtccgaaccttttagtagctgttgtatcggtagcgcaggttataggaccaccactacaacgaccggactccctacacccccggtgcccgccacattggcctacacccatccagccctaactaggtctcagtccgtccccgcatccacaggcctaggatggggatccggactagtggcacctctgcaggagggatctatcgattctactctggccggaacacaagacacccgatgggggagccccacctcactggaaggggagctgggcgctgtggctatttttcacgaagccctgcaggccacagctctgagaactctgtgtacattaggaccaaatgaaaccgctccctttaaacctgagggggagctgcacgaattgtctacgagacttttgctgcattatagccctcaggcgtgcaagaataatatttgcctcgatctgagcccctctcacggactagatgggcgcctcacaggccatcgagttgaaacatgggacgtgaaggacgtggtgaactgcgttggaggcatgggagccctcctccctttacttgagagggtagctgcccaacctaaagaggcggaggcagggcctgctgagactcatgatctggtggggcccgaactgacaagtggacataatactcaggggctagtgctgccactgggcaaaagcagcgaagagcggatggaacgcaacgcagttgccgcattccttcttatgctccgcaactttctacaaggtcacatggtgaatcaggaaagcctggttcagtgtcaggggcctgcaattatcggggcgcttctgcgaaaggtcccttcctgggccatggatatgaatgtgctaatgtccgcccaactgctcatggagcaagtcgccgcagagggctctggaccactgctgtatctgctgtaccaacatcttcttttcaatttccatctgtggacacttagcgacttcgccgtgcgcctgggccatatccagtacatgtcctctattgtgcgcgaacacaggcagaaactgcgcaagaaatacggagtgcagttcatccttgacgccttgcggacccactattccccccagcgggagcggccgcttgcagccgacgatcttagaaccgttcagacttcactgctggggttagcacgggagtttctggtaaggtctctgagcgccgatgatgtgcaggtcacgcagactatgctgagcttcctggccgctacaggagatgacggccaggctgtcggtgccctcgacttactgctagcgctgctgcatgggtcgctcgttcaggagtccctcgccgtttttttgctcgagcctgggaatctcgaagtgttgctcgcgctccttgtgcgccccggctcccttcccctattgcccgacagagtgtgtaagatccttcgccgactccaacagaacgaacggcttccggagcgctccagacagagacttcgcctgcgggagtgcgggctgcagggtcttgttgcttgtctaccagaaggtactgtgtctcctcaactgtgccagggactgtacaaactgttcctcggtgccgactgcctgaatctctccgatctcctggccgtggttcagttgtctctgcaggccgaccttagtgtccggctggacatttgccgccagttattccatctcatctacggccagccagacgtggtacgtcttctggcccgccaagccggctggcaggatgttctgactagactgtacgtgcttgaagccgcaacggccggctccccccccccttccagtcccgagagtcccacctcccctaagcctgcaccacccaaacctcccaccgagagtcccgcagagccttctgacgtgtttttaccaagcgaggctccttgccccgaccccgatggcttttaccatgccctgagtccattctgcactccctttgaccttggactcgagcgaagtagcgtaggatccggaaatactgccggaggcggtggatcttcaggcacactgacacccgcctcacagcccggcacccctagccctctagacggccccagacccttcccagcggcccctggccggcactccagctccctgtctaacgtgctggaagatggctccctgcccgagcccactatttcaggagacgacaccagcaataccagcaacccacagcaaacgtctgaggaggagctctgtaacctcctgaccaatgtgcttttttcagtgacctggcgcggagtcgagggaagcgatgaagccgcctggagagagcggggacaagtgttcagtgttctgacccagcttggggcatccgccacattagttaggccgccagactgtatcaagaggtccctgttggaaatgatgttagaatcagccctgactgacatcaaggaggcccccgtcggagtcttagcttcactgacccagcaagctctctggctcctgagattactccaagacttcctatgtgccgaaggccacgggaaccaggaactatggtcggaaaagttattcgaaggcgtctgcagcttgttagatagactcggcgcctggccgcatttggctaatgggaccgcagatctgcgagagatggcacagattggccttcggctggtgctcggctatatccttctggaagaccctcaactccacgcccaggcctacgttcgcctgcatatgctgcttcagaccgccgtgccggcaagacgggaggaagcttgctatgtgctgtcaaagttggaggccgcgctcgggcgcgtgttaaacacctccagcctcgagagtgctaccgatgaggccgggtcacctttagccgctgcggccgcagctgccgctgccgaacgctgcagctggttggtgccgttagtgcgaactctgctcgacagagcctatgaacccctggggctacagtggggacttccatctctcccccctacaaacggttcccctacctttttcgaagacttccaagccttctgcgctacaccagaatggcggcactttattgataagcaagtgcaaccaacaatgagccagtttgagatggatacctatgcgaaatcgcatgacctgatgagtggtttttggaacgcgtgctatgatatgctcatgtcctcaggccagcgacgacaatgggaaagagctcagtcgagaagggcattccaggaactcgttctggagccagctcaacggagagctaggcttgaggggctgagatatacggccgtactcaaacagcaggcaacacagcattctatggcactcctccactggggggctctttggcgtcagttggcctctccatgtggtgcatgggccctgcgtgatacacccatacctaggtggaaactgagctccgctgagacctactcacggatgaggctgaaactggtccccaaccatcactttgacccccaccttgaggcctcagccttacgagacaacctgggcgaggtaccacttacccccaccgaggaggcgagtttgcccctggctgtgacaaaggaggccaaggtgagcaccccgccggaattacttcaggaagatcaattgggtgaagacgaactggccgaactcgaaaccccaatggaggcagcagaactggatgaacagcgagagaagctggtgctttctgccgagtgtcagctagtgaccgtggtggctgtggtgccaggacttcttgaagtaacaacacagaacgtctacttctatgacggttctaccgagagagtggaaactgaggagggaattggctacgattttcgacggcccctcgcccagctgcgggaagtccatctgaggaggttcaaccttcgtaggagcgcgttggaacttttcttcattgaccaggccaactattttcttaacttcccctgcaaagttggaactacccctgtatcaagcccatcacagactccaagacctcagcctggccccattccacctcatactcaggttcggaaccaagtgtatagctggcttctcaggctgcggcccccaagccaggggtatctctcctctcgatccccccaggagatgttgagggccagcgggctcacccagaagtgggtgcagcgagaaatctcgaacttcgaatacctcatgcagctgaacaccatagctgggagaacctacaacgatctttcacagtacccagtgttcccttgggtgctgcaggactacgtctcccccactctcgacctgtctaatcccgccgtgtttcgagatctgagtaagcccatcggtgtggttaatcccaagcacgcgcagttagtgcgcgagaaatacgagagttttgaagaccccgctggaaccattgataagtttcactatggtacgcattactctaatgctgcaggagtgatgcattatctaatccgcgtcgagccattcacctcgttgcacgttcagttgcagagcggccgcttcgattgcagcgatagacagtttcacagtgtagctgcggcttggcaggcgcggctggaatcgccagcagacgtgaaagaactaattccagaatttttttatttcccagacttccttgaaaatcagaacggatttgacctgggctgtctacagctgacaaatgagaaagttggtgatgttgtgctacccccttgggcatcaagccccgaagacttcatacaacagcaccgccaggccctcgagagcgagtatgtgtccgcgcacctccacgaatggattgatctgatttttggctataagcagcgagggcctgccgctgaggaggcgctaaacgtattctattattgcacttacgagggtgccgtcgatttagaccacgtgactgacgagagagagagaaaagcattggagggtataattagcaactttggccaaacaccttgccagctcctgaaggagccacacccaacccgtctgtccgccgaggaggcagctcatcgcctggcccgactggacactaattctccctcgatttttcagcatctcgatgaactgaaggccttcttcgcagaagtcgtctcggacggggtgccactggtgctagccctcgtgccccataggcagccccattcattcattactcagggctctcctgacctgttagtcaccgtctctgcctccggattacttggtacccacagttggctaccctacgaccgcaacatctccaattacttcagtttttcaaaggacccaacaatgggctcccataagacccagcgactgctgagtgggccatgggtgcccggtagcggagtcagtggccaggcactggcggtagctcccgatggtaagctgctgtttagcggagggcactgggacgggagcctgagggtaaccgccctgcctaggggaaaattgctaagtcagttgtcctgccatttggatgtggtaacttgcctggcattagacacgtgcggaatttacctgatttcgggctcccgggacacaacctgcatggtgtggaggttgttgcaccaaggaggcctctccgtcggcttggcacccaaacccgtgcaggtcctctacggccatggagccgcggtgagttgcgtggcaatctcaactgagctggatatggctgtttctggatcagaggatgggaccgtgatcatacataccgtacgtcgcgggcagtttgtggccgccctgagaccactgggcgcaacatttccaggacccatcttccatcttgccctcggcagtgagggacaaatcgtggttcaaagtagtgcctgggagcgcccgggcgctcaagtgacctactccctgcatctgtacagcgtgaacgggaaactgcgggcaagtttgcccttagctgagcagccaactgcactgaccgtaaccgaggacttcgtgctattaggcaccgctcagtgcgcactgcacatcctgcaactgaataccttgctgccggccgccccaccactgccgatgaaggtcgcaatccgatccgtagcggtgactaaggaaaggtctcatgtgctcgtcggactggaggatggtaagctgatagtcgtcgttgctgggcagcccagtgaggtgcggtcctcacaatttgcccggaagctgtggaggtcttctcgccggatctctcaagtttccagcggagagacagaatacaaccctacagaggcacggtag

SEQ ID NO: 184972 - DNA, 7713 bp, Artificial Sequence
  derived and/or modified sequence
atggccgccagcgagcggctgtatgagctgtggctgctgtactatgcccagaaggacctgggctacctgcagcagtggctgaaggcctttgtgggcgccttcaagaagagcatcagcctgagcagcctggagccccggcggcctgaggaggccggggctgaggtgcccctgctgcccctggatgagctgcacgtgctggccgagcagctgcaccaggccgacctggagcaggccctgctgctgctgaagctgttcatcatcctgtgcaggaacctggagaacattgaagctggccggggccaggtgctggtgccccgggtgctggccctgctgaccaagctggtggccgagctgaagggctgccccccaccccagggccggggcacccagctggagaatgtggccctgcacgccctgctgctgtgtgagggcctgtttgacccctaccagacctggaggcggcagaggtctggagaggtgatcagcagcaaggagaagagcaagtacaagttccccccagctgccctgccccaggagttcagcgccttcttccaggagagcctgcagaatgctgaccacctgccccccatcctgctgctgcggctcatccacctgttctgtgctgtgctggccggcggcaaggaaaatggccagatggctgtgtctgatggctctgtgaagggcctgctgtctgtggtgcggggctggagccggggccctgccccagacccctgcctggtgcccctggccctggaggccctggtgggcgctgtgcacgtgctgcacgccagccgggccccaccccggggccctgagctgcgggccctgctggagagctacttccacgtgctgaatgctgactggccagctggcctgagcagcggccctgaggaggccctggtgaccctgcgggtgtccatgctggatgccatccccatgatgctggcctgtgaggacaggcctgtgctgcaggccaccttcctgagcaacaactgctttgagcacctgaccaggctcatccagaacagcaagctgtacctgcagagccgggcccctcctgagggggacagcgacctggccacccggctgctgacagagccagatgtgcagaaggtgctggaccaggacacagatgccatcgctgtgcacgtggtgcgggtgctgacctgcatcatgtctgacagccccagcgccaaggaggtgttcaaggagcgcatcggctacccccacctgcaggaggtgctgcagagccacggcccccccacccaccggctgctgcaggagctgctgaacatggctgtggagggggaccacagcatgtgccccccaccacccatcagaaatgagcagcctgtgctggtgctggcccagtggctgcccagcctgcccacagctgagctgcggctcttcctggcccagaggctgcgctggctgtgtgacagctgcccagccagccgggccacctgtgtgcaggccggcctggtgggctgcctgctggagaccctgagcacaggcctggccctggaggcccgctgccaggagcagctgctggccctgctgcaggccctgggccgggtgtccatccggcccatggagctgcggcacctgctgcggcccaggcctggcctggacagcgagcctggaggagctgaggccggcaaggcccggcatgctggggccgtcatccgcaccctgagcggcatggcccggcaccagggccctgcccgggccctgcgctactttgacctgacccccagcatggccggcatcatggtgccccctgtgcagcgctggccaggccctggcttcaccttccacgcctggctgtgcctgcaccccatggacacagcccccaccccagcccccacccggcccctgcagaggaagcagctgtacagcttcttcaccagcagcggcagcggctttgaggccttcttcaccgctgctggcaccctggtggtggccgtgtgcaccaggaaggagtacctgaccatgagcctgcctgaggtgtcctttgctgacagcgcctggcactgtgtggccatcgtgcacgtgcccggccggcggcccttcagccagaacctggtgcacgtgtacaaggatggccacctggtgaagacagcccccctgcgctgccccagcctgtctgagcccttcagcagctgctgcatcggcagcgctggctaccgcaccaccaccaccaccaccggcctgcccaccccacctgtgcctgccaccctggcctacacccacccagccctgaccaggagccagagcgtgcctgccagcacaggcctgggctggggcagcggcctggtggcccccctgcaggagggcagcattgacagcaccctggccggcacccaggacacccgctggggcagccccaccagcctggagggggagctgggcgctgtggccatcttccacgaggccctgcaggccacagccctgcggaccctgtgcaccctgggccccaatgaaacagcccccttcaagccagagggggagctgcacgagctgagcacccggctgctgctgcactacagcccccaggcctgcaagaacaacatctgcctggacctgagccccagccacggcctggatggccgcctgaccggccaccgggtggagacctgggatgtgaaggatgtggtgaactgtgtgggcggcatgggcgccctgctgcccctgctggagcgggtggccgcccagcccaaggaggccgaggccggccctgctgagacccatgacctggtgggccctgagctgaccagcggccacaacacccagggcctggtgctgcccctgggcaagagcagcgaggagaggatggagagaaatgctgtggccgccttcctgctgatgctgaggaacttcctgcagggccacatggtgaaccaggagagcctggtgcagtgccagggccctgccatcatcggggccctgctgaggaaggtgcccagctgggccatggacatgaatgtgctgatgtctgcccagctgctgatggagcaggtggccgctgagggcagcggccccctgctgtacctgctgtaccagcacctgctcttcaacttccacctgtggaccctgagtgactttgctgtgcggctgggccacatccagtacatgagcagcatcgtgcgggagcaccggcagaagctgaggaagaagtatggagtgcagttcatcctggatgccctgcggacccactacagcccccagcgggagcggcccctggccgcagatgacctgaggacagtgcagaccagcctgctgggcctggcccgggagttcctggtgcgcagcctgtctgcagatgatgtgcaggtgacccagaccatgctgtccttcctggccgccactggagatgatggccagatcctgcggcggctgcagcagaatgaaaggctgcctgagaggagccggcagaggctgcggctgagagaatgtggcctgcagggcctggtggcctgcctgcctgagggcaccgtgagcccccagctgtgccagggcctgtacaagctgttcctgggcgccggcagcggcaacacagctgggggcggcggcagcagcggcaccctgaccccagccagccagcccggcacccccagccccctggatggcccccggcccttccctgctgcccctggccgccacagcagcagcctgagcaatgtgctggaggatggcagcctgcctgagcccaccatctctggagatgacaccagcaacaccagcaacccccagcagaccagcgaggaggagctgtgcaacctgctgaccaacgtgctcttctctgtgacctggaggggcgtggagggcagtgatgaggccgcctggagggagcggggccaggtgttttctgtgctgacccagctgggcgccagcgccaccctggtgcggcccccagactgcatcaagaggagcctgctggagatgatgctggagagcgccctgacagacatcaaggaggcccctgtgggcgtgctggccagcctgacccagcaggccctgtggctgctgcggctgctgcaggacttcctgtgtgccgagggccacggcaaccaggagctgtggagcgagaagctgtttgagggcgtgtgcagcctgctggaccggctgggcgcctggccccacctggccaacggcacagctgacctgcgggagatggcccagatcggcctgcggctggtgctgggctacatcctgctggaggacccccagctgcacgcccaggcctacgtgcggctgcacatgctgctgcagacagctgtgcctgcccggcgggaggaggcctgctacgtgctgagcaagctggaggccgccctgggccgggtgctgaacaccagcagcctggagagcgccacagatgaagctggcagccccctggccgctgctgctgctgctgctgctgctgagcgctgctcctggctggtgcccctggtgaggaccctgctggaccgggcctatgagcccctgggcctgcagtggggcctgcccagcctgccccccaccaacggcagccccaccttctttgaggacttccaggccttctgtgccaccccagagtggaggcacttcatcgacaagcaggtgcagcccaccatgagccagtttgagatggacacctacgccaagagccatgacctgatgagcggcttctggaatgcctgctatgacatgctgatgagcagcggccagaggcggcagtgggagcgggcccagagcagaagagccttccaggagctggtgctggagcccgcccagaggcgggcccggctggagggcctgcgctacacagctgtgctgaagcagcaggccacccagcacagcatggccctgctgcactggggcgccctgtggaggcagctggccagcccctgtggggcctgggccctgcgggacacccccatcccccgctggaagctgagcagcgctgagacctacagcaggatgaggctgaagctggtgcccaaccaccactttgacccccacctggaggccagcgccctgcgggacaacctgggggaggtgcccctgacccccacagaggaggccagcctgcccctggccgtgaccaaggaggccaaggtgtccaccccacctgagctgctgcaggaggaccagctgggggaggatgagctggccgagctggagacccccatggaggccgctgagctggatgagcagcgggagaagctggtgctgtctgctgagtgccagctggtgacagtggtggccgtggtgcccggcctgctggaggtgaccacccagaatgtgtacttctatgatggcagcacagagcgggtggagacagaggagggcatcggctatgacttcagaagacccctggcccagctgcgggaggtgcacctgcggcgcttcaacctgcggcgcagcgccctggagctgttcttcatcgaccaggccaactacttcctgaacttcccctgcaaggtgggcaccacccctgtgagcagccccagccagaccccccggccccagcccggccccatccccccccacacccaggtgaggaaccaggtgtacagctggctgctgcggctgcggccccccagccagggctacctgagcagccgcagcccccaggagatgctgcgggccagcggcctgacccagaagtgggtgcagcgggagatcagcaactttgagtacctgatgcagctgaacaccatcgccggccgcacctacaatgacctgagccagtaccctgtgttcccctgggtgctgcaggactatgtgagccccaccctggacctgagcaacccagctgtgttccgggacctgagcaagcccatcggcgtggtgaaccccaagcacgcccagctggtgcgggagaagtatgagagctttgaagatcctgctggcaccatcgacaagttccactacggcacccactacagcaatgctgctggggtgatgcactacctgatccgggtggagcccttcaccagcctgcacgtgcagctgcagagcggccgctttgactgcagcgaccggcagttccacagcgtggccgccgcctggcaggcccggctggagagccctgcagatgtgaaggagctgatccctgagttcttctacttcccagacttcctggagaaccagaatggatttgacctgggctgcctgcagctgaccaatgagaaggtgggagatgtggtgctgcccccctgggccagcagccctgaggacttcatccagcagcaccggcaggccctggagagtgaatatgtgtctgcccacctgcacgagtggattgacctgatcttcggctacaagcagaggggccctgctgctgaggaggccctgaatgtgttctactactgcacctatgaaggagctgtggacctggaccacgtgacagatgagcgggagaggaaggccctggagggcatcatcagcaactttggccagaccccctgccagctgctgaaggagccccaccccacccggctgtctgctgaggaggccgcccaccggctggcccggctggacaccaacagccccagcatcttccagcacctggatgagctgaaggccttctttgctgaggtggtgtctgatggagtgcccctggtgctggccctggtgccccaccggcagccccacagcttcatcacccagggcagcccagacctgctggtgacagtgtctgccagcggcctgctgggcacccacagctggctgccctatgacaggaacatcagcaactacttctccttcagcaaggaccccaccatgggcagccacaagacccagaggctgctgagcggcccctgggtgcccggcagcggcgtgtctggccaggccctggccgtggccccagatggcaagctgctcttcagcggcggccactgggatggcagcctgcgggtgacagccctgccccggggcaagctgctgagccagctgagctgccacctggatgtggtgacctgcctggccctggacacctgtggcatctacctgatcagcggcagccgggacaccacctgcatggtgtggaggctgctgcaccagggcggcctgtctgtgggcctggcccccaagcctgtgcaggtgctgtatggccacggggctgctgtgtcctgtgtggccatcagcacagagctggacatggctgtgtctggctctgaagatggcaccgtcatcatccacacagtgagaagaggccagtttgtggccgccctgcggcccctgggcgccaccttccctggccccatcttccacctggccctgggcagcgagggccagatcgtggtgcagagcagcgcctgggagaggcctggggcccaggtgacctacagcctgcacctgtacagcgtgaatggcaagctgcgggccagcctgcccctggccgagcagcccacagccctgactgtgacagaagattttgtgctgctgggcacagcccagtgtgccctgcacatcctgcagctgaacaccctgctgcctgctgccccacccctgcccatgaaggtggccatccgctctgtggccgtgaccaaggagaggagccacgtgctggtgggcctggaggatggcaagctgattgtggtggtggccggccagcccagcgaggtgcgcagcagccagtttgccaggaagctgtggaggagcagccgccgcatcagccaggtgtcctctggagaaacagagtacaaccccacagaggccaggtag

SEQ ID NO: 184973 - DNA, 2094 bp, Artificial Sequence
  derived and/or modified sequence
atgctgcgggccagcggcctgacccagaagtgggtgcagcgggagatcagcaactttgagtacctgatgcagctgaacaccatcgccggccgcacctacaatgacctgagccagtaccctgtgttcccctgggtgctgcaggactatgtgagccccaccctggacctgagcaacccagctgtgttccgggacctgagcaagcccatcggcgtggtgaaccccaagcacgcccagctggtgcgggagaagtatgagagctttgaggaccctgctggcaccatcgacaagttccactacggcacccactacagcaatgctgctggggtgatgcactacctgatccgggtggagcccttcaccagcctgcacgtgcagctgcagagcggccgctttgactgcagcgaccggcagttccacagcgtggccgccgcctggcaggcccggctggagagccctgcagatgtgaaggagctgatccctgagttcttctacttcccagacttcctggagaaccagaatggatttgacctgggctgcctgcagctgaccaatgagaaggtgggagatgtggtgctgcccccctgggccagcagccctgaggacttcatccagcagcaccggcaggccctggagagtgaatatgtgtctgcccacctgcacgagtggattgacctgatcttcggctacaagcagaggggccctgctgctgaggaggccctgaatgtgttctactactgcacctatgagggcgctgtggacctggaccacgtgacagatgagcgggagaggaaggccctggagggcatcatcagcaactttggccagaccccctgccagctgctgaaggagccccaccccacccggctgtctgctgaggaggccgcccaccggctggcccggctggacaccaacagccccagcatcttccagcacctggatgagctgaaggccttctttgctgaggtggtgtctgatggagtgcccctggtgctggccctggtgccccaccggcagccccacagcttcatcacccagggcagcccagacctgctggtgacagtgtctgccagcggcctgctgggcacccacagctggctgccctatgacaggaacatcagcaactacttctccttcagcaaggaccccaccatgggcagccacaagacccagaggctgctgagcggcccctgggtgcccggcagcggcgtgtctggccaggccctggccgtggccccagatggcaagctgctcttcagcggcggccactgggatggcagcctgcgggtgacagccctgccccggggcaagctgctgagccagctgagctgccacctggatgtggtgacctgcctggccctggacacctgtggcatctacctgatcagcggcagccgggacaccacctgcatggtgtggaggctgctgcaccagggcggcctgtctgtgggcctggcccccaagcctgtgcaggtgctgtatggccatggagctgctgtgtcctgtgtggccatcagcacagagctggacatggctgtgtctggctctgaagatggcaccgtcatcatccacacagtgcggcggggccagtttgtggccgccctgcggcccctgggcgccaccttccctggccccatcttccacctggccctgggcagcgagggccagatcgtggtgcagagcagcgcctgggagaggcctggggcccaggtgacctacagcctgcacctgtacagcgtgaatggcaagctgcgggccagcctgcccctggccgagcagcccacagccctgactgtgacagaggactttgtgctgctgggcacagcccagtgtgccctgcacatcctgcagctgaacaccctgctgcctgctgccccacccctgcccatgaaggtggccatccgctctgtggccgtgaccaaggagaggagccacgtgctggtgggcctggaggatggcaagctgattgtggtggtggccggccagcccagcgaggtgcgcagcagccagtttgccaggaagctgtggaggagcagccgccgcatcagccaggtgagcagcggggagacagagtacaaccccacagaggccaggtag

SEQ ID NO: 184974 - DNA, 8265 bp, Artificial Sequence
  derived and/or modified sequence
atggccgccagcgagcggctgtatgagctgtggctgctgtactatgcccagaaggacctgggctacctgcagcagtggctgaaggcctttgtgggcgccttcaagaagagcatcagcctgagcagcctggagccccggcggcctgaggaggccggggctgaggtgcccctgctgcccctggatgagctgcacgtgctggccgagcagctgcaccaggccgacctggagcaggccctgctgctgctgaagctgttcatcatcctgtgcaggaacctggagaacattgaagctggccggggccaggtgctggtgccccgggtgctggccctgctgaccaagctggtggccgagctgaagggctgccccccaccccagggccggggcacccagctggagaatgtggccctgcacgccctgctgctgtgtgagggcctgtttgacccctaccagacctggaggcggcagaggtctggagaggtgatcagcagcaaggagaagagcaagtacaagttccccccagctgccctgccccaggagttcagcgccttcttccaggagagcctgcagaatgctgaccacctgccccccatcctgctgctgcggctcatccacctgttctgtgctgtgctggccggcggcaaggaaaatggccagatggctgtgtctgatggctctgtgaagggcctgctgtctgtggtgcggggctggagccggggccctgccccagacccctgcctggtgcccctggccctggaggccctggtgggcgctgtgcacgtgctgcacgccagccgggccccaccccggggccctgagctgcgggccctgctggagagctacttccacgtgctgaatgctgactggccagctggcctgagcagcggccctgaggaggccctggtgaccctgcgggtgtccatgctggatgccatccccatgatgctggcctgtgaggacaggcctgtgctgcaggccaccttcctgagcaacaactgctttgagcacctgaccaggctcatccagaacagcaagctgtacctgcagagccgggcccctcctgagggggacagcgacctggccacccggctgctgacagagccagatgtgcagaaggtgctggaccaggacacagatgccatcgctgtgcacgtggtgcgggtgctgacctgcatcatgtctgacagccccagcgccaaggaggtgttcaaggagcgcatcggctacccccacctgcaggaggtgctgcagagccacggcccccccacccaccggctgctgcaggagctgctgaacatggctgtggagggggaccacagcatgtgccccccaccacccatcagaaatgagcagcctgtgctggtgctggcccagtggctgcccagcctgcccacagctgagctgcggctcttcctggcccagaggctgcgctggctgtgtgacagctgcccagccagccgggccacctgtgtgcaggccggcctggtgggctgcctgctggagaccctgagcacaggcctggccctggaggcccgctgccaggagcagctgctggccctgctgcaggccctgggccgggtgtccatccggcccatggagctgcggcacctgctgcggcccaggcctggcctggacagcgagcctggaggagctgaggccggcaaggcccggcatgctggggccgtcatccgcaccctgagcggcatggcccggcaccagggccctgcccgggccctgcgctactttgacctgacccccagcatggccggcatcatggtgccccctgtgcagcgctggccaggccctggcttcaccttccacgcctggctgtgcctgcaccccatggacacagcccccaccccagcccccacccggcccctgcagaggaagcagctgtacagcttcttcaccagcagcggcagcggctttgaggccttcttcaccgctgctggcaccctggtggtggccgtgtgcaccaggaaggagtacctgaccatgagcctgcctgaggtgtcctttgctgacagcgcctggcactgtgtggccatcgtgcacgtgcccggccggcggcccttcagccagaacctggtgcacgtgtacaaggatggccacctggtgaagacagcccccctgcgctgccccagcctgtctgagcccttcagcagctgctgcatcggcagcgctggctaccgcaccaccaccaccaccaccggcctgcccaccccacctgtgcctgccaccctggcctacacccacccagccctgaccaggagccagagcgtgcctgccagcacaggcctgggctggggcagcggcctggtggcccccctgcaggagggcagcattgacagcaccctggccggcacccaggacacccgctggggcagccccaccagcctggagggggagctgggcgctgtggccatcttccacgaggccctgcaggccacagccctgcggaccctgtgcaccctgggccccaatgaaacagcccccttcaagccagagggggagctgcacgagctgagcacccggctgctgctgcactacagcccccaggcctgcaagaacaacatctgcctggacctgagccccagccacggcctggatggccgcctgaccggccaccgggtggagacctgggatgtgaaggatgtggtgaactgtgtgggcggcatgggcgccctgctgcccctgctggagcgggtggccgcccagcccaaggaggccgaggccggccctgctgagacccatgacctggtgggccctgagctgaccagcggccacaacacccagggcctggtgctgcccctgggcaagagcagcgaggagaggatggagagaaatgctgtggccgccttcctgctgatgctgaggaacttcctgcagggccacatggtgaaccaggagagcctggtgcagtgccagggccctgccatcatcggggccctgctgaggaaggtgcccagctgggccatggacatgaatgtgctgatgtctgcccagctgctgatggagcaggtggccgctgagggcagcggccccctgctgtacctgctgtaccagcacctgctcttcaacttccacctgtggaccctgagtgactttgctgtgcggctgggccacatccagtacatgagcagcatcgtgcgggagcaccggcagaagctgaggaagaagtatggagtgcagttcatcctggatgccctgcggacccactacagcccccagcgggagcggcccctggccgcagatgacctgaggacagtgcagaccagcctgctgggcctggcccgggagttcctggtgcgcagcctgtctgcagatgatgtgcaggtgacccagaccatgctgtccttcctggccgccactggagatgatggccaggccgtgggcgccctggacctgctgctggccctgctgcacggcagcctggtgcaggagagcctggccgtgttcctgctggagcccggcaacctggaggtgctgctggccctgctggtgcggcccggcagcctgcccctgctgcctgacagagtgtgcaagatcctgcggcggctgcagcagaatgaaaggctgcctgagaggagccggcagaggctgcggctgcgggagtgtggcctgcagggcctggtggcctgcctgcctgagggcaccgtgagcccccagctgtgccagggcctgtacaagctgttcctgggcgctgactgcctgaacctgagtgacctgctggccgtggtgcagctgagcctgcaggccgacctgtctgtgcggctggacatctgccggcagctgttccacctgatctacggccagccagatgtggtgcggctgctggcccggcaggccggctggcaggatgtgctgacccggctgtatgtgctggaggccgccacagctggcagccccccacccagcagccctgagagccccaccagccccaagccagccccacccaagccacccacagagagccctgctgagcccagtgatgtgttcctgcccagcgaggccccctgcccagaccctgatggcttctaccacgccctgagccccttctgcaccccatttgacctgggcctggagaggagctctgtgggcagcggcaacacagctgggggcggcggcagcagcggcaccctgaccccagccagccagcccggcacccccagccccctggatggcccccggcccttccctgctgcccctggccgccacagcagcagcctgagcaatgtgctggaggatggcagcctgcctgagcccaccatctctggagatgacaccagcaacaccagcaacccccagcagaccagcgaggaggagctgtgcaacctgctgaccaacgtgctcttctctgtgacctggaggggcgtggagggcagtgatgaggccgcctggagggagcggggccaggtgttttctgtgctgacccagctgggcgccagcgccaccctggtgcggcccccagactgcatcaagaggagcctgctggagatgatgctggagagcgccctgacagacatcaaggaggcccctgtgggcgtgctggccagcctgacccagcaggccctgtggctgctgcggctgctgcaggacttcctgtgtgccgagggccacggcaaccaggagctgtggagcgagaagctgtttgagggcgtgtgcagcctgctggaccggctgggcgcctggccccacctggccaacggcacagctgacctgcgggagatggcccagatcggcctgcggctggtgctgggctacatcctgctggaggacccccagctgcacgcccaggcctacgtgcggctgcacatgctgctgcagacagctgtgcctgcccggcgggaggaggcctgctacgtgctgagcaagctggaggccgccctgggccgggtgctgaacaccagcagcctggagagcgccacagatgaagctggcagccccctggccgctgctgctgctgctgctgctgctgagcgctgctcctggctggtgcccctggtgaggaccctgctggaccgggcctatgagcccctgggcctgcagtggggcctgcccagcctgccccccaccaacggcagccccaccttctttgaggacttccaggccttctgtgccaccccagagtggaggcacttcatcgacaagcaggtgcagcccaccatgagccagtttgagatggacacctacgccaagagccatgacctgatgagcggcttctggaatgcctgctatgacatgctgatgagcagcggccagaggcggcagtgggagcgggcccagagcagaagagccttccaggagctggtgctggagcccgcccagaggcgggcccggctggagggcctgcgctacacagctgtgctgaagcagcaggccacccagcacagcatggccctgctgcactggggcgccctgtggaggcagctggccagcccctgtggggcctgggccctgcgggacacccccatcccccgctggaagctgagcagcgctgagacctacagcaggatgaggctgaagctggtgcccaaccaccactttgacccccacctggaggccagcgccctgcgggacaacctgggggaggtgcccctgacccccacagaggaggccagcctgcccctggccgtgaccaaggaggccaaggtgtccaccccacctgagctgctgcaggaggaccagctgggggaggatgagctggccgagctggagacccccatggaggccgctgagctggatgagcagcgggagaagctggtgctgtctgctgagtgccagctggtgacagtggtggccgtggtgcccggcctgctggaggtgaccacccagaatgtgtacttctatgatggcagcacagagcgggtggagacagaggagggcatcggctatgacttcagaagacccctggcccagctgcgggaggtgcacctgcggcgcttcaacctgcggcgcagcgccctggagctgttcttcatcgaccaggccaactacttcctgaacttcccctgcaaggtgggcaccacccctgtgagcagccccagccagaccccccggccccagcccggccccatccccccccacacccaggtgaggaaccaggtgtacagctggctgctgcggctgcggccccccagccagggctacctgagcagccgcagcccccaggagatgctgcgggccagcggcctgacccagaagtgggtgcagcgggagatcagcaactttgagtacctgatgcagctgaacaccatcgccggccgcacctacaatgacctgagccagtaccctgtgttcccctgggtgctgcaggactatgtgagccccaccctggacctgagcaacccagctgtgttccgggacctgagcaagcccatcggcgtggtgaaccccaagcacgcccagctggtgcgggagaagtatgagagctttgaagatcctgctggcaccatcgacaagttccactacggcacccactacagcaatgctgctggggtgatgcactacctgatccgggtggagcccttcaccagcctgcacgtgcagctgcagagcggccgctttgactgcagcgaccggcagttccacagcgtggccgccgcctggcaggcccggctggagagccctgcagatgtgaaggagctgatccctgagttcttctacttcccagacttcctggagaaccagaatggatttgacctgggctgcctgcagctgaccaatgagaaggtgggagatgtggtgctgcccccctgggccagcagccctgaggacttcatccagcagcaccggcaggccctggagagtgaatatgtgtctgcccacctgcacgagtggattgacctgatcttcggctacaagcagaggggccctgctgctgaggaggccctgaatgtgttctactactgcacctatgaaggagctgtggacctggaccacgtgacagatgagcgggagaggaaggccctggagggcatcatcagcaactttggccagaccccctgccagctgctgaaggagccccaccccacccggctgtctgctgaggaggccgcccaccggctggcccggctggacaccaacagccccagcatcttccagcacctggatgagctgaaggccttctttgctgaggtggtgtctgatggagtgcccctggtgctggccctggtgccccaccggcagccccacagcttcatcacccagggcagcccagacctgctggtgacagtgtctgccagcggcctgctgggcacccacagctggctgccctatgacaggaacatcagcaactacttctccttcagcaaggaccccaccatgggcagccacaagacccagaggctgctgagcggcccctgggtgcccggcagcggcgtgtctggccaggccctggccgtggccccagatggcaagctgctcttcagcggcggccactgggatggcagcctgcgggtgacagccctgccccggggcaagctgctgagccagctgagctgccacctggatgtggtgacctgcctggccctggacacctgtggcatctacctgatcagcggcagccgggacaccacctgcatggtgtggaggctgctgcaccagggcggcctgtctgtgggcctggcccccaagcctgtgcaggtgctgtatggccacggggctgctgtgtcctgtgtggccatcagcacagagctggacatggctgtgtctggctctgaagatggcaccgtcatcatccacacagtgagaagaggccagtttgtggccgccctgcggcccctgggcgccaccttccctggccccatcttccacctggccctgggcagcgagggccagatcgtggtgcagagcagcgcctgggagaggcctggggcccaggtgacctacagcctgcacctgtacagcgtgaatggcaagctgcgggccagcctgcccctggccgagcagcccacagccctgactgtgacagaagattttgtgctgctgggcacagcccagtgtgccctgcacatcctgcagctgaacaccctgctgcctgctgccccacccctgcccatgaaggtggccatccgctctgtggccgtgaccaaggagaggagccacgtgctggtgggcctggaggatggcaagctgattgtggtggtggccggccagcccagcgaggtgcgcagcagccagtttgccaggaagctgtggaggagcagccgccgcatcagccaggtgtcctctggagaaacagagtacaaccccacagaggccaggtag

SEQ ID NO: 184975 - DNA, 7713 bp, Artificial Sequence
  derived and/or modified sequence
atggccgccagcgagcggctgtacgagctgtggctgctgtactacgctcagaaggaccttggatatctgcagcagtggctgaaggccttcgtgggcgcattcaagaaaagtatctccctcagctccttggaaccaagaagaccagaggaggccggggctgaagtgccactgcttccccttgatgaactgcatgtgctagccgaacaactgcatcaggcagatttggagcaggcattgctgctcctcaagctctttatcatactttgtaggaaccttgaaaacatcgaggccggcagggggcaggtcctggttccacgggttctggcccttctgactaaacttgtggcagaacttaagggatgtcccccaccccaggggagaggaacccagctcgagaatgtggccttacacgcactgttgctttgcgagggtctgttcgacccttatcaaacttggcgccgccaacgctctggggaggtgattagcagcaaggaaaaatctaaatacaagttccctcccgcagccttgcctcaagaattctctgccttcttccaagagtccttgcagaacgcagatcatctgccccccatcctgttactcagactgatacatctgttctgcgctgtactggctggggggaaagaaaacggtcagatggctgtgagtgatggttcagtgaagggcctcctttccgtcgtgagaggttggtcaagaggccccgcccctgacccatgcctggtgccccttgctcttgaagctctggtgggcgctgtgcacgtcctgcacgcttccagggccccacctcggggccccgaactgagggctcttctggaaagctattttcatgtactcaacgcagactggccggcggggctcagttcggggcctgaggaggccctggtaactcttcgtgtgtccatgcttgatgctatccctatgatgctggcttgtgaggatagacccgtgctccaggctacttttctcagcaataattgtttcgaacacctcacccgcttaatccagaattcgaagctgtacctgcagtcccgggccccacctgagggtgactccgacctggccacaaggttgcttacagagcctgatgtgcagaaggtgttagaccaggatacggacgcaattgccgttcacgttgtgagggtccttacctgcattatgtccgacagcccatccgccaaagaggtattcaaagaacgcatcggctacccacatctccaggaagtcctgcaatctcacggccccccaacccacaggctgctgcaggagctcttaaacatggctgtggagggtgaccatagtatgtgtcctcctcctcctatcagaaacgaacagccggtcctggtgctcgctcaatggcttccctccctgcctacagccgaacttagactgtttctcgcgcagcggttacgatggctgtgtgatagttgccctgccagccgggccacctgcgttcaagctggtctggtgggatgcctgttagagaccctcagcacaggtctggcccttgaggcgcggtgccaggaacaattgctggccctccttcaggcccttggcagggtgtcaattagaccgatggagcttcggcatctcctacgccctcgccctggcctggacagtgaacctggaggggcagaggctgggaaggcacgacatgcgggagccgttatcaggactttgtctgggatggctaggcatcagggccccgccagagcgctcaggtatttcgacctcaccccttctatggccggcataatggtgccgccagtgcagagatggcccggtcctggctttaccttccacgcctggctttgtctgcatcctatggatacagcacctacgccagccccgacaagacctctccagaggaagcaactgtatagcttcttcaccagttccggaagcgggttcgaggcctttttcacagcagccgggacactggtcgttgcggtctgtacccggaaggaatatttgacaatgtctctgccagaagtgagcttcgccgatagtgcttggcattgtgtcgctatcgtgcatgttccaggacggcgtccattttctcagaacctagtccatgtgtacaaagacggccacttggtcaaaaccgccccattgcgatgcccctctctgtcagaaccatttagcagttgttgcatcggtagcgcaggctatcgaacgacaactaccacgacagggcttcccaccccgcccgtgcctgctacactagcgtacacccaccccgccctcacaaggtcacagtccgtaccagcctctactggtctaggttggggatcaggtctggttgctccattgcaggaggggtccatagattcaacactggccggaacccaggatacgcggtggggatctcccaccagtctggagggggagcttggggctgtggcaattttccacgaagctctgcaggcaactgctctgagaaccctctgtaccctcggcccaaatgagactgcacccttcaagcctgagggcgaattacatgaactgagcactcgtcttttgctccactattctccacaggcgtgtaaaaataacatctgccttgatctgtccccaagccatggattggacggcagactgaccggccaccgagttgagacctgggacgtgaaagatgtggttaattgcgtgggaggcatgggcgccttattaccacttttagaaagagtggccgctcaacccaaagaagcggaggcaggtccagcagagactcacgatctcgttggcccagaactgacgagtggccacaacactcaaggcctagtgctacctttggggaaaagctccgaggagcggatggaaagaaatgctgtggccgcgttcctgctgatgctgcgaaactttctccagggccatatggtgaatcaggagagcctagtgcaatgtcaggggcctgccattatcggcgcactgcttaggaaggtcccatcctgggctatggatatgaacgtgcttatgtccgctcagctcctgatggagcaggtcgccgcagagggaagcggtcccctgctctatttactgtaccaacacttattattcaatttccacttgtggaccctttctgactttgcagtgcggttgggacatatacagtacatgagctctattgtgagggagcataggcaaaagctaaggaagaagtatggggtccaattcatcctcgacgcactgcgaacgcattactctccccagcgcgaaagacccttagccgctgacgatcttcgcacagtgcaaactagcttacttggtctcgccagggaattcctcgtgcgcagcctgagcgccgacgatgtgcaggtgactcaaaccatgctttcatttttggcagccacaggggacgacggccagatcttgcgtcgtctccaacagaatgaacgactacctgagcgcagccgacagcggttgagactgagagagtgcgggctccaggggctcgtcgcttgcctacctgaggggacagtgtccccccagttgtgccaaggcttatacaaactgtttctaggggctgggtctggaaataccgcaggtggaggcggcagctctgggacactgacccctgcaagtcagcccggaactccgtcccccctggacggccctcggcccttccccgccgctcccgggaggcacagttccagtctgagcaacgttttagaagacggtagcctgcctgaacccacaatctcaggtgacgacaccagcaatacaagcaacccccagcagacttccgaggaagagctgtgcaaccttttaaccaacgtcctattcagcgtcacatggagaggtgttgaaggaagcgacgaggcagcatggagggagcgcggacaggtgtttagcgtgctaactcagctcggagcgtctgcaaccctggtccgaccgcctgactgtatcaagaggtctttgcttgaaatgatgctggaatccgcattgactgacattaaggaggcccctgttggggtgctggcatccctgactcagcaagccctatggctcctgcgtttgctgcaggatttcctttgtgctgaggggcacggcaaccaggaactctggagtgaaaagctatttgagggcgtgtgctccttgctggataggctcggggcgtggccgcacctggccaacggcactgctgaccttcgggaaatggcacagatcggattgaggctggttctgggatatattctgttggaagacccacaattgcacgctcaggcatatgtgcggctccacatgctactgcagacagccgtgcctgctcgtagggaagaggcatgctatgtgctctcaaaactggaggccgccttgggcagagtgctcaacacaagttcacttgaatcagccactgacgaagcaggtagccccttggccgcggcagccgccgccgccgcagcagagagatgtagctggctggtgcccttagtgagaacgctcctggatagggcatatgagcccctgggtcttcagtggggactgccttccctcccaccaaccaacggaagccctaccttttttgaagatttccaggctttctgtgcgactcccgagtggcgtcatttcatcgataagcaggttcaaccaacaatgtcacagtttgagatggatacttacgcaaagtcccatgacctcatgtcagggttctggaacgcatgttacgatatgctgatgtcttccgggcagcgcaggcaatgggaaagggcacagagcagacgggccttccaggaactcgttctggaacccgcacagcgccgtgctcggctggaaggtctgcggtacacagcggtcctaaaacagcaggcgacacagcattctatggcattgttgcactggggcgccctgtggaggcagttggcctctccgtgcggggcatgggcactcagggacaccccaattccgaggtggaaactgtcttcagcagagacctactctcggatgcgactgaaactggtgcccaaccaccattttgacccacatctcgaggccagcgctcttagggacaacctgggcgaagtgccactaacccctactgaagaggcttcactccccctcgcagttaccaaagaggctaaagtgtcaaccccgccagaactcttgcaggaggaccaactgggcgaggacgagctggccgagctggagactcctatggaggcagctgaattagacgagcagcgggagaagctggtactctcagcagagtgccaattggtaaccgtggttgctgttgtccctggcttactggaagtgacaacgcagaacgtctatttttatgatggctctaccgaacgtgtggagaccgaggagggtatcgggtacgacttccggcgccccctcgcccaacttcgcgaggttcacctccgccggttcaacctacgtcgctccgccctagagctattctttatcgatcaagcgaactacttcctgaacttcccatgcaaggtggggactacccctgtctcttcaccctcgcagaccccaaggcctcaaccaggccctatcccacctcacacccaggtgcgaaatcaggtctacagctggcttctaagactgagaccccccagccagggctacctgtcttctcgtagcccccaggaaatgctgcgcgcctccgggctcacccagaaatgggtgcaacgggaaattagcaatttcgagtatctgatgcagctcaatacgatagccggcaggacatacaacgacctctcacagtatccagtcttcccttgggtacttcaggattatgtgtcaccaactttagatttgtctaatcccgcagtgttcagggatctttccaaacccataggcgtggtcaacccgaagcatgctcagctggtccgcgagaagtacgagtcttttgaggacccagcaggaactatagacaaatttcactacggtacccactatagcaacgctgctggagtcatgcactacttgatcagggtcgaaccttttacttctctgcacgttcagctgcaatccgggcgctttgactgctccgacagacaattccactctgtggcagccgcatggcaggcccgcctggaatcacctgccgatgtgaaagaactcattcccgagtttttctatttccctgactttctagagaatcagaacgggttcgatttgggttgtctccagctgaccaatgaaaaggtcggcgatgtggtgcttcccccatgggcatcttccccagaagacttcattcagcagcaccgccaggccctcgagtctgagtacgtgtcggcacatctgcacgagtggatcgatctgatcttcggatacaagcagcgcggacctgccgccgaggaagcattgaatgttttctactattgcacctacgagggtgcagtggacctggaccacgttacagacgagcgtgaacggaaggctctggagggcatcatatcgaactttggacagactccttgtcagctgctcaaagagccacaccctactagactaagcgctgaagaggccgctcacagactcgccaggctcgatacgaatagcccgagcatctttcagcacctggacgaactgaaggctttcttcgccgaagtggtctctgatggtgtcccacttgtgttggccctagtgcctcaccggcagccacacagctttattactcaaggaagtcccgatcttctagtcacagtgagcgcttcaggcctgcttggaacccactcctggttgccttatgatcgtaatatttccaattacttcagctttagcaaagaccccactatgggttcacacaaaacgcaacgcctcctcagcggtccgtgggtcccgggctcgggggtgtctgggcaagcgttggctgtcgcgccagacggaaaattgctcttctccggtggccattgggacggaagtcttcgcgttactgctctgccccgaggcaaactgctgagccagttgtcatgccatctggacgtggtgacttgcctggctctggatacgtgtggaatttacctaatcagcggcagtcgcgacacaacgtgcatggtctggaggctactccaccagggagggttgtccgtcggcctcgctcccaaacccgttcaagtactgtacgggcatggcgccgccgtcagttgtgtagccatttctaccgagctggacatggctgtgtctggctctgaggatgggacagtgattatccacacagtccggcgcggccagttcgtcgcagcgttacgacctctgggagccacattccccggccctatattccatctggccctaggttcagaagggcaaatagtggtgcagtcatccgcctgggagagacctggagcacaggttacatactctctgcatctctacagtgtcaatgggaagctgcgggcatcacttccattggccgagcaacctaccgctctgactgttaccgaggacttcgtactgcttgggactgcacagtgcgctctgcacatcctgcagctgaatacgttacttcccgccgccccaccactgccaatgaaagtggcgattagatcggtcgctgtgacaaaggagcggtcccatgtgctggtgggattggaagacggtaaactgatcgtggtggttgctggtcagccctccgaggtgagatcctctcaattcgccagaaagctttggcgttcgtcaaggaggatcagccaggtgagctccggtgagactgagtataaccccactgaggcccggtag

SEQ ID NO: 184976 - DNA, 2094 bp, Artificial Sequence
  derived and/or modified sequence
atgctgcgggccagcggcctgacccagaagtgggtgcagcgggagatctcgaacttcgagtacttgatgcagttgaataccattgctggacggacttacaatgacctgtcacagtatcctgtcttcccttgggtgctccaggactatgtttctcccaccctggatctgagcaacccggctgtctttcgggacctgagcaaaccaattggtgtcgtgaatcccaagcatgcccagttggtgcgcgagaagtacgaatcttttgaagatcccgcaggcacaattgataagttccattacggaacccactacagcaatgcagctggggtgatgcattacctcatcagagttgagccgtttacaagtctgcacgtgcagctgcagtctggccgctttgactgctcagatcgccagttccatagcgtggcagctgcctggcaggcccggctggagtctcccgctgacgtgaaggaactcataccagagttcttttacttcccggatttcctggagaatcagaatggctttgatctcggctgtctccagttgaccaatgaaaaggtcggagacgtcgtgttgcccccatgggcctcttccccagaagacttcatccagcaacaccgtcaagcactggaaagcgagtacgtcagcgcacacctccacgagtggatcgatctcatcttcggatataaacagaggggcccagccgccgaagaagccttgaatgtattttattactgtacctacgaaggcgcagtagacctcgatcacgtgaccgatgagcgggaacgtaaggctctggagggaattatctctaattttggtcagacgccgtgtcagctgttgaaggagccacacccaaccagattatccgccgaggaggctgctcacagactggcccgcctcgatactaacagccccagtatctttcaacacttggatgagctcaaagccttttttgcagaggtggtgagtgacggcgtgccactagtgctggctctggtgcctcaccgtcaacctcactcgttcatcacccagggctcgcccgatctgttggtcactgtgtcagctagtggtctcctgggcactcattcttggctgccatatgacaggaacatctcaaactactttagcttttctaaggatcctaccatgggttcgcacaaaactcagagactgctgagtggcccttgggtacctggctccggagtgtccggtcaggcactggcagtggctccggacggcaagctgttgttctctggcggccattgggatggctccctgagagtgaccgcgcttccacgcggcaagttactgtcccagcttagctgccatctagatgtcgttacatgtttggctctggacacctgtgggatttaccttatcagcggctcacgtgataccacttgcatggtctggaggctgctccatcagggcggattatcagttggactagctcctaagcccgtccaggtgctctacgggcacggagcagccgtgtcatgcgtcgccatctcaacggaactggacatggccgtctctggctcggaggatggtacagtgatcattcatacagtgcggcgcggacagtttgtggccgctttgaggccactgggggccacatttcccggtccaattttccatctggcgctggggtcagagggtcaaattgtcgttcagtcttccgcatgggagcgacccggggctcaggtcacctacagcctgcatctttactccgttaacggcaagttacgggcctcgttgcccctggctgaacagcccactgcactgaccgtcaccgaggactttgtgttattaggcaccgcccagtgcgcactgcatatcctacagttaaatactctgctcccggccgctccaccactgcccatgaaggtggccatccgctctgtagctgtgactaaagaacgctcacacgtgctcgtcggactggaagacggaaaactcatcgtggtagtggccgggcaaccaagcgaggtgagatcctctcagtttgcccgcaagctctggaggagctccagacggatatcccaggtgtccagtggcgaaacagaatataacccgaccgaagcacgctag

SEQ ID NO: 184977 - DNA, 8265 bp, Artificial Sequence
  derived and/or modified sequence
atggccgccagcgagcggctgtacgagctgtggctgctgtactacgcacagaaagacttggggtacctccagcaatggctcaaagcctttgtaggagccttcaagaaaagtatttctttatcaagcctcgagccccgacgacctgaggaggctggggcagaggtcccgctgcttcctctagatgaactccacgtcctcgcggaacagctgcaccaagccgacttagagcaggctctgctcttactgaagctcttcattatcctgtgtcgtaatttagaaaatatcgaagcaggaaggggtcaagtcctggtgccacgagtcctcgccctcctgactaaactcgtcgctgagcttaagggctgcccgcccccacagggtagggggacccaattggaaaacgtggctttgcacgcgctcctactgtgtgaaggcctctttgatccataccagacctggcggaggcagcgatcaggggaagttatctctagcaaggaaaagagtaagtacaagttccctccagcggcacttccgcaagagttttcggccttctttcaggaatcactgcaaaacgcagaccacctcccccctatactcctgctgagacttatccatttgttttgtgccgtattggccgggggaaaggagaatgggcagatggctgtatcagatgggagcgtgaaaggactcctgtccgttgtgcggggatggagccgtggccctgcgcccgatccttgcctcgtccctctagccttagaggcactagtgggtgcggtgcatgtcctgcatgcctcccgggcgcctcccaggggaccagaactgagggctcttctcgagtcctacttccacgtgttgaatgccgattggcctgccggcctgtctagtggccctgaagaggcactggtaacactgcgtgtgagcatgctggacgctattccaatgatgctagcatgtgaagatcggcctgttctccaggcaaccttcctctctaacaattgtttcgaacatttgacgcgcctaatccaaaattcaaagctgtatcttcaatctcgagcacctccagaaggggacagtgatctggctacccgcctcctcaccgagcctgatgttcaaaaggttctagatcaagataccgatgctattgccgtgcacgtggttcgcgtgttgacctgcatcatgagcgacagccccagcgccaaagaagtcttcaaagaaagaattggctatccccacttgcaggaggtattacagtcgcatggcccacccacccaccggctgctgcaggagctgcttaatatggcagttgagggggaccacagtatgtgtccacctcctcccatacgaaatgaacagcctgtcttagtacttgcacagtggctgcccagcctgccgacagcagagctccgtctgttcctagcacagcggctccgctggctttgcgactcatgtccagcctctagagcgacttgcgtacaggctgggcttgtagggtgtttgctggagacattgtcaactgggctagctctggaagctcggtgccaggagcagctgctagccctccttcaggcactgggcagagtttctatcagaccgatggaactgcggcacttgttgcggccaagacctggattggatagtgagccaggcggtgctgaagccggaaaggccaggcatgccggagcagtcattcgtacgctgtctggaatggcacgtcatcaggggccggcccgcgctctgcgatacttcgaccttacaccttccatggctgggatcatggtgcctcctgtacagcggtggcccgggccaggattcaccttccatgcctggctgtgtttacacccaatggatactgcgcccacccctgcaccaactagacccctccagcggaagcagctgtacagctttttcacatctagtggatctggttttgaggccttcttcactgcagccggcactctggtggttgccgtctgtacacgcaaggagtacctcacaatgtccctccccgaagtaagcttcgccgattccgcctggcactgtgtggcaattgtccacgtccctggaagaagacccttttcccagaacctcgttcacgtgtacaaagacggccatctggtgaaaaccgcccccctccggtgtccttctctgtccgagcccttcagttcctgctgcataggtagtgctggctatcgtactaccaccacgaccacaggacttcccaccccacccgtgcccgccactcttgcttatacccatcctgccctgacccgctctcagagtgtgccagcatcgaccggactcggttggggtagcggactcgtggctcccctgcaggaaggttctattgatagcaccttagctggaacgcaggacacacgctggggctcccctacctcactggagggggagctcggagcagttgccatcttccacgaggcgctgcaagcaacggcccttcgtaccctgtgcaccttggggccgaacgagaccgcccctttcaagccagaaggcgagctgcatgagctctccacccgtctgctcctacattatagtccacaggcgtgtaagaacaacatttgtttggacttaagcccttctcacggccttgacgggcggttgaccgggcaccgggtggaaacctgggacgtgaaagacgttgtcaattgcgtcggaggaatgggcgccctgcttcccctgctcgagcgagtggcagctcaacctaaagaagccgaggctgggcctgctgaaactcacgacctggttggtcccgaactgacctcaggacataatacccaggggctcgtcctccctttgggcaagtccagcgaagaacgcatggagcgtaatgcggttgccgcttttctgctgatgctcagaaattttctccagggccatatggtgaatcaagagtccctggtacagtgccaggggcctgccattataggcgcgctgctgagaaaggtgcctagttgggctatggatatgaacgtcctgatgagcgcacaattgctgatggaacaggtcgccgcggagggctccggccccctcctgtaccttctttaccagcacctgctgttcaacttccatctctggacactgtcagacttcgccgtgcggctcgggcacatccaatacatgtcatcaatcgtgcgggaacaccgccagaagttgaggaaaaagtatggggtgcagttcattcttgatgctctgagaacacactacagtcctcaaagagagagaccactagcagccgatgatctgcgcacagttcagaccagtcttcttgggctagcccgtgaatttctcgtccggtccctgagtgcagatgatgtgcaggtgacccagaccatgctcagcttccttgccgcgacaggggatgatggccaggcagtgggtgccttagatctgctactcgctctgctccacggtagcctcgtacaggagtccctcgccgtgtttctcttggagccagggaatttggaagtcctcctagcactgctggtgcggccaggttccctccccctgctgcctgatcgggtttgcaagatcctgcgtcggctgcaacagaatgagcgcctccccgagcgcagtcggcagaggttacgcctccgggaatgcggtttgcaggggcttgtcgcttgtctgcccgaaggaactgtcagtccccagttgtgtcaggggctctacaagctttttctcggagccgattgcctgaacctctcggatcttctggccgtcgttcagctttccctgcaggcagatctcagtgtgagattggacatctgcaggcagttatttcacctgatctatggccagcccgacgtggtgcgcttactggcaagacaggctgggtggcaagacgtccttacaaggctgtacgtgttagaagctgccaccgccggcagccccccaccgagttctccagagtctccaacatcacctaagccagctccacccaagcctcccacagagtcgccagctgaacctagcgatgtgttcctaccatcggaggctccatgtcccgatcccgacgggttctatcacgcactgtcgccattttgcacgcccttcgatctgggcctggagcggtccagtgtgggaagcggaaacaccgccgggggcggcgggtcctcaggcactctgactccagctagccagcccggtacaccctcacccctcgatggtcccaggccattccccgcagctcccggccgccactcatcgtctctcagtaacgtgctcgaagatgggtccttgccagagcccaccatctccggcgatgacacaagcaatacgtccaaccctcaacagacatccgaggaggagctgtgtaatcttttgactaatgtgcttttctctgtgacctggagaggggttgagggctccgacgaggcagcctggcgcgaaagaggccaggttttctccgtacttacccaactgggggcctccgccactttagtcagaccaccagattgcatcaagaggtccctgctggaaatgatgctggaaagcgctctcacggacattaaggaggcacccgtcggcgtgctggcctcgctcactcagcaggccctgtggttactccgcctgcttcaggattttctctgcgccgaagggcacggtaaccaggaactttggtctgagaagctgttcgaaggggtgtgtagtctgttggatcggctgggagcctggccccatctggccaacggaacagcagacttgcgggagatggcgcagatcggccttcggctcgtgctggggtatattctcctggaagatcctcagctccacgctcaggcttatgtacgactccacatgttgctccagacagctgtgcctgctagaagagaggaagcttgttatgtgcttagtaagctggaagcggcactcggacgagtgttaaataccagcagcttagagtcagccactgacgaagctgggagccctctcgcggcggcagctgcagccgccgcagcagagcgatgcagttggttagtgccattagttcgtacactgctggatagggcgtacgagcccctcgggctccagtgggggcttccttccctgcctcctacgaacgggagtccgactttcttcgaagactttcaggccttttgtgccacacctgaatggagacacttcattgacaagcaggtccaacccaccatgtcgcagtttgaaatggacacttatgccaagtcgcatgatctcatgtccggcttttggaacgcctgctatgacatgctgatgtcaagcggccagcgacggcaatgggagagggcacagtcccggcgcgcgtttcaggagctggtgctagaaccggcccagagaagagctaggctggagggcctgagatacacggccgtactaaaacagcaggccacccagcactcaatggcccttctccactggggtgccctgtggagacagctggcctctccttgtggcgcttgggccctgcgtgacacccctataccccgctggaagctgtctagcgcagagacttactcccgtatgcgcctcaagttagttccaaaccatcatttcgaccctcaccttgaagcttcggcacttcgcgacaacctgggggaagttcctctgacacctactgaggaggcctcccttccgctggccgtcaccaaggaggctaaagtgagcactccccctgagctgcttcaggaagatcaacttggggaagacgagctcgctgagctggaaaccccaatggaggccgccgagctggacgaacagcgggagaagctggtgctgagtgccgagtgtcagctggtgaccgtggtagctgtggtacccggattgctggaggtgactactcaaaatgtttacttctatgacggctccaccgagcgcgtcgaaaccgaagagggtatcggctatgattttcggcggccactggctcagctcagggaggtccaccttcggcgatttaatctgcggcgaagtgcactcgagctcttttttatcgaccaggccaactacttcctgaatttcccctgcaaggtgggcacaaccccggtgagctctccaagccagaccccacggccgcaaccaggcccaatcccccctcacacacaagtgcgcaatcaagtgtactcttggttgcttcggctcagaccaccctcacaaggatacttatcttccagatcccctcaagagatgctgcgggcctccggacttacacagaaatgggttcagcgggagatttccaatttcgaatacttaatgcagctgaacaccatcgctgggcgaacatataacgatctaagccagtaccccgtttttccttgggtgctgcaagattatgtctccccaaccctcgatctgagcaatcccgccgtgttcagagatctgtccaaaccaatcggcgttgtaaacccaaagcatgcacaactagtcagggaaaaatacgagagttttgaggaccccgcgggcacaatcgataagttccactatggcactcattacagtaatgcggcaggcgtgatgcattacctgattcgggtggagccgttcaccagtctacatgttcagttgcagagcggccggtttgactgctcagatcgtcagttccactccgtcgcggcagcgtggcaggctagactcgagtctcccgccgacgtgaaggagctcatacctgaatttttttatttcccagattttctagagaaccaaaacgggttcgacctcggatgcctgcaactaacgaatgaaaaagtgggcgatgtcgtgctgccaccctgggcctccagccctgaagactttattcagcagcacagacaagccttagagagtgagtacgtgtctgctcatcttcacgagtggattgacctgatctttgggtataaacagagaggccctgccgcggaagaagctctgaacgtgttctactactgtacgtacgagggcgcggtggacctggaccacgtcaccgacgaacgtgagaggaaagctctggagggcatcatatcaaatttcggccagaccccatgtcaacttctgaaggagccccaccccactcgcttgtctgctgaagaagcagcccatcgtctcgcaagattggacaccaacagtccgtccatttttcagcacctggacgagctgaaggcattctttgctgaggttgtatccgatggagtgcctctcgtgcttgcgctggtacctcaccgccaaccacattctttcatcactcagggttcccccgatctcctcgttacagtgtccgcatccggactgctgggaactcattcctggctcccctatgaccggaatatatcaaactatttcagcttctctaaagatcctaccatgggatcgcacaagacgcagcgactcctgagcggtccttgggtgccgggctctggcgtgagcgggcaagcgctggcggtagcgcctgacgggaaactgctgtttagcggaggccactgggatggctcccttcgcgtaaccgccctgcctaggggaaaactgctttctcaactttcctgccacttggacgtagtgacctgcttagcccttgatacttgcgggatatacttgatcagcggctctagagacaccacttgcatggtgtggagactcttacaccaaggaggcctttccgtgggtctggcacccaaaccggtgcaggtgttgtatggccacggggcggcagtgtcatgtgtggccatcagcactgaacttgatatggctgtgtccggatcggaggatgggacggtgattatacacacagttagacgggggcaatttgtggctgccctcaggcccttgggcgccacttttcctggaccaatctttcatctcgcgctcgggagcgaggggcagatcgttgttcaatccagtgcatgggagcggcccggggcccaagtgacctattcactccacctttacagcgtgaatgggaaattgcgggcaagcctgcccctcgctgagcagccgaccgctcttaccgtcaccgaggactttgttctcctggggactgctcagtgcgctctgcacatcttgcagttgaacacactgctgcccgctgcaccgccacttcctatgaaggttgctatccggtccgtagccgtcactaaggaacgttctcatgtgctggtcgggttggaagacggtaagctcatcgtggtggtggcgggtcagccaagcgaggtccgctccagccagttcgcgcggaaattatggaggtcctccaggcgaataagtcaggtgtccagtggcgaaacagaatacaaccctaccgaggctcgctag

SEQ ID NO: 184978 - DNA, 8275 bp, Artificial Sequence
  derived and/or modified sequence
agcagacttgggtggctctgcgccgcggaggccacagccgcagacttccccagtagtaccgcgccgctccgccccggagtgacgccctccgcccatgggcctggccgagggcaaccggcgggcggcgcggaggaggcggcgacaggtggcgcgcagcagggccggagccgggccgggccatggccgcctcggagcggctgtacgagttgtggctgctctactacgcgcagaaggacctgggttacctgcagcagtggctgaaggcctttgtaggtgccttcaagaagagcatctcactgtcctctctggagccacgaaggccagaggaggcaggtgcagaggtcccgctgctaccactggatgagctgcatgtgctggccgaacagctgcaccaggctgacctggagcaagccctcctgctgctcaagctcttcatcattctctgcaggaacctggagaacatagaggcaggccggggccaagtgctagtgccccgagtgctggcactgttgaccaagttggtggcggagctgaaaggatgcccaccaccccagggccgaggcacgcagttggagaatgtggccctacatgctctgcttctctgcgagggcctctttgacccttaccaaacctggcggcgccagcgcagtggggaagtcatcagctccaaggagaagagcaaatacaagttccctcctgctgctttgccccaggaattcagcgccttcttccaagagagcctacagaatgcagaccacttgcctcccatactgctgttacgtctcatccacctcttctgcgccgtcctcgctggaggaaaggagaacgggcagatggctgtaagtgatggctctgtgaagggcctgctgagtgtggtgcggggctggagccgtgggccagccccggacccgtgcctagtgccactggctctagaggcactggtaggtgcagtccatgtcttgcatgccagccgcgcacctcctcgtggcccagagcttcgtgccctgcttgagagctacttccatgtccttaatgctgactggccagctggtctgagctcaggccccgaagaggcccttgtcaccctccgggtcagcatgctcgacgccatccccatgatgctggcatgtgaagaccggccagtgctgcaagccaccttcctcagcaacaattgctttgaacacctcactcggctcattcagaacagcaagctgtacctgcagtcccgggcgccccccgagggggacagtgacctggctacccggttactgactgagcccgatgtccaaaaggtcctggaccaagacacagacgccattgcagtccatgtagtcagagtgctgacctgcatcatgagtgactccccctcggccaaggaggtgtttaaggagcgcatcggctaccctcacctgcaggaggttctgcagagccatggtccccccacccatcggctgttgcaagagctgctcaacatggctgtggagggtgaccacagcatgtgcccacctccaccaatccgcaacgagcagccggtactggtgctggcgcagtggctgccgtcattgcccaccgctgagctgcggctcttcctagcgcaacgcctcaggtggctctgtgacagctgccctgccagccgtgccacctgtgtgcaggcaggcctggtgggctgcctgttggagacactcagcacagggctagccctggaggcccgctgccaagagcagctgctggcactgctacaagcactgggccgtgtatcaataaggcccatggagctgcgtcacctgctgcgcccccggccaggattggactcggaaccaggcggagctgaggctggaaaggcccgacacgcaggtgctgtcatccgcacattatcaggcatggccaggcaccagggtcctgcacgtgctctgcgctactttgacctcacgcccagcatggcgggcatcatggtaccccctgtacagcgatggccagggcctggcttcacctttcatgcctggctctgtctgcaccctatggatacagcacctacccctgcccccacccgaccactccagcgaaagcagctgtacagcttctttaccagcagcggctcagggtttgaggccttcttcacggcggccgggaccctggtggtggctgtgtgcacacggaaggagtatttgaccatgagtttgcccgaagtgtcctttgccgactctgcctggcactgcgtggctatcgtccatgtgcctgggcgccggcccttcagccagaacctggtccatgtctacaaagacggccatctggtcaagacagcaccccttcgctgcccctccctcagtgagcctttctcctcctgctgtatcggctccgctggataccgcacaacgaccaccaccacagggctgcccacaccaccagtccccgccaccctggcctacactcaccccgccctcacccgctcccagtcagtcccagcctccacagggcttggctgggggtccgggctggtggcccccctgcaggagggcagcatcgactctaccctcgcaggcacccaggacactcggtggggcagccccacatccctggagggtgagctgggggctgtggccatctttcacgaagccctgcaggcgacggctctgaggaccctgtgcaccctggggcccaatgagacggcacccttcaagcctgagggggagctgcatgagctcagcaccaggctgctcctccattactcacctcaggcttgtaagaacaacatctgcctggacctgtcccccagtcatgggcttgatgggcgcctgacgggccacagagtggagacctgggatgtgaaggatgtggtgaactgcgttgggggtatgggtgccctgctgcccctgctggagcgagtagctgcacagcccaaagaggctgaagcaggtccagctgaaacgcatgacctcgtgggtcctgaactgacctctggtcacaacacccagggcctggttctcccattgggtaaatcttcagaggaacggatggagaggaacgcagtggctgcttttctgctgatgctgcggaacttccttcagggtcacatggtgaaccaagagagcctggtgcagtgccaggggcctgccatcatcggggccctcctgcgaaaggtcccaagctgggccatggacatgaacgtgctcatgtccgcccagctgctgatggagcaggtggcagctgagggcagcgggcccctcctgtacctactctaccagcatttgctcttcaactttcacctctggaccctcagtgacttcgccgtgcgcctcggtcacatccagtacatgtccagcatagttcgggagcacagacagaagctgcggaagaagtacggcgtccagtttatcttggatgctctgcgcacccactacagcccgcagcgggagcgccccctggctgctgacgacctacgcaccgtgcagacctccctcctgggcctggcgagggagttcctggtgcggagtctctcagcagatgacgtgcaggtcacgcagaccatgctgagctttttggcggccacaggcgatgacggtcagatcctgcgcagactgcagcagaatgagcggctacctgagcggagccgccagcgcctccggctgcgggagtgtggtctccagggtctggttgcctgcttgcctgaggggactgtttccccccagctctgccagggcctctacaagctgttcctgggggcaggatcaggcaacactgctggtggtggcggcagcagtgggactcttactccagccagccagcccggcactccttcgccactggatgggccgcggccctttcctgctgctcctggccgccacagctccagtctctccaatgtgctggaggacggcagcctcccggagcccaccattagcggggatgatacctcgaacaccagcaacccacagcaaacctctgaggaagagttgtgcaatctgctcaccaacgtgctgttctcggtgacgtggcgtggcgtggaaggcagcgatgaggctgcctggcgggagcgtggccaggttttctcagtgctcacccagctgggggcctcagccacacttgtgcgcccaccagactgcatcaagcgcagcctcctggagatgatgctggagtcagccctgaccgacatcaaagaggcccccgtgggggtcctggccagcctcacccagcaagcgctttggctgctgcgtctgctgcaggacttcctgtgtgctgaaggccatggtaaccaggaactgtggagtgagaagctctttgaaggtgtatgcagcctacttgatcgcctgggagcctggccccacctggccaacggcacagctgatctccgtgagatggcgcagattggcctacggcttgtacttggctacatcctgctggaagacccacagctgcatgcccaggcctacgtgagattgcacatgctgctacagactgcagtgccagcccgccgcgaggaggcctgctatgtgctctccaagctggaggctgcactggggcgggtgctgaacacctcttccttggagtcagccactgatgaggcagggtccccacttgcagctgcagcagctgcagcagctgcagagcgctgctcctggctggtgccactggtgcgcacgctgctagaccgtgcctatgagccgctggggctgcagtggggactgccctccctgccacccaccaatggcagccccaccttctttgaagacttccaggctttttgtgccacacccgaatggcgccacttcatcgacaaacaggtacagccaaccatgtcccagttcgaaatggacacgtatgctaagagccacgaccttatgtcaggtttctggaatgcctgctatgacatgcttatgagcagtgggcagcggcgccagtgggagcgcgcccagagtcgtcgggccttccaggagctggtgctggaacctgcgcagaggcgggcgcgcctggaggggctacgctacacggcagtgctgaagcagcaggcaacgcagcactccatggccctgctgcactggggggcgctgtggcgccagctcgccagcccatgtggggcctgggcgctgagggacactcccatcccccgctggaaactgtccagcgccgagacatattcacgcatgcgtctgaagctggtgcccaaccatcacttcgaccctcacctggaagccagcgctctccgagacaatctgggtgaggttcccctgacacccaccgaggaggcctcactgcctctggcagtgaccaaagaggccaaagtgagcaccccacccgagttgctgcaggaggaccagctcggcgaggacgagctggctgagctggagaccccgatggaggcagcagaactggatgagcagcgtgagaagctggtgctgtcggccgagtgccagctggtgacggtagtggccgtggtcccagggctgctggaggtcaccacacagaatgtatacttctacgatggcagcactgagcgcgtggaaaccgaggagggcatcggctatgatttccggcgcccactggcccagctgcgtgaggtccacctgcggcgtttcaacctgcgccgttcagcacttgagctcttctttatcgatcaggccaactacttcctcaacttcccatgcaaggtgggcacgaccccagtctcatctcctagccagactcccagaccccagcctggccccatcccaccccatacccaggtacggaaccaggtgtactcgtggctcctgcgcctacggcccccctctcaaggctacctaagcagccgctccccccaggagatgctgcgtgcctcaggccttacccagaaatgggtacagcgtgagatatccaacttcgagtacttgatgcaactcaacaccattgcggggcggacctacaatgacctgtctcagtaccctgtgttcccctgggtcctgcaggactacgtgtccccaaccctggacctcagcaacccagccgtcttccgggacctgtctaagcccatcggtgtggtgaaccccaagcatgcccagctcgtgagggagaagtatgaaagctttgaggacccagcagggaccattgacaagttccactatggcacccactactccaatgcagcaggcgtgatgcactacctcatccgcgtggagcccttcacctccctgcacgtccagctgcaaagtggccgctttgactgctccgaccggcagttccactcggtggcggcagcctggcaggcacgcctggagagccctgccgatgtgaaggagctcatcccggaattcttctactttcctgacttcctggagaaccagaacggttttgacctgggctgtctccagctgaccaacgagaaggtaggcgatgtggtgctacccccgtgggccagctctcctgaggacttcatccagcagcaccgccaggctctggagtcggagtatgtgtctgcacacctacacgagtggatcgacctcatctttggctacaagcagcgggggccagccgccgaggaggccctcaatgtcttctattactgcacctatgagggggctgtagacctggaccatgtgacagatgagcgggaacggaaggctctggagggcattatcagcaactttgggcagactccctgtcagctgctgaaggagccacatccaactcggctctcagctgaggaagcagcccatcgccttgcacgcctggacactaactcacctagcatcttccagcacctggacgaactcaaggcattcttcgcagaggttgtcagtgatggtgtacccctggtgctagccctggtcccccaccggcagccccactccttcatcacccagggttccccagacctgttggtgactgtgagtgccagtgggctgctgggcacccacagctggttgccctatgaccgcaacataagcaactacttcagcttcagcaaagaccccaccatgggcagccacaagacgcagcgactgctgagtggcccgtgggtgccaggcagtggtgtgagtggacaagcactggcagtggccccggatggaaagctgctattcagcggtggccactgggatggcagcctgcgggtgactgcactaccccgtggcaagctgttgagccagctcagctgccaccttgatgtagtaacctgccttgcactggacacctgtggcatctacctcatctcaggctcccgggacaccacgtgcatggtgtggcggctcctgcatcagggtggtctgtcagtaggcctggcaccaaagcctgtgcaggtcctgtatgggcatggggctgcagtgagctgtgtggccatcagcactgaacttgacatggctgtgtctggatctgaggatggaactgtgatcatacacactgtacgccgcggacagtttgtagcggcactacggcctctgggtgccacattccctggacctattttccacctggcattggggtccgaaggccagattgtggtacagagctcagcgtgggaacgtcctggggcccaggtcacctactccttgcacctgtattcagtcaatgggaagttgcgggcttcactgcccctggcagagcagcctacagccctgacggtgacagaggactttgtgttgctgggcaccgcccagtgcgccctgcacatcctccaactaaacacactgctcccggccgcgcctcccttgcccatgaaggtggccatccgcagcgtggccgtgaccaaggagcgcagccacgtgctggtgggcctggaggatggcaagctcatcgtggtggtcgcggggcagccctctgaggtgcgcagcagccagttcgcgcggaagctgtggcggtcctcgcggcgcatctcccaggtgtcctcgggagagacggaatacaaccctactgaggcgcgctgaacctggccagtccggctgctcgggccccgcccccggcaggcctggcccgggaggccccgcccagaagtcggcgggaacaccccggggtgggcagcccaggggggtgagcggggcccaccctgcccagctcagggattggcgggcgatgttaccccctcagggattggcgggcggaagtcccgcccctcgccggctgaggggccgccctgagggccagcactggcgtctgcggccgcagcagcactttttgcacagtctggggcggggttccccggcttccaagtcgctgtttcgtcaaagcacgagggccgcctgtggccttaattcctaacggcggccccggttctcccttctcggcaataaaccaggcctagttttgtagc

SEQ ID NO: 184979 - DNA, 2781 bp, Artificial Sequence
  derived and/or modified sequence
tggtgctgtcggccgagtgccagctggtgacggtagtggccgtggtcccagggctgctggaggtcaccacacagaatgtatacttctacgatggcagcactgagcgcgtggaaaccgaggagggcatcggctatgatttccggcgcccactggcccagctgcgtgaggtccacctgcggcgtttcaacctgcgccgttcagcacttgagctcttctttatcgatcaggccaactacttcctcaacttcccatgcaaggtgggcacgaccccagtctcatctcctagccagactcccagaccccagcctggccccatcccaccccatacccaggtacggaaccaggtgtactcgtggctcctgcgcctacggcccccctctcaaggctacctaagcagccgctccccccaggagatgctgcgtgcctcaggccttacccagaaatgggtacagcgtgagatatccaacttcgagtacttgatgcaactcaacaccattgcggggcggacctacaatgacctgtctcagtaccctgtgttcccctgggtcctgcaggactacgtgtccccaaccctggacctcagcaacccagccgtcttccgggacctgtctaagcccatcggtgtggtgaaccccaagcatgcccagctcgtgagggagaagtatgaaagctttgaggacccagcagggaccattgacaagttccactatggcacccactactccaatgcagcaggcgtgatgcactacctcatccgcgtggagcccttcacctccctgcacgtccagctgcaaagtggccgctttgactgctccgaccggcagttccactcggtggcggcagcctggcaggcacgcctggagagccctgccgatgtgaaggagctcatcccggaattcttctactttcctgacttcctggagaaccagaacggttttgacctgggctgtctccagctgaccaacgagaaggtaggcgatgtggtgctacccccgtgggccagctctcctgaggacttcatccagcagcaccgccaggctctggagtcggagtatgtgtctgcacacctacacgagtggatcgacctcatctttggctacaagcagcgggggccagccgccgaggaggccctcaatgtcttctattactgcacctatgagggggctgtagacctggaccatgtgacagatgagcgggaacggaaggctctggagggcattatcagcaactttgggcagactccctgtcagctgctgaaggagccacatccaactcggctctcagctgaggaagcagcccatcgccttgcacgcctggacactaactcacctagcatcttccagcacctggacgaactcaaggcattcttcgcagaggttgtcagtgatggtgtacccctggtgctagccctggtcccccaccggcagccccactccttcatcacccagggttccccagacctgttggtgactgtgagtgccagtgggctgctgggcacccacagctggttgccctatgaccgcaacataagcaactacttcagcttcagcaaagaccccaccatgggcagccacaagacgcagcgactgctgagtggcccgtgggtgccaggcagtggtgtgagtggacaagcactggcagtggccccggatggaaagctgctattcagcggtggccactgggatggcagcctgcgggtgactgcactaccccgtggcaagctgttgagccagctcagctgccaccttgatgtagtaacctgccttgcactggacacctgtggcatctacctcatctcaggctcccgggacaccacgtgcatggtgtggcggctcctgcatcagggtggtctgtcagtaggcctggcaccaaagcctgtgcaggtcctgtatgggcatggggctgcagtgagctgtgtggccatcagcactgaacttgacatggctgtgtctggatctgaggatggaactgtgatcatacacactgtacgccgcggacagtttgtagcggcactacggcctctgggtgccacattccctggacctattttccacctggcattggggtccgaaggccagattgtggtacagagctcagcgtgggaacgtcctggggcccaggtcacctactccttgcacctgtattcagtcaatgggaagttgcgggcttcactgcccctggcagagcagcctacagccctgacggtgacagaggactttgtgttgctgggcaccgcccagtgcgccctgcacatcctccaactaaacacactgctcccggccgcgcctcccttgcccatgaaggtggccatccgcagcgtggccgtgaccaaggagcgcagccacgtgctggtgggcctggaggatggcaagctcatcgtggtggtcgcggggcagccctctgaggtgcgcagcagccagttcgcgcggaagctgtggcggtcctcgcggcgcatctcccaggtgtcctcgggagagacggaatacaaccctactgaggcgcgctgaacctgggcccaccctgcccagctcagggattggcgggcgatgttaccccctcagggattggcgggcggaagtcccgcccctcgccggctgaggggccgccctgagggccagcactggcgtctgcggccgcagcagcactttttgcacagtctggggcggggttccccggcttccaagtcgctgtttcgtcaaagcacgagggccgcctgtggccttaattcctaacggcggccccggttctcccttctcggcaataaaccaggcctagttttgt

SEQ ID NO: 184980 - DNA, 8667 bp, Artificial Sequence
  derived and/or modified sequence
gccggagccgggccgggccatggccgcctcggagcggctgtacgagttgtggctgctctactacgcgcagaaggacctgggttacctgcagcagtggctgaaggcctttgtaggtgccttcaagaagagcatctcactgtcctctctggagccacgaaggccagaggaggcaggtgcagaggtcccgctgctaccactggatgagctgcatgtgctggccgaacagctgcaccaggctgacctggagcaagccctcctgctgctcaagctcttcatcattctctgcaggaacctggagaacatagaggcaggccggggccaagtgctagtgccccgagtgctggcactgttgaccaagttggtggcggagctgaaaggatgcccaccaccccagggccgaggcacgcagttggagaatgtggccctacatgctctgcttctctgcgagggcctctttgacccttaccaaacctggcggcgccagcgcagtggggaagtcatcagctccaaggagaagagcaaatacaagttccctcctgctgctttgccccaggaattcagcgccttcttccaagagagcctacagaatgcagaccacttgcctcccatactgctgttacgtctcatccacctcttctgcgccgtcctcgctggaggaaaggagaacgggcagatggctgtaagtgatggctctgtgaagggcctgctgagtgtggtgcggggctggagccgtgggccagccccggacccgtgcctagtgccactggctctagaggcactggtaggtgcagtccatgtcttgcatgccagccgcgcacctcctcgtggcccagagcttcgtgccctgcttgagagctacttccatgtccttaatgctgactggccagctggtctgagctcaggccccgaagaggcccttgtcaccctccgggtcagcatgctcgacgccatccccatgatgctggcatgtgaagaccggccagtgctgcaagccaccttcctcagcaacaattgctttgaacacctcactcggctcattcagaacagcaagctgtacctgcagtcccgggcgccccccgagggggacagtgacctggctacccggttactgactgagcccgatgtccaaaaggtcctggaccaagacacagacgccattgcagtccatgtagtcagagtgctgacctgcatcatgagtgactccccctcggccaaggaggtgtttaaggagcgcatcggctaccctcacctgcaggaggttctgcagagccatggtccccccacccatcggctgttgcaagagctgctcaacatggctgtggagggtgaccacagcatgtgcccacctccaccaatccgcaacgagcagccggtactggtgctggcgcagtggctgccgtcattgcccaccgctgagctgcggctcttcctagcgcaacgcctcaggtggctctgtgacagctgccctgccagccgtgccacctgtgtgcaggcaggcctggtgggctgcctgttggagacactcagcacagggctagccctggaggcccgctgccaagagcagctgctggcactgctacaagcactgggccgtgtatcaataaggcccatggagctgcgtcacctgctgcgcccccggccaggattggactcggaaccaggcggagctgaggctggaaaggcccgacacgcaggtgctgtcatccgcacattatcaggcatggccaggcaccagggtcctgcacgtgctctgcgctactttgacctcacgcccagcatggcgggcatcatggtaccccctgtacagcgatggccagggcctggcttcacctttcatgcctggctctgtctgcaccctatggatacagcacctacccctgcccccacccgaccactccagcgaaagcagctgtacagcttctttaccagcagcggctcagggtttgaggccttcttcacggcggccgggaccctggtggtggctgtgtgcacacggaaggagtatttgaccatgagtttgcccgaagtgtcctttgccgactctgcctggcactgcgtggctatcgtccatgtgcctgggcgccggcccttcagccagaacctggtccatgtctacaaagacggccatctggtcaagacagcaccccttcgctgcccctccctcagtgagcctttctcctcctgctgtatcggctccgctggataccgcacaacgaccaccaccacagggctgcccacaccaccagtccccgccaccctggcctacactcaccccgccctcacccgctcccagtcagtcccagcctccacagggcttggctgggggtccgggctggtggcccccctgcaggagggcagcatcgactctaccctcgcaggcacccaggacactcggtggggcagccccacatccctggagggtgagctgggggctgtggccatctttcacgaagccctgcaggcgacggctctgaggaccctgtgcaccctggggcccaatgagacggcacccttcaagcctgagggggagctgcatgagctcagcaccaggctgctcctccattactcacctcaggcttgtaagaacaacatctgcctggacctgtcccccagtcatgggcttgatgggcgcctgacgggccacagagtggagacctgggatgtgaaggatgtggtgaactgcgttgggggtatgggtgccctgctgcccctgctggagcgagtagctgcacagcccaaagaggctgaagcaggtccagctgaaacgcatgacctcgtgggtcctgaactgacctctggtcacaacacccagggcctggttctcccattgggtaaatcttcagaggaacggatggagaggaacgcagtggctgcttttctgctgatgctgcggaacttccttcagggtcacatggtgaaccaagagagcctggtgcagtgccaggggcctgccatcatcggggccctcctgcgaaaggtcccaagctgggccatggacatgaacgtgctcatgtccgcccagctgctgatggagcaggtggcagctgagggcagcgggcccctcctgtacctactctaccagcatttgctcttcaactttcacctctggaccctcagtgacttcgccgtgcgcctcggtcacatccagtacatgtccagcatagttcgggagcacagacagaagctgcggaagaagtacggcgtccagtttatcttggatgctctgcgcacccactacagcccgcagcgggagcgccccctggctgctgacgacctacgcaccgtgcagacctccctcctgggcctggcgagggagttcctggtgcggagtctctcagcagatgacgtgcaggtcacgcagaccatgctgagctttttggcggccacaggcgatgacggtcaggcggtgggtgcgctggacctgctgctggccctgctgcacggttccctggtgcaggagtccttggctgtctttctgttggagccagggaacctcgaagtgctactggccctgctagtgcggccagggtcactgcccctgctgcccgatcgagtctgcaagatcctgcgcagactgcagcagaatgagcggctacctgagcggagccgccagcgcctccggctgcgggagtgtggtctccagggtctggttgcctgcttgcctgaggggactgtttccccccagctctgccagggcctctacaagctgttcctgggggcagattgcctgaacctctcagatctgctggctgtggtacagctgtccctccaggctgacctcagcgttcgcctagacatctgtcgccagcttttccacctcatctacggacagccagatgtagtgcggcttctggcccgacaggctggctggcaagatgtgctgacccggctatatgtcctggaggctgccacagccggcagcccccctccgtcttccccagagtcacctacctcccccaagccagccccacccaagccacccactgagtcacctgctgagccttcagatgtcttcctgccctcagaggccccctgccctgaccctgatggcttttaccatgctctctccccattctgcacgccctttgacctgggcctggaacggtctagtgtaggatcaggcaacactgctggtggtggcggcagcagtgggactcttactccagccagccagcccggcactccttcgccactggatgggccgcggccctttcctgctgctcctggccgccacagctccagtctctccaatgtgctggaggacggcagcctcccggagcccaccattagcggggatgatacctcgaacaccagcaacccacagcaaacctctgaggaagagttgtgcaatctgctcaccaacgtgctgttctcggtgacgtggcgtggcgtggaaggcagcgatgaggctgcctggcgggagcgtggccaggttttctcagtgctcacccagctgggggcctcagccacacttgtgcgcccaccagactgcatcaagcgcagcctcctggagatgatgctggagtcagccctgaccgacatcaaagaggcccccgtgggggtcctggccagcctcacccagcaagcgctttggctgctgcgtctgctgcaggacttcctgtgtgctgaaggccatggtaaccaggaactgtggagtgagaagctctttgaaggtgtatgcagcctacttgatcgcctgggagcctggccccacctggccaacggcacagctgatctccgtgagatggcgcagattggcctacggcttgtacttggctacatcctgctggaagacccacagctgcatgcccaggcctacgtgagattgcacatgctgctacagactgcagtgccagcccgccgcgaggaggcctgctatgtgctctccaagctggaggctgcactggggcgggtgctgaacacctcttccttggagtcagccactgatgaggcagggtccccacttgcagctgcagcagctgcagcagctgcagagcgctgctcctggctggtgccactggtgcgcacgctgctagaccgtgcctatgagccgctggggctgcagtggggactgccctccctgccacccaccaatggcagccccaccttctttgaagacttccaggctttttgtgccacacccgaatggcgccacttcatcgacaaacaggtacagccaaccatgtcccagttcgaaatggacacgtatgctaagagccacgaccttatgtcaggtttctggaatgcctgctatgacatgcttatgagcagtgggcagcggcgccagtgggagcgcgcccagagtcgtcgggccttccaggagctggtgctggaacctgcgcagaggcgggcgcgcctggaggggctacgctacacggcagtgctgaagcagcaggcaacgcagcactccatggccctgctgcactggggggcgctgtggcgccagctcgccagcccatgtggggcctgggcgctgagggacactcccatcccccgctggaaactgtccagcgccgagacatattcacgcatgcgtctgaagctggtgcccaaccatcacttcgaccctcacctggaagccagcgctctccgagacaatctgggtgaggttcccctgacacccaccgaggaggcctcactgcctctggcagtgaccaaagaggccaaagtgagcaccccacccgagttgctgcaggaggaccagctcggcgaggacgagctggctgagctggagaccccgatggaggcagcagaactggatgagcagcgtgagaagctggtgctgtcggccgagtgccagctggtgacggtagtggccgtggtcccagggctgctggaggtcaccacacagaatgtatacttctacgatggcagcactgagcgcgtggaaaccgaggagggcatcggctatgatttccggcgcccactggcccagctgcgtgaggtccacctgcggcgtttcaacctgcgccgttcagcacttgagctcttctttatcgatcaggccaactacttcctcaacttcccatgcaaggtgggcacgaccccagtctcatctcctagccagactcccagaccccagcctggccccatcccaccccatacccaggtacggaaccaggtgtactcgtggctcctgcgcctacggcccccctctcaaggctacctaagcagccgctccccccaggagatgctgcgtgcctcaggccttacccagaaatgggtacagcgtgagatatccaacttcgagtacttgatgcaactcaacaccattgcggggcggacctacaatgacctgtctcagtaccctgtgttcccctgggtcctgcaggactacgtgtccccaaccctggacctcagcaacccagccgtcttccgggacctgtctaagcccatcggtgtggtgaaccccaagcatgcccagctcgtgagggagaagtatgaaagctttgaggacccagcagggaccattgacaagttccactatggcacccactactccaatgcagcaggcgtgatgcactacctcatccgcgtggagcccttcacctccctgcacgtccagctgcaaagtggccgctttgactgctccgaccggcagttccactcggtggcggcagcctggcaggcacgcctggagagccctgccgatgtgaaggagctcatcccggaattcttctactttcctgacttcctggagaaccagaacggttttgacctgggctgtctccagctgaccaacgagaaggtaggcgatgtggtgctacccccgtgggccagctctcctgaggacttcatccagcagcaccgccaggctctggagtcggagtatgtgtctgcacacctacacgagtggatcgacctcatctttggctacaagcagcgggggccagccgccgaggaggccctcaatgtcttctattactgcacctatgagggggctgtagacctggaccatgtgacagatgagcgggaacggaaggctctggagggcattatcagcaactttgggcagactccctgtcagctgctgaaggagccacatccaactcggctctcagctgaggaagcagcccatcgccttgcacgcctggacactaactcacctagcatcttccagcacctggacgaactcaaggcattcttcgcagaggttgtcagtgatggtgtacccctggtgctagccctggtcccccaccggcagccccactccttcatcacccagggttccccagacctgttggtgactgtgagtgccagtgggctgctgggcacccacagctggttgccctatgaccgcaacataagcaactacttcagcttcagcaaagaccccaccatgggcagccacaagacgcagcgactgctgagtggcccgtgggtgccaggcagtggtgtgagtggacaagcactggcagtggccccggatggaaagctgctattcagcggtggccactgggatggcagcctgcgggtgactgcactaccccgtggcaagctgttgagccagctcagctgccaccttgatgtagtaacctgccttgcactggacacctgtggcatctacctcatctcaggctcccgggacaccacgtgcatggtgtggcggctcctgcatcagggtggtctgtcagtaggcctggcaccaaagcctgtgcaggtcctgtatgggcatggggctgcagtgagctgtgtggccatcagcactgaacttgacatggctgtgtctggatctgaggatggaactgtgatcatacacactgtacgccgcggacagtttgtagcggcactacggcctctgggtgccacattccctggacctattttccacctggcattggggtccgaaggccagattgtggtacagagctcagcgtgggaacgtcctggggcccaggtcacctactccttgcacctgtattcagtcaatgggaagttgcgggcttcactgcccctggcagagcagcctacagccctgacggtgacagaggactttgtgttgctgggcaccgcccagtgcgccctgcacatcctccaactaaacacactgctcccggccgcgcctcccttgcccatgaaggtggccatccgcagcgtggccgtgaccaaggagcgcagccacgtgctggtgggcctggaggatggcaagctcatcgtggtggtcgcggggcagccctctgaggtgcgcagcagccagttcgcgcggaagctgtggcggtcctcgcggcgcatctcccaggtgtcctcgggagagacggaatacaaccctactgaggcgcgctgaacctggccagtccggctgctcgggccccgcccccggcaggcctggcccgggaggccccgcccagaagtcggcgggaacaccccggggtgggcagcccaggggggtgagcggggcccaccctgcccagctcagggattggcgggcgatgttaccccctcagggattggcgggcggaagtcccgcccctcgccggctgaggggccgccctgagggccagcactggcgtctgcggccgcagcagcactttttgcacagtctggggcggggttccccggcttccaagtcgctgtttcgtcaaagcacgagggccgcctgtggccttaattcctaacggcggccccggttctcccttctcggcaataaaccaggcctagttttgtagc

SEQ ID NO: 184981 - DNA, 7713 bp, Artificial Sequence
  derived and/or modified sequence
atggccgctagtgaacggctctacgagctctggctcctgtactacgctcaaaaggacttaggctatttacagcagtggctgaaggcgttcgtgggggctttcaagaaatctatttcactgagttccttggaacctaggagacctgaggaggccggagctgaagttcctctgctcccactcgacgaactccacgttctcgcagagcaactccaccaagcggatctggagcaggctctactattactcaaactgtttatcatcctatgcaggaatctagaaaacattgaagcgggtagagggcaagtacttgtgccacgagtgcttgctctccttaccaaactggtagccgagttgaaggggtgtccacccccacagggtaggggcacacagctagagaatgtggctctccatgctcttctactgtgtgaggggctgttcgatccataccagacttggcggcgacagagatccggcgaggtgatcagctctaaagaaaagtcaaagtacaagtttcccccagcagcgttacctcaagagttctctgccttcttccaggaatctcttcaaaatgctgatcacctgccgccaatcctgctgttaaggctgatccaccttttctgtgcagttctcgccggtggcaaagagaacggccaaatggctgtttctgacggttcagtcaaaggtctcctgtctgtagtgagggggtggagtaggggcccagcacccgacccatgcctcgtgcccctggctctcgaagccctggtcggggctgttcacgtactgcatgcatcccgcgctcctcctcggggtcccgagcttcgagccctgctcgaatcttatttccacgtactgaatgccgactggccagcaggtctaagttctgggccagaggaagccctcgttacacttcgcgtcagtatgctagatgccatccccatgatgctcgcgtgtgaggatagacccgtgctacaagcaacgtttctgtcgaacaattgcttcgaacacctcacaagactaatacagaattccaagctgtatcttcagtcccgagctccacctgagggcgactcagatctggccacgaggctgttgacggaacctgacgtccagaaagtgctggatcaagacactgatgccatcgccgtacacgtggttcgggtcctcacttgcattatgtccgatagtccttcagctaaggaggtgttcaaagaaagaatcggctaccctcatctccaagaggtgctccagtctcacgggcctcccactcaccgcttgctccaagagctgctcaatatggctgtggagggtgatcacagcatgtgtccaccacctcccatccgcaacgagcagccagttttggttctcgctcagtggctgccctctcttccaaccgctgaacttcgattgttcctggctcaacgcctcagatggctctgcgacagctgtccggcatccagagctacgtgcgtgcaggccggattggtaggctgcttattggaaaccctctctaccgggctggctttagaagccaggtgccaggagcagttactcgcccttttacaggcacttggacgagtttctattcggccaatggagctgcgccacttgctccgaccaaggcctggtctggattccgaacccggaggcgctgaggcaggcaaagcgagacacgctggggcagtcattaggacactctctggcatggctcggcatcaaggtcccgcacgggcactgcgctatttcgacctgactcccagcatggctggcatcatggtgccaccagtgcaacgctggccgggacccggttttacgttccatgcatggctttgcctgcacccaatggatacagccccaacgcccgcacccacacgcccactgcagaggaagcagctttacagcttcttcactagttcagggtccgggtttgaggccttttttactgcagccggtactctggtcgtagccgtgtgcactcgcaaagagtatctcactatgtcactgcctgaagtgtcgtttgctgattcagcttggcactgcgtcgctattgtccacgttcccggacggcgacccttttctcaaaatctagtccatgtgtacaaggacggacacctcgtcaaaacagctcctctgcgctgcccgagcctaagtgaaccttttagtagctgttgcatcggctccgcaggatatcggacaaccacaacaactacagggctcccaacaccccctgttcccgctacattggcctatactcatccagcccttacgagatctcagtcggtacctgccagcactggattgggatgggggtccggtttagtagctcctcttcaggaggggagcatcgattccacactagccggaacgcaggatactcgctggggtagcccaacaagtctagagggcgagctgggcgcagtggcgatatttcatgaggcactgcaggcgaccgcactgcgcaccctgtgcactctgggccctaacgagaccgccccatttaagcccgagggcgaacttcatgaactgtcaacccgtcttttgttgcattattccccacaggcgtgtaagaataatatctgtctcgacctgtccccaagtcatgggttagacgggagattgaccgggcacagggtggaaacctgggacgtgaaggacgttgtgaattgcgtaggcggaatgggagctctcctgccactcttggagcgggtggctgcccagcctaaggaagctgaggctgggcctgctgagacccatgatctggtgggcccagagttgacttctggacataatacccaaggcctggtattaccactcggcaagtcgtctgaggaacgcatggaacgtaatgccgttgccgctttccttcttatgctgaggaatttcctgcaggggcacatggtgaatcaggagtctctggttcagtgccagggacctgcaatcataggcgctttactgagaaaggtccccagttgggcaatggatatgaacgtgcttatgtctgctcagcttctcatggaacaagtggccgctgaaggctctggaccactcctttacctcctctaccaacatctccttttcaattttcacctctggaccctgagcgactttgccgtgagactggggcacatacaatacatgtccagtatagtgcgagagcataggcagaaattgcggaaaaagtacggagtgcagtttattctggacgcactcagaacccattactcaccacaaagagagcggcctctggccgcagacgatctcaggaccgtgcagactagtctgctcggtcttgcaagagaatttctggtacggtctttgtctgccgatgacgtgcaagttacacagaccatgttaagcttcctagccgcaaccggagatgatgggcaaatactacgtagactgcaacaaaacgaaaggctgcctgagagaagtcggcaaaggctcagactcagggaatgtggactacaggggctcgttgcatgcttacctgagggaacggtgtcaccgcagttgtgtcaaggactttacaagctgtttttaggcgctgggtccggaaacacggccggtgggggagggtccagcggaactctgacccctgcctctcagccgggaaccccgtcgcctcttgacggccctcgtccattcccagccgctcctggcagacactctagttctctgtccaatgtgctggaggatggttctctgcccgagcctacaatttccggagatgacacatccaacacatccaatccccagcagacaagcgaggaagagctttgtaacctgttaaccaatgtgctgttctctgtgacatggaggggcgtggagggaagcgacgaggccgcttggcgggagcggggacaagtcttctctgttttgacacagctgggtgcatcagccacacttgtccgcccacccgactgtatcaagcgaagtttgctggagatgatgctggagagcgccctcacagacatcaaggaagcgccagtgggggtattggccagtttaacacagcaagccctgtggctgcttcggttacttcaagacttcctgtgcgcagaaggtcatggtaaccaagagctgtggagtgagaagttatttgagggagtatgctccttgctggacagactcggagcgtggccacacttggctaatgggaccgcggacttgagagagatggcacagataggtctgcgacttgtgctgggctacatcctactcgaagatccacagctgcacgcacaggcctacgtgcggttgcatatgctgctgcaaacagccgtgccagcccgtcgtgaggaagcttgctatgtgctgagcaagctggaggcagccctggggagggtcctgaacacaagttctctggagagcgccaccgacgaggctggcagtcccttggctgccgcagctgccgctgccgcagccgaaagatgttcttggttggtgcctcttgtaagaactttgctggatagagcctacgaacccttgggcctgcagtgggggctgcctagcctgccgcctacgaacggaagtcccacttttttcgaggatttccaggcgttctgcgctacgccagagtggcgccatttcatcgataagcaagtgcagcccacgatgtcacaattcgagatggacacttacgcgaaatcgcacgacctaatgagcggcttttggaacgcctgctacgacatgctgatgagctctggacagagacgccaatgggagagggctcagtctcgaagggcattccaggagcttgtcttggaaccagcccagaggcgcgctcgattggagggcctcagatacacagcagtgctgaagcagcaggccacccagcacagtatggctttgctccactggggggctctttggaggcagctggcgagtccttgtggggcatgggcactgcgcgacacccctatcccacggtggaaacttagcagcgcagagacctactcccggatgcggcttaaactcgtcccgaatcaccacttcgacccgcaccttgaagcctcagcactgcgggacaatctgggagaagtccccttgacaccgactgaggaggcctcactcccgctcgccgttacgaaggaagctaaagtgtccacaccccctgagctcctgcaagaggaccaacttggcgaagacgaactggccgagcttgaaacgcctatggaagcagccgaactggatgaacagagggagaaacttgtgttgagtgcagagtgtcaactggtgacagtggtggcagtggtgccagggctgcttgaggtcactacgcaaaacgtatatttttatgacggatctaccgagcgggtggagacagaagagggaatcgggtacgatttccgtcgccctctagcccagctcagggaggtgcacttaaggagatttaatctgcgacgctccgctttggagctcttttttatagaccaggcaaattacttcctgaatttcccttgtaaggtgggcactacaccagtcagttcgccgtctcaaacacctagaccccagcctggccctatcccgcctcatacccaggtgcgtaatcaggtgtattcctggttgctgcggttacgacctccaagtcagggctacctgagtagtcgaagtccacaggagatgctgcgcgcttccggtctgacccagaagtgggttcagagggagatctcgaatttcgaatacctgatgcagctgaacaccattgccggaagaacgtacaacgacctgtcccagtacccggtcttcccatgggtactgcaggactatgtgtcacctacgctggatctgagtaatcctgccgtgttccgggatcttagcaaacccataggcgttgtaaacccaaagcatgcccagctggtccgggaaaaatacgagagcttcgaagatcctgcaggcaccatcgataaatttcattatggaacccattacagtaacgccgctggcgtgatgcactatctgatcagagtagagccattcaccagcttgcacgtacagttgcaaagcggcaggttcgattgctccgaccggcaattccatagcgtcgccgctgcatggcaggcccgactggagagcccagctgatgtcaaggagctcatcccagaattcttttatttccctgacttcctagaaaaccagaatggtttcgacctggggtgtcttcagttgacgaacgagaaggtcggagatgtagtcctgccaccttgggcctcctctcccgaggacttcattcagcaacatcgccaagccctggaatctgaatatgtgagtgctcacctacacgagtggatcgacctcatcttcggatataagcagcgcggacctgctgctgaggaggccctaaacgtcttctactactgcacttacgaaggagccgtggatttggatcacgttacagacgaaagagagcgaaaggcattagaagggatcatttccaatttcgggcagacaccctgccagctccttaaagaaccacacccaactcgactgagcgcggaggaggccgcacatcgtctggcaaggctggacacgaatagtcccagcattttccagcacctggacgagctcaaggcgtttttcgcggaagtggtgagcgacggggtacccctggttcttgctctcgtccctcatcgccaacctcactccttcattacacagggtagtcccgacctgctggtgaccgtctcggcttctggtctgcttgggacacactcatggctcccatatgaccggaacataagcaattacttctcattttccaaggaccccactatggggagccacaaaacccagcggttgctatccgggccttgggtgcctggcagcggtgttagcgggcaggcgctggcagtcgcccctgatggcaaactgctgttttctggcggtcattgggacggttctttgagagtgaccgcacttccccgagggaagctgctgtcacagctaagttgtcaccttgatgtagtaacatgcctggcccttgatacctgcggaatataccttatcagcgggtccagggatacaacgtgcatggtgtggcgactgctgcatcaggggggactgtctgtggggctcgcccctaagcccgttcaagtgttatacggtcatggggctgctgtgtcatgtgtggcaatttccaccgaactggatatggccgtgtcaggtagtgaggacggaacagtcatcatccacacagtgaggcggggacagttcgtcgccgcactgcgtcccctcggggctacgtttccaggtcccatcttccaccttgccctcggatccgagggtcagatcgtggtgcaatcaagtgcttgggagcgccctggcgctcaggtcacctactcgctccatctttattctgtgaacggcaagttaagggcaagcctacccctggccgagcaacccactgcactgaccgtcaccgaggacttcgtcctgctgggaaccgcacagtgcgccctgcatatcttacagctcaatacattgttacctgcagccccacccctacctatgaaggttgccattaggtccgttgctgttacgaaagagcgctcccacgtactggtaggcctggaggacggcaagctgatcgtcgtagttgcagggcagccttcagaggttaggagctcccaattcgcacgcaaactttggcgctcctctagacgcatctcccaggtgtcaagcggggagactgaatataatccaactgaggccagatag

SEQ ID NO: 184982 - DNA, 2094 bp, Artificial Sequence
  derived and/or modified sequence
atgttaagggctagcggtttgactcagaagtgggtgcagagagaaatttccaacttcgagtacctgatgcagctgaataccatcgcaggtcgaacctataatgacctgagccagtaccccgtttttccatgggtcttgcaggattacgtgtctcccaccctagacctgtcaaaccccgcagtctttcgcgacttgagcaagcccataggagtggtaaatccgaagcacgcccagctcgtcagggagaagtacgagtccttcgaagaccctgccggtacaatcgacaaattccactacgggactcattactccaacgcagcaggtgtcatgcattacctcatccgggtggaacctttcacatctcttcatgtgcagctccaatccgggcgattcgactgttcagacagacagttccatagcgtagctgcagcctggcaggcacgattggaatctcccgcagacgtaaaggagttgattccagagttcttctattttcctgattttctagaaaatcagaatggcttcgacctgggctgcctgcagctcacaaacgaaaaagtaggggatgtcgtgctccccccatgggcctcgagtccagaggacttcatacaacagcaccgccaggccttagaaagtgaatacgtgtcagcccacttgcatgagtggatcgaccttatcttcggatacaaacagcggggacctgctgctgaggaagccctgaatgtgttttattactgtacttacgagggcgctgtggatctcgaccatgtcaccgacgagcgggaaaggaaggccttggagggaattatttccaatttcggacagacgccatgccaattgctaaaagagccacacccaaccagactttcagccgaagaagccgcacaccggctggccagactcgatactaactcacctagtatcttccagcatctggatgaacttaaagcctttttcgctgaggttgtctcagacggcgtgcctttagtgctcgcgttggtgcctcatcgccagcctcactcgttcatcacccagggctctcccgatctgttagtgacagtgtccgccagcggtctactaggcacacactcttggctcccttatgatcgcaacatctcgaactatttctccttttctaaagatccgaccatgggatctcataagacacagcgcctgttatccgggccttgggtgcccggtagcggagtctctggtcaggcgctggcagtggccccagatggcaagttgctttttagcgggggacactgggacgggagcctccgcgtgacagccctccccagaggaaaacttctcagccagctgagttgtcatttagacgtcgttacgtgtctggctctcgacacctgcggaatatacctcatctccggcagtcgtgataccacatgtatggtttggaggctgcttcatcagggcggactgagcgttggcctggccccaaagcccgttcaggttctctatggacacggggctgcagtcagctgtgtagcaattagcacagagctggacatggctgttagtggcagcgaggacgggacagtcatcatacacacagtcagacgcggtcagttcgtggccgcacttagacctctcggggcaacatttcccggtccaatctttcacctggcattgggttcagaggggcagattgttgttcaatcaagtgcctgggaacggccaggtgcacaggtgacttatagtttacatctctattccgttaatggcaagcttcgggcttccttgcccctcgcagaacagccaacagctctaaccgtgacagaggactttgtcctgttgggaaccgcccagtgcgccctgcatattctccagctgaataccttgcttccggcagcgccaccactccccatgaaagttgctataagaagcgtcgctgtcactaaggaacgtagccatgtgctcgtagggctcgaggatggcaaactcatcgtagtcgtggctggacaaccatcggaggtacgatcgtcccagtttgcacggaaactttggagaagttcaaggcggatctcacaggtgtcaagtggcgagactgagtacaacccaactgaagcgagatag

SEQ ID NO: 184983 - DNA, 8264 bp, Artificial Sequence
  derived and/or modified sequence
atggcagcgtcagaaagactgtacgagctttggctgctttactacgcccaaaaggacttgggatacctccaacagtggctcaaagcatttgtaggcgcttttaaaaaaagtatttccctgtccagcctggagcccagaagaccagaggaggccggagccgaggtccctctcttgcccctggatgaactgcacgtactggcagaacaactgcaccaggccgatctcgagcaggccctgctgcttctgaaactcttcatcattctttgccgcaacctggagaacatcgaggcgggtcgaggacaggtgttggtgcctcgggtgctcgcacttctaacaaagcttgtcgccgagctcaagggttgcccccctccccaggggaggggcacacagctggaaaatgtggctttgcatgccttgctgctctgcgagggcctgttcgatccctatcagacttggcgaagacaacgcagcggcgaagtcatcagctctaaagagaaatccaaatataaatttccccctgctgctctgccccaagagttttccgcgttttttcaggagtccctgcagaatgcggatcacctgcccccaattttgttacttcggctgatacatttattctgcgctgtacttgcgggaggtaaggagaacggtcagatggccgtaagcgatggttccgtcaaagggctgttgtcagttgtcaggggctggtcacgcggacccgctcctgacccttgtctggtgcctttggccttggaggcgctggtcggcgctgtgcacgttttgcacgcctcgcgcgcaccaccgaggggtccagagctgcgcgctctgctggaatcgtatttccacgtgctaaatgctgattggcccgcaggcctcagcagtgggccagaggaagctctggtgacactgcgagtttccatgctggacgccatccccatgatgctggcctgtgaggacagacccgtgttgcaggcaaccttcctctccaataactgctttgagcacctcacccgcttgatacagaattccaagctataccttcaatccagggcgcctcccgagggcgactcagatctggccactcgcctgctcacagagcctgacgtacagaaagtgctcgatcaggatactgatgccattgctgtgcatgttgtaagggtgctgacgtgtataatgagtgactccccctcagcaaaagaggtgttcaaggagcggataggctatccacatctacaagaagtgcttcagtcccacggccctcccacccaccggctgctacaggaactcctgaatatggccgtcgagggggaccatagcatgtgtcctccccctccgatccggaacgaacagcctgttttagtactggctcagtggctgccatctctcccgactgccgagctcaggctgttcctggctcagaggcttcgatggctgtgcgactcgtgtcccgcttcgagagcgacatgcgtccaagcgggactcgttggctgcctgcttgagacactgtccacaggactggcccttgaggctaggtgtcaggagcagctgctcgcgctgctacaggcgcttgggcgtgtgtcgatacggccaatggaacttaggcacctacttaggcccagacctggactggattcagagccagggggtgctgaagccggtaaggcacggcacgcaggagcagtgatcagaacactgtcagggatggccagacaccaaggaccggcacgcgctttaaggtatttcgaccttaccccttctatggccggaattatggtccccccagtacagcgatggccaggaccaggattcacattccacgcttggctgtgtctgcatcccatggacacggcccctaccccggcacccacccgtcccctccagcgcaagcagctctattccttttttaccagcagtggcagcggttttgaagccttcttcacggccgctggcactttagttgtcgctgtctgcactcggaaggaatatctcaccatgagtctgccagaggtatccttcgcggacagcgcctggcactgcgttgcaattgtccacgtcccaggacgcagaccattctcgcagaacctagttcacgtgtataaggacggacacctagtgaaaaccgcgcctctgcggtgcccttctttatctgagcccttctcgagctgctgcattggaagcgccggatataggacgaccaccacaaccaccggcctgcccacgcctccggtccctgccacactggcgtacacgcaccctgctctcactcgcagccagtccgtccctgcaagcactggccttggttgggggagtgggttggtcgcccctctgcaggagggttcaatcgattctaccttagccggaacacaggacaccaggtggggaagccccacctcgttggagggcgagctcggtgccgtagccatttttcacgaagccttgcaggccaccgccctccggacactgtgtacactgggccctaacgaaaccgctccgttcaagcccgagggggagctccacgagctttctacaaggctcctgttacactacagcccccaagcttgcaagaataatatatgcctagacctgtcgccgagccatggcctagatggtagattgactggccaccgggttgagacatgggatgtgaaggacgtggtcaattgtgtgggcggtatgggtgcactgcttcccttgcttgaacgcgttgccgcacagcctaaggaagccgaggcgggtccggcagagactcacgacttggtgggtccggagttgactagtggtcacaatacccagggcctggtgcttcccttggggaagagttccgaggaaagaatggagagaaacgcagtcgccgcattccttctaatgctgaggaacttccttcagggccacatggtgaaccaagagtcactggtgcagtgccaggggcctgcaattattggggcacttctaagaaaggtgccatcctgggccatggacatgaacgtactgatgagcgcccagttgcttatggagcaggtcgcagcagagggaagtgggcctctgctctatcttctctatcaacacttgctctttaactttcatttgtggaccttatctgattttgccgtcaggctcggacatatccagtacatgtccagcatcgtgcgggagcaccggcagaaactcagaaagaagtatggcgtgcagttcatcctggacgctctacgcacccattacagcccacagcgcgaaagacccctggccgcagacgatcttcggaccgtacagacatctctcctggggcttgctcgagaattcttggtgcgctccttatctgccgacgacgtacaagtgacacagactatgttgtctttcttggccgctaccggcgacgacggacaagcagttggggctctggacctgctccttgcccttctgcatgggtccttggtgcaagaatcgctggctgtcttcctcctggagcccggtaaccttgaggtcctgctggcactgctggtgaggcccggatccctgcccttactaccagacagagtatgcaaaatcctgcggagactgcagcagaatgaacgtcttcccgaacggagcagacagcggctgaggctgcgggagtgcggcctacaaggactggtggcctgtctgccggagggcacagtttcccctcagctttgtcagggcttgtacaagttgttcttaggggctgattgtctgaacctttccgacttactagcggtggtgcaactatccctgcaagcagatctgagtgtcagattagatatatgtagacagctgttccatctcatctacggacagcccgatgttgtaagactcttggctcgacaggcgggatggcaggatgtcttgacaaggctgtacgttcttgaggccgcaacggcaggctccccccctccctcatccccagagtcgccaacctctcctaaaccagcccctcccaagccaccaacagaaagcccagcagaaccttccgatgtgtttctgccatccgaggccccttgtcccgacccggatggtttctaccacgctttgtcccctttttgtacaccattcgacttgggattggagcgatcctccgtaggctctgggaatacggccggtggtgggggtagcagtggtacactaactccagctagtcaaccagggacaccgtctcccctcgacggtcctaggcccttccccgcagccccagggaggcactcgtcatctttgagcaacgtgttagaagacgggagccttccagaacccacgatctctggagacgatacatccaacacatcaaatccacagcagacgtccgaagaagagctttgtaacctgcttaccaacgtcctgttttctgttacttggaggggcgtggagggctccgacgaggcagcatggagggaacggggtcaggtgttttctgtgctgacccagctgggcgcttcagccacattggttagaccgccagactgcatcaaaaggtcgctcctggagatgatgttagaaagtgcactgacagacattaaggaagctccagtaggggtcctcgctagcctcactcaacaggccctctggctgctgaggctgctgcaagacttcttgtgcgcggaagggcacggtaaccaggaactgtggtctgagaagctcttcgagggggtgtgctccctgctcgacaggctgggcgcatggcctcacctcgctaatggcactgctgacctgagagagatggcccaaattggcttgaggttagtgctgggttacattctccttgaagatccccaactgcacgcccaggcctatgttaggctccacatgctgctgcagaccgcagtccctgccagaagagaagaggcatgctatgtgctgtcaaaacttgaggccgctttgggcagagtgctcaatacctcgtccttagaatcagccacagacgaggctgggtcccctctcgctgccgcagccgcagcagctgcagcagagcgctgcagctggctagtgcccctagtgcggacactcctggatcgggcatatgaacccctcgggcttcagtggggtctgcctagtctgccgcctacaaacggcagcccaacttttttcgaggattttcaggctttctgtgcgactccggagtggcgtcacttcattgacaagcaagtccagccaaccatgtcccaattcgaaatggacacatatgccaaaagtcatgacctgatgtcagggttttggaatgcctgctatgatatgctgatgagctctgggcagcgcaggcagtgggagcgagcacagtcacggagagcgttccaggagttggtgttggagccagcacaaaggcgcgcacgcttggagggactgcgctacactgcggtattgaagcagcaggcaacccagcacagcatggcgctcctccactggggcgctctttggagacagttagcctccccgtgcggcgcttgggccctccgagataccccgataccacggtggaaactgtccagcgccgaaacctactccaggatgaggctgaagttggtgcctaatcaccacttcgacccccatctcgaagcctcagcgctcagggacaatctgggggaagtgccacttacgccaacggaggaggctagtctccccctagctgtcactaaagaggccaaggtttccaccccccctgagttgctgcaggaagaccaactcggagaagatgaattggccgaactggaaaccccaatggaggcagctgagctggacgagcagagggagaaattggtgctgtccgccgagtgccagcttgtgaccgtcgtcgctgtggttcctggccttctggaagtgactacccaaaatgtttatttttacgatgggagtacagaacgcgtagaaacagaggaggggatcggatacgattttcggaggcccctggcccagctgcgtgaggttcacctgaggcgcttcaacctgcgtaggtccgcgctggagctcttttttatcgatcaggcaaattattttctgaacttcccctgcaaagtcggcaccacgcccgtgtccagcccctcacagactcccaggccacaacctggaccgatccccccacacacccaagtgagaaatcaggtgtacagttggcttcttaggttgagacctcccagtcagggctacctttctagtagatctccccaggagatgctccgcgcttctggacttactcaaaaatgggtgcagcgcgagatctcgaactttgagtacctaatgcagttaaacactatagccggtaggacatacaacgacctgagtcaataccccgtgttcccctgggtcctgcaagactatgtgagcccgacactggatctttccaatcccgcagtgttcagagatctctccaaacccattggcgtcgtcaaccccaaacacgcccaactcgtacgagagaagtatgaatcttttgaggacccggcaggcacaattgataagttccactatggtactcactatagtaacgccgcaggcgtgatgcattacctaatcagagtcgagccctttacttccttgcacgtgcagctgcagagtggtcggttcgactgtagcgataggcagttccacagcgtggcagcagcctggcaggccagactggagtctcccgcagacgtgaaggaactgatccctgaatttttctacttcccagattttctggaaaaccagaatggatttgatttaggatgtctccagctgaccaacgagaaggtaggagacgttgtcctgccaccatgggcttcgtcccccgaggatttcatccaacagcatcgacaggctctggagtccgaatatgtcagtgctcaccttcatgaatggatagatttaatttttggttataaacagaggggtccagccgcagaagaggcgcttaacgtgttttactattgcacttatgagggtgcagttgatcttgatcatgtcacagatgaaagggaacggaaggccctggagggcattatctctaacttcggtcagaccccctgccaattactaaaagaacctcaccccacccgtttgagcgcagaggaggctgcacacaggctggcaagactggatactaatagcccttcaatcttccagcacctggatgagctaaaggcctttttcgccgaggttgtgagcgacggagtccctctggtgttggcactggtcccgcacaggcagccccattcatttataacccagggaagccctgacctcctcgtcaccgtcagcgccagtggactgctcggcactcacagttggttaccctacgatagaaacattagtaattactttagtttctcaaaagatcctaccatgggatctcacaagacacaaagactgctatctggcccttgggtacctggcagtggggtgagtggccaggcactggccgtagcgccagacggaaaactcctcttcagcggaggtcactgggacggatctctgagggtcaccgctttgccgcgaggcaaactactgtctcagcttagctgccatctggacgttgtgacctgtctagccctggatacatgcgggatttacctaatctctggatcccgcgatacaacctgcatggtttggagattattgcaccagggagggcttagcgtggggctggcccctaagcccgttcaggtcctgtatgggcacggcgcagccgtgtcgtgcgtggccattagtactgagctggacatggccgtctcaggctcagaggatggcaccgtgatcatccataccgtccgaaggggccaattcgtagccgcactgcgccctctcggggcaactttccctggtccgatctttcacctggcccttggaagcgagggacagatcgtggtgcaatcaagtgcatgggaaagacccggtgctcaggttacatatagccttcacttgtactctgtgaacgggaagctgcgcgcttctcttcccctggccgagcagccaaccgcgttaaccgtgaccgaagacttcgtgttgcttgggaccgcccaatgcgccctgcatattttgcagctgaatacactacttcctgcggcaccaccactgcccatgaaagtggcgatcagatcagttgctgtcacgaaggagaggtcccatgtgctagtaggtctcgaagatggcaaactcatcgtagtagtcgccggacaaccctcagaggtgcggagcagtcagttcgctaggaaattatggaggtccagtaggaggatatcccaggtcagcagtggtgagactgagtacaatcccactgaggcgaggta

SEQ ID NO: 184984 - DNA, 7713 bp, Artificial Sequence
  derived and/or modified sequence
atggccgccagcgagagactgtacgagctgtggctgctgtactacgcccagaaggacctgggctacctgcagcagtggctgaaggccttcgtgggcgccttcaagaagagcatcagcctgagcagcctggagcccagaagacccgaggaggccggcgccgaggtgcccctgctgcccctggacgagctgcacgtgctggccgagcagctgcaccaggccgacctggagcaggccctgctgctgctgaagctgttcatcatcctgtgcagaaacctggagaacatcgaggccggcagaggccaggtgctggtgcccagagtgctggccctgctgaccaagctggtggccgagctgaagggctgcccccccccccagggcagaggcacccagctggagaacgtggccctgcacgccctgctgctgtgcgagggcctgttcgacccctaccagacctggagaagacagagaagcggcgaggtgatcagcagcaaggagaagagcaagtacaagttcccccccgccgccctgccccaggagttcagcgccttcttccaggagagcctgcagaacgccgaccacctgccccccatcctgctgctgagactgatccacctgttctgcgccgtgctggccggcggcaaggagaacggccagatggccgtgagcgacggcagcgtgaagggcctgctgagcgtggtgagaggctggagcagaggccccgcccccgacccctgcctggtgcccctggccctggaggccctggtgggcgccgtgcacgtgctgcacgccagcagagccccccccagaggccccgagctgagagccctgctggagagctacttccacgtgctgaacgccgactggcccgccggcctgagcagcggccccgaggaggccctggtgaccctgagagtgagcatgctggacgccatccccatgatgctggcctgcgaggacagacccgtgctgcaggccaccttcctgagcaacaactgcttcgagcacctgaccagactgatccagaacagcaagctgtacctgcagagcagagccccccccgagggcgacagcgacctggccaccagactgctgaccgagcccgacgtgcagaaggtgctggaccaggacaccgacgccatcgccgtgcacgtggtgagagtgctgacctgcatcatgagcgacagccccagcgccaaggaggtgttcaaggagagaatcggctacccccacctgcaggaggtgctgcagagccacggcccccccacccacagactgctgcaggagctgctgaacatggccgtggagggcgaccacagcatgtgcccccccccccccatcagaaacgagcagcccgtgctggtgctggcccagtggctgcccagcctgcccaccgccgagctgagactgttcctggcccagagactgagatggctgtgcgacagctgccccgccagcagagccacctgcgtgcaggccggcctggtgggctgcctgctggagaccctgagcaccggcctggccctggaggccagatgccaggagcagctgctggccctgctgcaggccctgggcagagtgagcatcagacccatggagctgagacacctgctgagacccagacccggcctggacagcgagcccggcggcgccgaggccggcaaggccagacacgccggcgccgtgatcagaaccctgagcggcatggccagacaccagggccccgccagagccctgagatacttcgacctgacccccagcatggccggcatcatggtgccccccgtgcagagatggcccggccccggcttcaccttccacgcctggctgtgcctgcaccccatggacaccgcccccacccccgcccccaccagacccctgcagagaaagcagctgtacagcttcttcaccagcagcggcagcggcttcgaggccttcttcaccgccgccggcaccctggtggtggccgtgtgcaccagaaaggagtacctgaccatgagcctgcccgaggtgagcttcgccgacagcgcctggcactgcgtggccatcgtgcacgtgcccggcagaagacccttcagccagaacctggtgcacgtgtacaaggacggccacctggtgaagaccgcccccctgagatgccccagcctgagcgagcccttcagcagctgctgcatcggcagcgccggctacagaaccaccaccaccaccaccggcctgcccaccccccccgtgcccgccaccctggcctacacccaccccgccctgaccagaagccagagcgtgcccgccagcaccggcctgggctggggcagcggcctggtggcccccctgcaggagggcagcatcgacagcaccctggccggcacccaggacaccagatggggcagccccaccagcctggagggcgagctgggcgccgtggccatcttccacgaggccctgcaggccaccgccctgagaaccctgtgcaccctgggccccaacgagaccgcccccttcaagcccgagggcgagctgcacgagctgagcaccagactgctgctgcactacagcccccaggcctgcaagaacaacatctgcctggacctgagccccagccacggcctggacggcagactgaccggccacagagtggagacctgggacgtgaaggacgtggtgaactgcgtgggcggcatgggcgccctgctgcccctgctggagagagtggccgcccagcccaaggaggccgaggccggccccgccgagacccacgacctggtgggccccgagctgaccagcggccacaacacccagggcctggtgctgcccctgggcaagagcagcgaggagagaatggagagaaacgccgtggccgccttcctgctgatgctgagaaacttcctgcagggccacatggtgaaccaggagagcctggtgcagtgccagggccccgccatcatcggcgccctgctgagaaaggtgcccagctgggccatggacatgaacgtgctgatgagcgcccagctgctgatggagcaggtggccgccgagggcagcggccccctgctgtacctgctgtaccagcacctgctgttcaacttccacctgtggaccctgagcgacttcgccgtgagactgggccacatccagtacatgagcagcatcgtgagagagcacagacagaagctgagaaagaagtacggcgtgcagttcatcctggacgccctgagaacccactacagcccccagagagagagacccctggccgccgacgacctgagaaccgtgcagaccagcctgctgggcctggccagagagttcctggtgagaagcctgagcgccgacgacgtgcaggtgacccagaccatgctgagcttcctggccgccaccggcgacgacggccagatcctgagaagactgcagcagaacgagagactgcccgagagaagcagacagagactgagactgagagagtgcggcctgcagggcctggtggcctgcctgcccgagggcaccgtgagcccccagctgtgccagggcctgtacaagctgttcctgggcgccggcagcggcaacaccgccggcggcggcggcagcagcggcaccctgacccccgccagccagcccggcacccccagccccctggacggccccagacccttccccgccgcccccggcagacacagcagcagcctgagcaacgtgctggaggacggcagcctgcccgagcccaccatcagcggcgacgacaccagcaacaccagcaacccccagcagaccagcgaggaggagctgtgcaacctgctgaccaacgtgctgttcagcgtgacctggagaggcgtggagggcagcgacgaggccgcctggagagagagaggccaggtgttcagcgtgctgacccagctgggcgccagcgccaccctggtgagaccccccgactgcatcaagagaagcctgctggagatgatgctggagagcgccctgaccgacatcaaggaggcccccgtgggcgtgctggccagcctgacccagcaggccctgtggctgctgagactgctgcaggacttcctgtgcgccgagggccacggcaaccaggagctgtggagcgagaagctgttcgagggcgtgtgcagcctgctggacagactgggcgcctggccccacctggccaacggcaccgccgacctgagagagatggcccagatcggcctgagactggtgctgggctacatcctgctggaggacccccagctgcacgcccaggcctacgtgagactgcacatgctgctgcagaccgccgtgcccgccagaagagaggaggcctgctacgtgctgagcaagctggaggccgccctgggcagagtgctgaacaccagcagcctggagagcgccaccgacgaggccggcagccccctggccgccgccgccgccgccgccgccgccgagagatgcagctggctggtgcccctggtgagaaccctgctggacagagcctacgagcccctgggcctgcagtggggcctgcccagcctgccccccaccaacggcagccccaccttcttcgaggacttccaggccttctgcgccacccccgagtggagacacttcatcgacaagcaggtgcagcccaccatgagccagttcgagatggacacctacgccaagagccacgacctgatgagcggcttctggaacgcctgctacgacatgctgatgagcagcggccagagaagacagtgggagagagcccagagcagaagagccttccaggagctggtgctggagcccgcccagagaagagccagactggagggcctgagatacaccgccgtgctgaagcagcaggccacccagcacagcatggccctgctgcactggggcgccctgtggagacagctggccagcccctgcggcgcctgggccctgagagacacccccatccccagatggaagctgagcagcgccgagacctacagcagaatgagactgaagctggtgcccaaccaccacttcgacccccacctggaggccagcgccctgagagacaacctgggcgaggtgcccctgacccccaccgaggaggccagcctgcccctggccgtgaccaaggaggccaaggtgagcaccccccccgagctgctgcaggaggaccagctgggcgaggacgagctggccgagctggagacccccatggaggccgccgagctggacgagcagagagagaagctggtgctgagcgccgagtgccagctggtgaccgtggtggccgtggtgcccggcctgctggaggtgaccacccagaacgtgtacttctacgacggcagcaccgagagagtggagaccgaggagggcatcggctacgacttcagaagacccctggcccagctgagagaggtgcacctgagaagattcaacctgagaagaagcgccctggagctgttcttcatcgaccaggccaactacttcctgaacttcccctgcaaggtgggcaccacccccgtgagcagccccagccagacccccagaccccagcccggccccatccccccccacacccaggtgagaaaccaggtgtacagctggctgctgagactgagaccccccagccagggctacctgagcagcagaagcccccaggagatgctgagagccagcggcctgacccagaagtgggtgcagagagagatcagcaacttcgagtacctgatgcagctgaacaccatcgccggcagaacctacaacgacctgagccagtaccccgtgttcccctgggtgctgcaggactacgtgagccccaccctggacctgagcaaccccgccgtgttcagagacctgagcaagcccatcggcgtggtgaaccccaagcacgcccagctggtgagagagaagtacgagagcttcgaggaccccgccggcaccatcgacaagttccactacggcacccactacagcaacgccgccggcgtgatgcactacctgatcagagtggagcccttcaccagcctgcacgtgcagctgcagagcggcagattcgactgcagcgacagacagttccacagcgtggccgccgcctggcaggccagactggagagccccgccgacgtgaaggagctgatccccgagttcttctacttccccgacttcctggagaaccagaacggcttcgacctgggctgcctgcagctgaccaacgagaaggtgggcgacgtggtgctgcccccctgggccagcagccccgaggacttcatccagcagcacagacaggccctggagagcgagtacgtgagcgcccacctgcacgagtggatcgacctgatcttcggctacaagcagagaggccccgccgccgaggaggccctgaacgtgttctactactgcacctacgagggcgccgtggacctggaccacgtgaccgacgagagagagagaaaggccctggagggcatcatcagcaacttcggccagaccccctgccagctgctgaaggagccccaccccaccagactgagcgccgaggaggccgcccacagactggccagactggacaccaacagccccagcatcttccagcacctggacgagctgaaggccttcttcgccgaggtggtgagcgacggcgtgcccctggtgctggccctggtgccccacagacagccccacagcttcatcacccagggcagccccgacctgctggtgaccgtgagcgccagcggcctgctgggcacccacagctggctgccctacgacagaaacatcagcaactacttcagcttcagcaaggaccccaccatgggcagccacaagacccagagactgctgagcggcccctgggtgcccggcagcggcgtgagcggccaggccctggccgtggcccccgacggcaagctgctgttcagcggcggccactgggacggcagcctgagagtgaccgccctgcccagaggcaagctgctgagccagctgagctgccacctggacgtggtgacctgcctggccctggacacctgcggcatctacctgatcagcggcagcagagacaccacctgcatggtgtggagactgctgcaccagggcggcctgagcgtgggcctggcccccaagcccgtgcaggtgctgtacggccacggcgccgccgtgagctgcgtggccatcagcaccgagctggacatggccgtgagcggcagcgaggacggcaccgtgatcatccacaccgtgagaagaggccagttcgtggccgccctgagacccctgggcgccaccttccccggccccatcttccacctggccctgggcagcgagggccagatcgtggtgcagagcagcgcctgggagagacccggcgcccaggtgacctacagcctgcacctgtacagcgtgaacggcaagctgagagccagcctgcccctggccgagcagcccaccgccctgaccgtgaccgaggacttcgtgctgctgggcaccgcccagtgcgccctgcacatcctgcagctgaacaccctgctgcccgccgccccccccctgcccatgaaggtggccatcagaagcgtggccgtgaccaaggagagaagccacgtgctggtgggcctggaggacggcaagctgatcgtggtggtggccggccagcccagcgaggtgagaagcagccagttcgccagaaagctgtggagaagcagcagaagaatcagccaggtgagcagcggcgagaccgagtacaaccccaccgaggccagatag

SEQ ID NO: 184985 - DNA, 2094 bp, Artificial Sequence
  derived and/or modified sequence
atgctgagagccagcggcctgacccagaagtgggtgcagagagagatcagcaacttcgagtacctgatgcagctgaacaccatcgccggcagaacctacaacgacctgagccagtaccccgtgttcccctgggtgctgcaggactacgtgagccccaccctggacctgagcaaccccgccgtgttcagagacctgagcaagcccatcggcgtggtgaaccccaagcacgcccagctggtgagagagaagtacgagagcttcgaggaccccgccggcaccatcgacaagttccactacggcacccactacagcaacgccgccggcgtgatgcactacctgatcagagtggagcccttcaccagcctgcacgtgcagctgcagagcggcagattcgactgcagcgacagacagttccacagcgtggccgccgcctggcaggccagactggagagccccgccgacgtgaaggagctgatccccgagttcttctacttccccgacttcctggagaaccagaacggcttcgacctgggctgcctgcagctgaccaacgagaaggtgggcgacgtggtgctgcccccctgggccagcagccccgaggacttcatccagcagcacagacaggccctggagagcgagtacgtgagcgcccacctgcacgagtggatcgacctgatcttcggctacaagcagagaggccccgccgccgaggaggccctgaacgtgttctactactgcacctacgagggcgccgtggacctggaccacgtgaccgacgagagagagagaaaggccctggagggcatcatcagcaacttcggccagaccccctgccagctgctgaaggagccccaccccaccagactgagcgccgaggaggccgcccacagactggccagactggacaccaacagccccagcatcttccagcacctggacgagctgaaggccttcttcgccgaggtggtgagcgacggcgtgcccctggtgctggccctggtgccccacagacagccccacagcttcatcacccagggcagccccgacctgctggtgaccgtgagcgccagcggcctgctgggcacccacagctggctgccctacgacagaaacatcagcaactacttcagcttcagcaaggaccccaccatgggcagccacaagacccagagactgctgagcggcccctgggtgcccggcagcggcgtgagcggccaggccctggccgtggcccccgacggcaagctgctgttcagcggcggccactgggacggcagcctgagagtgaccgccctgcccagaggcaagctgctgagccagctgagctgccacctggacgtggtgacctgcctggccctggacacctgcggcatctacctgatcagcggcagcagagacaccacctgcatggtgtggagactgctgcaccagggcggcctgagcgtgggcctggcccccaagcccgtgcaggtgctgtacggccacggcgccgccgtgagctgcgtggccatcagcaccgagctggacatggccgtgagcggcagcgaggacggcaccgtgatcatccacaccgtgagaagaggccagttcgtggccgccctgagacccctgggcgccaccttccccggccccatcttccacctggccctgggcagcgagggccagatcgtggtgcagagcagcgcctgggagagacccggcgcccaggtgacctacagcctgcacctgtacagcgtgaacggcaagctgagagccagcctgcccctggccgagcagcccaccgccctgaccgtgaccgaggacttcgtgctgctgggcaccgcccagtgcgccctgcacatcctgcagctgaacaccctgctgcccgccgccccccccctgcccatgaaggtggccatcagaagcgtggccgtgaccaaggagagaagccacgtgctggtgggcctggaggacggcaagctgatcgtggtggtggccggccagcccagcgaggtgagaagcagccagttcgccagaaagctgtggagaagcagcagaagaatcagccaggtgagcagcggcgagaccgagtacaaccccaccgaggccagatag

SEQ ID NO: 184986 - DNA, 8265 bp, Artificial Sequence
  derived and/or modified sequence
atggccgccagcgagagactgtacgagctgtggctgctgtactacgcccagaaggacctgggctacctgcagcagtggctgaaggccttcgtgggcgccttcaagaagagcatcagcctgagcagcctggagcccagaagacccgaggaggccggcgccgaggtgcccctgctgcccctggacgagctgcacgtgctggccgagcagctgcaccaggccgacctggagcaggccctgctgctgctgaagctgttcatcatcctgtgcagaaacctggagaacatcgaggccggcagaggccaggtgctggtgcccagagtgctggccctgctgaccaagctggtggccgagctgaagggctgcccccccccccagggcagaggcacccagctggagaacgtggccctgcacgccctgctgctgtgcgagggcctgttcgacccctaccagacctggagaagacagagaagcggcgaggtgatcagcagcaaggagaagagcaagtacaagttcccccccgccgccctgccccaggagttcagcgccttcttccaggagagcctgcagaacgccgaccacctgccccccatcctgctgctgagactgatccacctgttctgcgccgtgctggccggcggcaaggagaacggccagatggccgtgagcgacggcagcgtgaagggcctgctgagcgtggtgagaggctggagcagaggccccgcccccgacccctgcctggtgcccctggccctggaggccctggtgggcgccgtgcacgtgctgcacgccagcagagccccccccagaggccccgagctgagagccctgctggagagctacttccacgtgctgaacgccgactggcccgccggcctgagcagcggccccgaggaggccctggtgaccctgagagtgagcatgctggacgccatccccatgatgctggcctgcgaggacagacccgtgctgcaggccaccttcctgagcaacaactgcttcgagcacctgaccagactgatccagaacagcaagctgtacctgcagagcagagccccccccgagggcgacagcgacctggccaccagactgctgaccgagcccgacgtgcagaaggtgctggaccaggacaccgacgccatcgccgtgcacgtggtgagagtgctgacctgcatcatgagcgacagccccagcgccaaggaggtgttcaaggagagaatcggctacccccacctgcaggaggtgctgcagagccacggcccccccacccacagactgctgcaggagctgctgaacatggccgtggagggcgaccacagcatgtgcccccccccccccatcagaaacgagcagcccgtgctggtgctggcccagtggctgcccagcctgcccaccgccgagctgagactgttcctggcccagagactgagatggctgtgcgacagctgccccgccagcagagccacctgcgtgcaggccggcctggtgggctgcctgctggagaccctgagcaccggcctggccctggaggccagatgccaggagcagctgctggccctgctgcaggccctgggcagagtgagcatcagacccatggagctgagacacctgctgagacccagacccggcctggacagcgagcccggcggcgccgaggccggcaaggccagacacgccggcgccgtgatcagaaccctgagcggcatggccagacaccagggccccgccagagccctgagatacttcgacctgacccccagcatggccggcatcatggtgccccccgtgcagagatggcccggccccggcttcaccttccacgcctggctgtgcctgcaccccatggacaccgcccccacccccgcccccaccagacccctgcagagaaagcagctgtacagcttcttcaccagcagcggcagcggcttcgaggccttcttcaccgccgccggcaccctggtggtggccgtgtgcaccagaaaggagtacctgaccatgagcctgcccgaggtgagcttcgccgacagcgcctggcactgcgtggccatcgtgcacgtgcccggcagaagacccttcagccagaacctggtgcacgtgtacaaggacggccacctggtgaagaccgcccccctgagatgccccagcctgagcgagcccttcagcagctgctgcatcggcagcgccggctacagaaccaccaccaccaccaccggcctgcccaccccccccgtgcccgccaccctggcctacacccaccccgccctgaccagaagccagagcgtgcccgccagcaccggcctgggctggggcagcggcctggtggcccccctgcaggagggcagcatcgacagcaccctggccggcacccaggacaccagatggggcagccccaccagcctggagggcgagctgggcgccgtggccatcttccacgaggccctgcaggccaccgccctgagaaccctgtgcaccctgggccccaacgagaccgcccccttcaagcccgagggcgagctgcacgagctgagcaccagactgctgctgcactacagcccccaggcctgcaagaacaacatctgcctggacctgagccccagccacggcctggacggcagactgaccggccacagagtggagacctgggacgtgaaggacgtggtgaactgcgtgggcggcatgggcgccctgctgcccctgctggagagagtggccgcccagcccaaggaggccgaggccggccccgccgagacccacgacctggtgggccccgagctgaccagcggccacaacacccagggcctggtgctgcccctgggcaagagcagcgaggagagaatggagagaaacgccgtggccgccttcctgctgatgctgagaaacttcctgcagggccacatggtgaaccaggagagcctggtgcagtgccagggccccgccatcatcggcgccctgctgagaaaggtgcccagctgggccatggacatgaacgtgctgatgagcgcccagctgctgatggagcaggtggccgccgagggcagcggccccctgctgtacctgctgtaccagcacctgctgttcaacttccacctgtggaccctgagcgacttcgccgtgagactgggccacatccagtacatgagcagcatcgtgagagagcacagacagaagctgagaaagaagtacggcgtgcagttcatcctggacgccctgagaacccactacagcccccagagagagagacccctggccgccgacgacctgagaaccgtgcagaccagcctgctgggcctggccagagagttcctggtgagaagcctgagcgccgacgacgtgcaggtgacccagaccatgctgagcttcctggccgccaccggcgacgacggccaggccgtgggcgccctggacctgctgctggccctgctgcacggcagcctggtgcaggagagcctggccgtgttcctgctggagcccggcaacctggaggtgctgctggccctgctggtgagacccggcagcctgcccctgctgcccgacagagtgtgcaagatcctgagaagactgcagcagaacgagagactgcccgagagaagcagacagagactgagactgagagagtgcggcctgcagggcctggtggcctgcctgcccgagggcaccgtgagcccccagctgtgccagggcctgtacaagctgttcctgggcgccgactgcctgaacctgagcgacctgctggccgtggtgcagctgagcctgcaggccgacctgagcgtgagactggacatctgcagacagctgttccacctgatctacggccagcccgacgtggtgagactgctggccagacaggccggctggcaggacgtgctgaccagactgtacgtgctggaggccgccaccgccggcagccccccccccagcagccccgagagccccaccagccccaagcccgccccccccaagccccccaccgagagccccgccgagcccagcgacgtgttcctgcccagcgaggccccctgccccgaccccgacggcttctaccacgccctgagccccttctgcacccccttcgacctgggcctggagagaagcagcgtgggcagcggcaacaccgccggcggcggcggcagcagcggcaccctgacccccgccagccagcccggcacccccagccccctggacggccccagacccttccccgccgcccccggcagacacagcagcagcctgagcaacgtgctggaggacggcagcctgcccgagcccaccatcagcggcgacgacaccagcaacaccagcaacccccagcagaccagcgaggaggagctgtgcaacctgctgaccaacgtgctgttcagcgtgacctggagaggcgtggagggcagcgacgaggccgcctggagagagagaggccaggtgttcagcgtgctgacccagctgggcgccagcgccaccctggtgagaccccccgactgcatcaagagaagcctgctggagatgatgctggagagcgccctgaccgacatcaaggaggcccccgtgggcgtgctggccagcctgacccagcaggccctgtggctgctgagactgctgcaggacttcctgtgcgccgagggccacggcaaccaggagctgtggagcgagaagctgttcgagggcgtgtgcagcctgctggacagactgggcgcctggccccacctggccaacggcaccgccgacctgagagagatggcccagatcggcctgagactggtgctgggctacatcctgctggaggacccccagctgcacgcccaggcctacgtgagactgcacatgctgctgcagaccgccgtgcccgccagaagagaggaggcctgctacgtgctgagcaagctggaggccgccctgggcagagtgctgaacaccagcagcctggagagcgccaccgacgaggccggcagccccctggccgccgccgccgccgccgccgccgccgagagatgcagctggctggtgcccctggtgagaaccctgctggacagagcctacgagcccctgggcctgcagtggggcctgcccagcctgccccccaccaacggcagccccaccttcttcgaggacttccaggccttctgcgccacccccgagtggagacacttcatcgacaagcaggtgcagcccaccatgagccagttcgagatggacacctacgccaagagccacgacctgatgagcggcttctggaacgcctgctacgacatgctgatgagcagcggccagagaagacagtgggagagagcccagagcagaagagccttccaggagctggtgctggagcccgcccagagaagagccagactggagggcctgagatacaccgccgtgctgaagcagcaggccacccagcacagcatggccctgctgcactggggcgccctgtggagacagctggccagcccctgcggcgcctgggccctgagagacacccccatccccagatggaagctgagcagcgccgagacctacagcagaatgagactgaagctggtgcccaaccaccacttcgacccccacctggaggccagcgccctgagagacaacctgggcgaggtgcccctgacccccaccgaggaggccagcctgcccctggccgtgaccaaggaggccaaggtgagcaccccccccgagctgctgcaggaggaccagctgggcgaggacgagctggccgagctggagacccccatggaggccgccgagctggacgagcagagagagaagctggtgctgagcgccgagtgccagctggtgaccgtggtggccgtggtgcccggcctgctggaggtgaccacccagaacgtgtacttctacgacggcagcaccgagagagtggagaccgaggagggcatcggctacgacttcagaagacccctggcccagctgagagaggtgcacctgagaagattcaacctgagaagaagcgccctggagctgttcttcatcgaccaggccaactacttcctgaacttcccctgcaaggtgggcaccacccccgtgagcagccccagccagacccccagaccccagcccggccccatccccccccacacccaggtgagaaaccaggtgtacagctggctgctgagactgagaccccccagccagggctacctgagcagcagaagcccccaggagatgctgagagccagcggcctgacccagaagtgggtgcagagagagatcagcaacttcgagtacctgatgcagctgaacaccatcgccggcagaacctacaacgacctgagccagtaccccgtgttcccctgggtgctgcaggactacgtgagccccaccctggacctgagcaaccccgccgtgttcagagacctgagcaagcccatcggcgtggtgaaccccaagcacgcccagctggtgagagagaagtacgagagcttcgaggaccccgccggcaccatcgacaagttccactacggcacccactacagcaacgccgccggcgtgatgcactacctgatcagagtggagcccttcaccagcctgcacgtgcagctgcagagcggcagattcgactgcagcgacagacagttccacagcgtggccgccgcctggcaggccagactggagagccccgccgacgtgaaggagctgatccccgagttcttctacttccccgacttcctggagaaccagaacggcttcgacctgggctgcctgcagctgaccaacgagaaggtgggcgacgtggtgctgcccccctgggccagcagccccgaggacttcatccagcagcacagacaggccctggagagcgagtacgtgagcgcccacctgcacgagtggatcgacctgatcttcggctacaagcagagaggccccgccgccgaggaggccctgaacgtgttctactactgcacctacgagggcgccgtggacctggaccacgtgaccgacgagagagagagaaaggccctggagggcatcatcagcaacttcggccagaccccctgccagctgctgaaggagccccaccccaccagactgagcgccgaggaggccgcccacagactggccagactggacaccaacagccccagcatcttccagcacctggacgagctgaaggccttcttcgccgaggtggtgagcgacggcgtgcccctggtgctggccctggtgccccacagacagccccacagcttcatcacccagggcagccccgacctgctggtgaccgtgagcgccagcggcctgctgggcacccacagctggctgccctacgacagaaacatcagcaactacttcagcttcagcaaggaccccaccatgggcagccacaagacccagagactgctgagcggcccctgggtgcccggcagcggcgtgagcggccaggccctggccgtggcccccgacggcaagctgctgttcagcggcggccactgggacggcagcctgagagtgaccgccctgcccagaggcaagctgctgagccagctgagctgccacctggacgtggtgacctgcctggccctggacacctgcggcatctacctgatcagcggcagcagagacaccacctgcatggtgtggagactgctgcaccagggcggcctgagcgtgggcctggcccccaagcccgtgcaggtgctgtacggccacggcgccgccgtgagctgcgtggccatcagcaccgagctggacatggccgtgagcggcagcgaggacggcaccgtgatcatccacaccgtgagaagaggccagttcgtggccgccctgagacccctgggcgccaccttccccggccccatcttccacctggccctgggcagcgagggccagatcgtggtgcagagcagcgcctgggagagacccggcgcccaggtgacctacagcctgcacctgtacagcgtgaacggcaagctgagagccagcctgcccctggccgagcagcccaccgccctgaccgtgaccgaggacttcgtgctgctgggcaccgcccagtgcgccctgcacatcctgcagctgaacaccctgctgcccgccgccccccccctgcccatgaaggtggccatcagaagcgtggccgtgaccaaggagagaagccacgtgctggtgggcctggaggacggcaagctgatcgtggtggtggccggccagcccagcgaggtgagaagcagccagttcgccagaaagctgtggagaagcagcagaagaatcagccaggtgagcagcggcgagaccgagtacaaccccaccgaggccagatag

SEQ ID NO: 184987 - protein, 368 aa, Artificial Sequence
  derived and/or modified sequence
MAAAAEERMAEEGGGGQGDGGSSLASGSTQRQPPPPAPQHPQPGSQALPAPALAPDQLPQNNTLVALPIVAIENILSFMSYDEISQLRLVCKRMDLVCQRMLNQGFLKVERYHNLCQKQVKAQLPRRESERRNHSLARHADILAAVETRLSLLNMTFMKYVDSNLCCFIPGKVIDEIYRVLRYVNSTRAPQRAHEVLQELRDISSMAMEYFDEKIVPILKRKLPGSDVSGRLMGSPPVPGPSAALTTMQLFSKQNPSRQEVTKLQQQVKTNGAGVTVLRREISELRTKVQEQQKQLQDQDQKLLEQTQIIGEQNARLAELERKLREVMESAVGNSSGSGQNEESPRKRKKATEAIDSLRKSKRLRNRK

SEQ ID NO: 184988 - DNA, 5451 bp, Artificial Sequence
  derived and/or modified sequence
ccctgttccccttgctgtgggggtaaggaatcaagcccccaagatggcggcagcggcggaggagcggatggcagaggaaggaggcggcggccaaggcgacggcggttcctctttggcctccggctctacccagcgacagcctccaccgcccgcgccacagcacccgcagccggggtcccaggcgctcccagcccccgcgctggctccggaccagctgcctcaaaacaacacgcttgtggcgctgcccatcgtagccatcgagaacatcctcagctttatgtcctacgacgaaattagccagctccgcctggtttgtaaaagaatggacttggtctgccagagaatgttgaatcagggatttctgaaagtggagaggtaccataatctatgtcagaaacaagttaaagcacaactcccaaggagagagtcagaaaggagaaaccattcattagctcgtcatgcagacattcttgctgctgttgaaacaaggctgtcactattaaatatgactttcatgaaatatgtggattccaatctctgttgcttcatcccaggaaaggtgattgatgagatttatcgtgtgttgagatatgtcaattctaccagagcccctcaacgagctcatgaagtacttcaagaattaagggatatatcctctatggcaatggagtactttgatgaaaagattgttccaattttaaagaggaaattaccaggatcagatgtttctggaagactcatgggctctcctccagttccaggaccgtctgcagccctaacaacaatgcagctcttctccaagcaaaatccttcaagacaagaggttaccaaactccagcagcaggttaaaacaaatggtgctggcgtgactgttctcaggcgtgaaatttctgagcttcgcaccaaagtgcaagaacagcaaaaacagcttcaagaccaggaccagaaactgctagagcagacccagatcataggtgaacaaaatgcacggttggcagagctagaacgcaaactacgagaagtaatggaaagtgctgtaggaaattcctcagggtccgggcagaatgaggagtctcctcggaaacgaaaaaaggccacggaagccatagactctcttaggaaatctaaacgtcttcggaatagaaagtaaattggaatgtggttctagttccagaggaagacacagcttagtagcttaagcagttatgcatatcaggatactgtgagcaacatggtgtcccttaagcttctaggctttcagaacacaacttaaacttgaactcttatggttgggacattcttttcctgcttctcctgattgaactgatgcacagaatctttttactttgcaatagatttgtactaaccagacctgttctatcatgttttgaggagttaacttttttctgtgcagataatgttgaaagtaagttaatttgtttctgcatatatgcacatacatacgtaaggatcttaaacccagtcttgacagactagaagttaagtttaatacagaaaatgtcctgttcacttgaaagaaaagacctactttttaaatggacactatcttggttcttttttttttaagtcatctttttgttataagtgacctttgtctggaatgtctgaaaagtagttaatgctttttggtattgaagtaatgggtaactaaaatggacttccatagtattgactgtagaaggagcctctacaatattgactatatatttttataaactactggcaaggaacttacccagctgttatacatgttttcagttctctttgggggccatgtcctacatttgcatggatggatgcatgcattgcctagtcaactcacttaaaaagctcttgcactggtattgatcttgaacctctatacttctccactttttagagcggcgtcttagtttatttaaacgcttaacatcttccaccgcaacagcttgcctctagagggggaattgttcatccatttgtcctccagttttataggaacaagagactattaaagcccattgctttatctgctctctgtagggttcaggtacactggctaaggcagaaccccaaatttcaaggctctttctatcaatattggacctctgggagctaatactcctctttgctcaccaccatgtgatcattgatcagatgtggtgagtgagtaggggactcgacttgcgggatgcagttttgccattgcagcaaagttcattgaggaaaattgtaccatgaaaaagcattttgattatttcatttctggaggatgaccttgagggaagctttttaatattagtttcaagctttccttaccctacaactttaaacaaaagctttaattttgtttgcactcctattttgagcttgtaactggaaaagcatgtcttgcactgttcaacctcctgagtggtcgctttaacaacctccaaattgtgtacagtggttattttccccagttgtatagttttgagacattcaattatcactgtcttagttgtattttaatttactaaattatgtagctatttgactgttaagttcttttaaacaactgtttccttgggcttcagttatttaaagtaaatttaggtgtaatatagaaaactgtccctttccaggtgggagcttaacacctgtataaaacctaaggttttggtaagtaccttagttgaataaaagcacaaggttatcaccttttttatccgtccaccgtgacatggttatgcatcctttagattaacctcaccaaatgaagctttttctatccatttttaatattgtccttacataatattgtccttagattttgatcaattctatgtctgactttgaaattccatttacaatgtagtatgttttcaatgaaaaaccataaagtaacatccaagtgtttcatggtttgttgggaaggtaattttaaaataaaacaatttccaaaaaacatttgtcagccaaggtcatccataaaagtccccgtctggaactcgttttctcagcacttctcatttttataatcatagtatttagccatattagcatatctttagaggaggcctggtggaatacccggggcctctactagtctgcttttccggtcataggaagacttttttttttacgtatcaaagcatgtgtttacagatttacagagtgtgatccgtatgcatcaaagggatacagccccagactgtttctttaatggtcattcatgaactattaaaaatttcctgaatttctttttaaactacatctagatagcctaaacatctatgtagtcttccattagttaacatgtgtatagggctttcataataagtagtcacactgttacaaggtaaattttctattacaaaatccaaatttctattgcatacacttataatcatctattcataaagctaattcattgtacttgttaatgcatgaatgttccatgcagtaggagaataaagcactacagttcggttgttcaaatcttaaatcttaggctatttagctaaaacatgttaggatattgccttcaccacttgttaggacagttatttgatagccattatgcttacctatggatagcataatggtatttaaggttcaacaaaccgcagattattatgatcagctagaactgacatatgttacaagaaaactgtaaattaacctcctgagagaaccattctgccctgcattttaagtcaggtatttaaatactgcgtgttgttaatattgcgttgtcttagtgcaacatttcttaaagtattcccgttatcttccttggctgtttttcagaggagacgtctccatgttaatgggtccttcccacatagaaatgtattctggtacagcgctgcacacatggatagcaatgtgaaaaggcatgcctaagagacagaaacggctgaccttaccccaccccagccggatcctctgcttatctcccacatgcacttggcttaactggttttcacagattctgaggttatagaacctgttgtttttcaaactcctgtacagagcctggaaataatggagcaaacgcaaatgtattgagagtcattatactttaaaatagttttaaagactattggggtaccatcaggtcaaaagccactgatttgggaagcaatttttttgcaaaacactttttttggagtactgaactttacaggggcttgccttaatctctatttagtagtttcaagatatatgcgcaattattctacgtgttaaaaatgttaaaatattctatgtagccccaaaggtgggtaaaacagtataagtaatgcctaaattaataagctaaaaggtgtcactacagctggatttttgagagaaaatggacataaaactaggctatgtgtaataaaaataatggcaccttaagattgcactattttatgcattattttatatgccatttcatagcctgcactttaatctccaaagaaacgatgtatgatgtcccacttgttccttattcttaataaactttttcctgagacagggcacttaattctattttactatactgaattagtttcttggaggtagattcatttcttgagttctctgtttccttagccataatattttctaggatccgggaactccctatattgtctatttccaacattatataattttaatttaatgtaatgtaaatctcatacttggtgatcagcacattcttatatcctgctctagcaatgagtacccatttgttacacttaccaaactctctaaaaacatatactgtgagtaagatttgaagccaggaataaaaggcagtctgaaagaaaacgtcctatacgatgcagttgtttggaaatggctgatttctgatatgaaacccaacttgatacactgtttggttctttgacttgggatctatctgaattgctttcactagtacacaaaaggttaagttaaaactactttaaacttgtatagcctgccatctgaggtgaattattttcaaaaaatactaaatctatgaactgagactagcaattagttggctgctccctaccatgattttacttttaatagcaatacagttatattggtgataaatatgacaggcttaagtactgctgtccttttgcatcttcctaagcatcttggttaaatttctgaagtttaaaaattagatccagatttcttctgttgtgtctgaagagaaccatgacatttagaagtatattggtaatctattaggtccattggcaaagtatattggtccatattcaaacctattccaaaaggttagaagtgtttaagattcctttattgtggtaccatgtctgtttacctatgcttatgagcaacaataaattactagtttaccttctggaattttaattgttataaccgaatcaattattggaaagtgaaaaacacctcccggtcacacaacagggtacgtaaataaatgtgttgttaccagtg

SEQ ID NO: 184989 - DNA, 1107 bp, Artificial Sequence
  derived and/or modified sequence
atggctgccgccgcggaagaaagaatggccgaagagggcggcggcggtcagggagatggcgggtcatctctggccagcggcagcacacaacgccaaccaccacccccagcccctcagcacccacagccagggtcacaggccctacctgctccagctcttgcgcctgaccaactgccacagaataatactcttgtcgccctacctatagtagcaatcgagaacattctctcttttatgtcttacgacgagataagtcagttacgactggtgtgtaagcggatggatttggtgtgtcagcgtatgctaaatcagggctttttgaaggttgagcggtaccataatctctgtcagaaacaggtgaaagcccagctcccacggagggagtccgagaggcgcaaccactccctggcccgccacgctgatattcttgcagcagtcgagaccagactctctctcctgaatatgacttttatgaaatacgtggatagcaacctgtgttgcttcataccagggaaagtgattgacgaaatttatcgcgtgctgaggtacgttaacagtacccgggcaccacagcgtgcccatgaggtgttgcaggagcttcgcgacattagttctatggcaatggaatacttcgatgagaagattgtgcctatattgaagaggaaactgcccggctcagatgtctcaggaagactgatgggttcaccgccagtgcctggacctagtgcagctctcacaacaatgcaactgttcagcaagcagaaccctagcagacaggaagttaccaagttacaacagcaggtcaaaacaaacggagctggggtgacagttctaagacgtgagataagcgaactgcgcactaaagtacaggagcagcagaaacagctgcaggaccaagatcagaagctgctggaacaaactcaaataatcggagaacagaatgctagattggcagagctagagaggaagctgcgtgaagtcatggagtcagctgtcggcaattcctccggctcagggcagaacgaggaaagtcctaggaaaagaaagaaggccaccgaagcaatcgactctctgcgaaagtcaaagcgattgaggaacagaaagtag

SEQ ID NO: 184990 - DNA, 1107 bp, Artificial Sequence
  derived and/or modified sequence
atggctgctgctgctgaggagaggatggccgaggagggcggcggcggccagggagatggcggcagcagcctggccagcggcagcacccagaggcagcccccacctccagccccccagcacccccagcccggcagccaggccctgcctgccccagccctggccccagaccagctgccccagaacaacaccctggtggccctgcccatcgtggccatcgagaacatcctgtccttcatgtcctatgatgagatcagccagctgcggctggtgtgcaagaggatggacctggtgtgccagaggatgctgaaccagggcttcctgaaggtggagcgctaccacaacctgtgccagaagcaggtgaaggcccagctgccccggcgggagagcgagaggaggaaccacagcctggcccggcatgctgacatcctggccgctgtggagacccggctgagcctgctgaacatgaccttcatgaagtatgtggacagcaacctgtgctgcttcatccctgggaaggtgattgatgagatctacagagtgctgcgctacgtgaacagcacccgggccccccagagggcccacgaggtgctgcaggagctgcgggacatcagctccatggccatggagtactttgatgagaagatcgtgcccatcctgaagaggaagctgcccggcagtgatgtgtctggccgcctgatgggcagcccccctgtgcccggccccagcgctgccctgaccaccatgcagctgttcagcaagcagaaccccagccggcaggaggtgaccaagctgcagcagcaggtgaagaccaatggagctggggtgacagtgctgcggcgggagatcagcgagctgcggaccaaggtgcaggagcagcagaagcagctgcaggaccaggaccagaagctgctggagcagacccagatcatcggggagcagaatgcccggctggccgagctggagaggaagctgcgggaggtgatggagagcgctgtgggcaacagcagcggcagcggccagaatgaggagagccccaggaagaggaagaaggccacagaggccatcgacagcctgaggaagagcaagaggctgaggaacaggaagtag

SEQ ID NO: 184991 - DNA, 1107 bp, Artificial Sequence
  derived and/or modified sequence
atggccgccgccgccgaggagcggatggccgaggagggcggcggcgggcagggcgatggcggcagctccctggccagtggttcaacccagcgccagccacccccacctgcaccccaacaccctcagcctgggagtcaggcccttcctgccccagccctggctcctgaccagctgccccaaaataacactttggttgccctgcctattgtcgctatcgaaaacatattgtccttcatgtcttatgatgaaataagccagctgaggctggtgtgcaagagaatggatctggtgtgccaaaggatgctcaaccagggatttcttaaggtggaacggtaccacaacctttgtcagaagcaggttaaagcacagctccctcggcgcgaatccgagagacgaaaccactcactcgctcggcacgctgacatcctggcagcggtcgagactcgcctgtctctgttgaatatgaccttcatgaagtacgttgatagtaatctgtgttgttttattccagggaaggttatcgatgaaatttatcgggtgctacggtatgtcaattccacacgagctccccagcgtgcccatgaagtgttgcaggagctcagggatataagctctatggcaatggagtactttgacgaaaagattgttccaattctcaaacgtaaactgcctgggtccgatgtttctgggcgtttgatggggagtccacctgtgcctgggccaagtgccgcccttaccacaatgcagctattcagcaagcagaatcctagtcgccaggaagtgactaagctgcaacagcaagtgaaaactaatggcgccggcgtcacggttctgcgccgggagatcagcgagttacgcacgaaggtgcaggagcagcagaagcaactacaggaccaggatcagaagctgctggagcagacacagatcataggcgagcagaacgcacgattggccgagttagaaaggaaactgagggaagtcatggagtctgccgtgggcaatagctcagggtctggtcaaaatgaggaatcaccgaggaagagaaaaaaggcaactgaagcaatcgacagtctgcgcaagagcaagagactccgtaatcggaagtag

SEQ ID NO: 184992 - DNA, 1107 bp, Artificial Sequence
  derived and/or modified sequence
atggcagctgccgctgaagagcgcatggccgaggagggcggaggcggacagggggatggcggatccagcctggctagcggatccacccagaggcaacccccacctccggcacctcagcacccccagcccggatcccaggcactcccagcacccgctctggccccagaccagctgccacagaataacacactcgtcgccttgcctatcgtcgctatagaaaacatactgagcttcatgtcctacgatgaaatatcccagctgcggctggtctgcaaaaggatggatctggtctgtcaacgtatgttaaatcagggctttctgaaggtggagagataccataatctgtgtcagaagcaggtaaaggcccagctccctcgccgtgagagcgaaagaaggaatcacagtctagccaggcatgcagacattttggccgcagtcgagaccagactgtctctgctcaacatgacgttcatgaagtatgtggatagtaacctgtgttgctttatccccggaaaggtgatcgatgaaatctaccgtgtacttaggtacgttaactctacaagggccccacagagagcacacgaggtgctgcaggagttacgagacatcagctctatggccatggagtacttcgacgagaaaatcgtccctatactcaaacgaaagctgcccggatccgacgtgtcgggcaggctaatggggtcccctcccgtgcccggtccgagcgctgctctgaccacgatgcagctgttcagcaaacagaacccgtctcgccaggaagttactaaactgcagcagcaggtgaagactaacggagcgggtgtaacggtgctgaggagggaaatatcagagctgcggaccaaagttcaggagcaacagaaacagctgcaagatcaagatcagaaacttctggaacaaacgcaaataattggggaacagaacgcacggctggcagaactcgaacggaaattgcgcgaggtgatggagagtgcagtgggaaactctagtggcagtggacagaacgaagaaagtcccagaaaacggaagaaagccacggaggccattgacagtctgcgcaagtctaagcggttgaggaatcgcaagtag

SEQ ID NO: 184993 - DNA, 1107 bp, Artificial Sequence
  derived and/or modified sequence
atggccgccgccgccgaggagagaatggccgaggagggcggcggcggccagggcgacggcggcagcagcctggccagcggcagcacccagagacagccccccccccccgccccccagcacccccagcccggcagccaggccctgcccgcccccgccctggcccccgaccagctgccccagaacaacaccctggtggccctgcccatcgtggccatcgagaacatcctgagcttcatgagctacgacgagatcagccagctgagactggtgtgcaagagaatggacctggtgtgccagagaatgctgaaccagggcttcctgaaggtggagagataccacaacctgtgccagaagcaggtgaaggcccagctgcccagaagagagagcgagagaagaaaccacagcctggccagacacgccgacatcctggccgccgtggagaccagactgagcctgctgaacatgaccttcatgaagtacgtggacagcaacctgtgctgcttcatccccggcaaggtgatcgacgagatctacagagtgctgagatacgtgaacagcaccagagccccccagagagcccacgaggtgctgcaggagctgagagacatcagcagcatggccatggagtacttcgacgagaagatcgtgcccatcctgaagagaaagctgcccggcagcgacgtgagcggcagactgatgggcagcccccccgtgcccggccccagcgccgccctgaccaccatgcagctgttcagcaagcagaaccccagcagacaggaggtgaccaagctgcagcagcaggtgaagaccaacggcgccggcgtgaccgtgctgagaagagagatcagcgagctgagaaccaaggtgcaggagcagcagaagcagctgcaggaccaggaccagaagctgctggagcagacccagatcatcggcgagcagaacgccagactggccgagctggagagaaagctgagagaggtgatggagagcgccgtgggcaacagcagcggcagcggccagaacgaggagagccccagaaagagaaagaaggccaccgaggccatcgacagcctgagaaagagcaagagactgagaaacagaaagtag

SEQ ID NO: 184994 - protein, 619 aa, Artificial Sequence
  derived and/or modified sequence
MLLASAVVVWEWLNEHGRWRPYSPAVSHHIEAVVRAGPRAGGSVVLGQVDSRLAPYIIDLQSMNQFRQDTGTLRPVRRNYYDPSSAPGKGVVWEWENDNGSWTPYDMEVGITIQHAYEKQHPWIDLTSIGFSYVIDFNTMGQINRQTQRQRRVRRRLDLIYPMVTGTLPKAQSWPVSPGPATSPPMSPCSCPQCVLVMSVKAAVVNGSTGPLQLPVTRKNMPPPGVVKLPPLPGSGAKPLDSTGTIRGPLKTAPSQVIRRQASSMPTGTTMGSPASPPGPNSKTGRVALATLNRTNLQRLAIAQSRVLIASGVPTVPVKNLNGSSPVNPALAGITGILMSAAGLPVCLTRPPKLVLHPPPVSKSEIKSIPGVSNTSRKTTKKQAKKGKTPEEVLKKYLQKVRHPPDEDCTICMERLTAPSGYKGPQPTVKPDLVGKLSRCGHVYHIYCLVAMYNNGNKDGSLQCPTCKTIYGVKTGTQPPGKMEYHLIPHSLPGHPDCKTIRIIYSIPPGIQGPEHPNPGKSFSARGFPRHCYLPDSEKGRKVLKLLLVAWDRRLIFAIGTSSTTGESDTVIWNEVHHKTEFGSNLTGHGYPDANYLDNVLAELAAQGISEDSTAQEKD

SEQ ID NO: 184995 - DNA, 5642 bp, Artificial Sequence
  derived and/or modified sequence
ggcgcggtcgaggcccggaggcggcggcgcaggaggaagcggaggaggtcgggcgctcggggcccgggaggcgggccgcgcagcgccgcagccccgggctcgccatgctcctggcctcggccgtggtggtctgggaatggctgaacgagcacggccgctggcgtccctacagcccagcggtgagccaccacatcgaggcggtggtccgcgccggcccccgcgcggggggcagcgtggtgctgggccaggtggacagccgtctcgcgccctacatcatcgacctgcagtccatgaaccagttccgccaagacacgggaactctccgcccagttcgccgcaactactacgacccctcctcggcccctgggaagggcgtggtgtgggagtgggagaacgacaatggctcctggacgccctacgacatggaagtgggcatcaccatccagcatgcctatgagaagcagcacccctggatcgacctcacttccattggctttagctacgtaattgacttcaacaccatgggccagatcaaccgtcagacccagcgccaacgccgcgtccgccggcgcctcgacctcatctaccccatggtcacagggaccttgcctaaggctcagtcctggccagtcagccctgggccagccacctcgccccccatgtccccctgctcctgtccccagtgtgtcttggtgatgagtgttaaggcagccgtggtcaatggcagcactgggcccctacagctgccagtgacccgcaagaacatgccgcctcctggagtggtcaagctacccccactgccaggctctggggccaagccactggacagcacaggcaccattcgaggcccactgaagaccgccccatcgcaggtgatccggagacaagcctccagcatgcccactgggacaaccatgggctctcctgccagtcccccaggacccaacagcaagaccggaagggtggccctggccaccttgaatcgtaccaacctgcagcgactggccattgcccagtcccgggtgctgatcgcctctggggtccccacagtcccagtgaagaacctaaatgggtccagtcctgtcaaccctgccttggcaggaatcactgggatcctcatgagtgcagcggggctgcctgtgtgtctcaccaggccaccaaagctggtcctacacccaccccccgtcagcaagagtgaaataaaatccatcccaggggtttccaacacaagccgcaagaccaccaaaaaacaagccaagaaaggtaaaaccccagaggaagtgctaaaaaaatatctacagaaagtccggcacccaccagatgaggactgcaccatctgtatggaacgcctcacggccccctcaggctacaagggcccgcagcctacggtaaaacctgacctggtagggaagctgtccagatgcggccacgtctaccacatctactgcttggttgccatgtacaacaatgggaacaaggatggaagtttgcagtgtccaacctgcaagaccatttatggggtgaagacaggcacccaacctccagggaagatggagtaccacctcatcccccactccttgcctggccacccagactgcaaaaccatccggatcatctacagcatcccccccggcattcagggaccggaacacccgaatcctgggaagagtttcagcgcccgaggcttcccacgacactgttaccttccggacagcgagaaagggagaaaagttctgaagctgctgctcgtggcctgggatcgccgcctcatttttgccattggcacctccagcaccacaggcgagtcagacaccgtcatctggaatgaggtccaccacaagacagagtttggctctaatctcactggccatggctacccagatgccaattacctggataatgtgctggctgaactggctgcccagggcatctctgaggacagcactgcccaggagaaggactgaggccagaaaagctttgaggtgggaggggccatggagactgcaggacaggaagtgaggagagtgagtcaatgtagaagaagttggtgtcctgccctcccaactttctatcctcccctcctgccctgtgtccatccctcatccctcccaaccacagtgggagccagactgaatatagcgacatcattcataaatctcatccaacacaaagggagatgggatgagggccatcctgggtctgttcccatggagtttttggtgctgggtaggcaggaatcccctccctaccccacctcccaagtaggggcatggtcagcacacctagggtatgggcagtgcttaggcactccatatcctggctttgggaagccggggtttcttgcctcagccggcttcttgctacttccactctgctttgagactggagtttctgctattctccctctgctggaggcagggagctctcactgtgcaaggttggggggtgggcaaaggggtgaatcactaaactgctgtgacatcagaaactgatgccttggtgtagagcaaggaagcacttcttcccaagagggtcggagaaggaaaagcctctgggagcacattctgctgtcatcacagtccttggcttctctgggccctcctctcctcctcacagctctcacctgtccaaagaggcatctggttctctcatgtggatggatggactctggggttcctctttggagtggcatcccatgatgctgtttctagaccctctctgatcaaaccagagcctgcatcccactgagcatctgaactgtcctcagggagaggagcccacagccttcttcccaactcattctagaccagctcaaagattccatgagtttcatcgagtcactgtgagtggagcccatgctgggctctgtgccctctgtgtctgtgcatgcgcgtgtgtgtgtgggcgtgtgtgcattgctgggccagcttgaagggaaggcccgtcatgtccctgcactctgttttgcaagatgccaaaccccagttctgatggggctccaacagccaggctgtggtcctttgacgttcctcacctgttgccaacctatcccgtagtgaactgaaaccccaatgaagacagaactgtgcctggggagatgcaatgaggtgagggctgaactcatccttttatatttcttttcaagattggatcagagctcatctccatccagtcttgtttctatgaaggcttcaatctgtttccatgcaaatttgctaatcagagcccagagctgctgggtccctcatctccctcatctattatagattgacttacagcagggagagaatctctttagctcattcctaatggagttgggatcacaatatggtctggtccaatctgcatcttgttgtgtcccaagaccctatctcctccccaacattcttattgcctttggctcccagtaaggaacgaattgggggccagggaggagaacaggggggatcaagaagggaaacccaattccccctttgaaagtgggttctttgaactatgtgtttgggggaagttcctctggatactaatttgaatttatatacctcatgttttgggggtttgacgtatatatatatatatatatatgcatatatatttcataatatttggaaggtttttgatgctagaaaaatggaaacaagagaaccttcaaaaatggtacttagatgggaactggaggccaatctttcataaagccagccccatagctgcttgctgttaggcctccagccattttgacattggggtggatagtcgattcacctgcctgtcagtcgattcacctgcctgtcacccagttctgtggatgtgctggtgctgagcctttgctctctttccaaatggttacagggatgttgatcagctccaccagagggagctctgatgggaggaattgctctgccatccttgtccctgtgtctcctgtcggcaggcagccattgtatctcaccagcagaccaggagactggtcccaaggttactgcaccacagggcaatttcctgccatagttaggaaggaaacacctgaactaaatggaagagacatccctgcggtgtttaatatcacacccatgccctttgtcaggttaccatgtacagagattacttggagagcctcatgccgtctctaccttcgcacactggtcaagtatctgctgagcttcttggccgcaaggatgcagaaataggctgagggtccatgggaagaaagacacaatgaggcagtaggaggtggggaagaaaagaagacagactttcaaaatggaattaggcactggggagagatcagtttccccacatcagggagaagaaggtataggtggggaagggggtggccaggagcagaaggaagaagactcaagatggaaagggagccgctgtgcctgtggcaataccacttggagaggtcgacttcataccttcaagccttttcccctgggcttttgattgtgtctgtgccccctttcttgtcctctctgcagatgcccagtaggggctacctcatcctcgtgctgttcttgtgtggctttctgggcagtagggatcttgaatttcctttctaacactgtgcccggcaaggcggggagcattcctctgccctttgtcttgtgccaacctggaaaggtgcagtctagatttcagtgagaaccctgccagctgagccctgtgcatctactaccttgacacagagtgttttcccactagaagctctgctctgctctcctggcccaagtaggggattccatgccttccctttcatggtcttagcaccagcagcctagtttctcccttccagagtctccagggatgacaaattggattggagacaaacctcgtcagatgctcatcccctaaaaggttaattgtgtatttgtggctgcgtgtgcctttgtgttttcattctcttcccatttttgtacattttggtcttctctgtggttttatacttggtcaaaagtactcgtcttggtattgcactgttgtgtgcatgagaaaactgggggaaggctcactggtacaagaaaggacccctgacccctttccttctctgtggtccccggcattagattgggggttctgggagaggcaggtgaatgtcctaagtgaattgttctgtttgtaactggaatgtttttgaagtctttggtgttgctccgtgaaaggacatcgccacctggtgctcatgaggtgtctttgcagaacaataaatggcaaatgaacaaccacaaaattgttactcttgttggccttctgctgtttgtagattagtgcacctatctgtgagggatttgggttacctccctgagtctgtaagcaaccacaagccctgccactgggtgggggaagtccctccccaaccacttaaaaacaaattttccacatattacccacccacacatttgacctggctagactttgtttgcctaaaggaacagaccacattgctgggaaaatgagtaagtgaacgtgtgggagaaaaacacttttagaatcacgaatattcacttttaaaggtctctttgcctggctgcaatatagtgtgtgtttaaattatttacaggctgttgtttctcaaataaatgtttaatattaatcattcccaaactgacaagaacacaaaaataaaatgcaaatacagagcc

SEQ ID NO: 184996 - DNA, 1708 bp, Artificial Sequence
  derived and/or modified sequence
tgcgtcttcctgactctagtacgttgaatctggccagaaaaaccacatttgctctctacgaactctccgcccagttcgccgcaactactacgacccctcctcggcccctgggaagggcgtggtgtgggagtgggagaacgacaatggctcctggacgccctacgacatggaagtgggcatcaccatccagcatgcctatgagaagcagcacccctggatcgacctcacttccattggctttagctacgtaattgacttcaacaccatgggccagatcaaccgtcagacccagcgccaacgccgcgtccgccggcgcctcgacctcatctaccccatggtcacagggaccttgcctaaggctcagtcctggccagtcagccctgggccagccacctcgccccccatgtccccctgctcctgtccccagtgtgtcttggtgatgagtgttaaggcagccgtggtcaatggcagcactgggcccctacagctgccagtgacccgcaagaacatgccgcctcctggagtggtcaagctacccccactgccaggctctggggccaagccactggacagcacaggcaccattcgaggcccactgaagaccgccccatcgcaggtgatccggagacaagcctccagcatgcccactgggacaaccatgggctctcctgccagtcccccaggacccaacagcaagaccggaagggtggccctggccaccttgaatcgtaccaacctgcagcgactggccattgcccagtcccgggtgctgatcgcctctggggtccccacagtcccagtgaagaacctaaatgggtccagtcctgtcaaccctgccttggcaggaatcactgggatcctcatgagtgcagcggggctgcctgtgtgtctcaccaggccaccaaagctggtcctacacccaccccccgtcagcaagagtgaaataaaatccatcccaggggtttccaacacaagccgcaagaccaccaaaaaacaagccaagaaaggtaaaaccccagaggaagtgctaaaaaaatatctacagaaagtccggcacccaccagatgaggactgcaccatctgtatggaacgcctcacggccccctcaggctacaagggcccgcagcctacggtaaaacctgacctggtagggaagctgtccagatgcggccacgtctaccacatctactgcttggttgccatgtacaacaatgggaacaaggatggaagtttgcagtgtccaacctgcaagaccatttatggggtgaagacaggcacccaacctccagggaagatggagtaccacctcatcccccactccttgcctggccacccagactgcaaaaccatccggatcatctacagcatcccccccggcattcagggaccggaacacccgaatcctgggaagagtttcagcgcccgaggcttcccacgacactgttaccttccggacagcgagaaagggagaaaagttctgaagctgctgctcgtggcctgggatcgccgcctcatttttgccattggcacctccagcaccacaggcgagtcagacaccgtcatctggaatgaggtccaccacaagacagagtttggctctaatctcactggccatggctacccagatgccaattacctggataatgtgctggctgaactggctgcccagggcatctctgaggacagcactgcccaggagaaggactga

SEQ ID NO: 184997 - DNA, 1860 bp, Artificial Sequence
  derived and/or modified sequence
atgctgctggccagcgccgtggtggtgtgggagtggctgaacgagcacggcagatggagaccctacagccccgccgtgagccaccacatcgaggccgtggtgagagccggccccagagccggcggcagcgtggtgctgggccaggtggacagcagactggccccctacatcatcgacctgcagagcatgaaccagttcagacaggacaccggcaccctgagacccgtgagaagaaactactacgaccccagcagcgcccccggcaagggcgtggtgtgggagtgggagaacgacaacggcagctggaccccctacgacatggaggtgggcatcaccatccagcacgcctacgagaagcagcacccctggatcgacctgaccagcatcggcttcagctacgtgatcgacttcaacaccatgggccagatcaacagacagacccagagacagagaagagtgagaagaagactggacctgatctaccccatggtgaccggcaccctgcccaaggcccagagctggcccgtgagccccggccccgccaccagcccccccatgagcccctgcagctgcccccagtgcgtgctggtgatgagcgtgaaggccgccgtggtgaacggcagcaccggccccctgcagctgcccgtgaccagaaagaacatgcccccccccggcgtggtgaagctgccccccctgcccggcagcggcgccaagcccctggacagcaccggcaccatcagaggccccctgaagaccgcccccagccaggtgatcagaagacaggccagcagcatgcccaccggcaccaccatgggcagccccgccagcccccccggccccaacagcaagaccggcagagtggccctggccaccctgaacagaaccaacctgcagagactggccatcgcccagagcagagtgctgatcgccagcggcgtgcccaccgtgcccgtgaagaacctgaacggcagcagccccgtgaaccccgccctggccggcatcaccggcatcctgatgagcgccgccggcctgcccgtgtgcctgaccagaccccccaagctggtgctgcaccccccccccgtgagcaagagcgagatcaagagcatccccggcgtgagcaacaccagcagaaagaccaccaagaagcaggccaagaagggcaagacccccgaggaggtgctgaagaagtacctgcagaaggtgagacacccccccgacgaggactgcaccatctgcatggagagactgaccgcccccagcggctacaagggcccccagcccaccgtgaagcccgacctggtgggcaagctgagcagatgcggccacgtgtaccacatctactgcctggtggccatgtacaacaacggcaacaaggacggcagcctgcagtgccccacctgcaagaccatctacggcgtgaagaccggcacccagccccccggcaagatggagtaccacctgatcccccacagcctgcccggccaccccgactgcaagaccatcagaatcatctacagcatcccccccggcatccagggccccgagcaccccaaccccggcaagagcttcagcgccagaggcttccccagacactgctacctgcccgacagcgagaagggcagaaaggtgctgaagctgctgctggtggcctgggacagaagactgatcttcgccatcggcaccagcagcaccaccggcgagagcgacaccgtgatctggaacgaggtgcaccacaagaccgagttcggcagcaacctgaccggccacggctaccccgacgccaactacctggacaacgtgctggccgagctggccgcccagggcatcagcgaggacagcaccgcccaggagaaggactag

SEQ ID NO: 184998 - DNA, 1860 bp, Artificial Sequence
  derived and/or modified sequence
atgcttctggcaagcgccgtggtggtgtgggaatggctgaatgaacatgggagatggaggccctactctcccgcagtgagtcaccatattgaagcagtcgtacgggccggacccagggcaggcggcagcgttgttcttggacaagttgacagtcgtctagctccctacattattgacttgcaatccatgaaccagttccgccaggatactggcaccctcagacctgtgaggcgaaactattacgacccctcttctgcacccgggaaaggagttgtctgggaatgggaaaatgacaatggctcctggacgccatatgacatggaagtagggataaccatccaacacgcttacgaaaagcaacacccctggattgatcttacgtccattggctttagctacgttattgatttcaatactatgggccagattaatcggcagacccaaagacagaggcgggtaaggcgcaggctggacctgatatatccgatggtgaccgggaccctgccaaaggcccagagttggcccgtctcccccgggcccgcgaccagcccaccgatgtctccttgttcatgtcctcaatgcgtcctagtgatgagcgtgaaggcagcagtcgtcaacggatctactggcccactgcagctgcccgtgacacgcaagaacatgcctccaccaggcgtggtcaagctgccgcccctccccgggtcaggagccaagcctctggactcgaccggtaccatccggggaccactgaagactgccccttcacaggtgattcgcaggcaggcttccagcatgcctactggcacgaccatgggatctcctgcctccccacccggacctaactcgaagacagggcgcgtagcactggcaaccctcaaccgcactaacctgcaacgcctcgctattgcccagtctcgtgtccttatcgcctccggggtgcccaccgtcccagtgaaaaatttaaatggctcctcaccggtgaaccccgcactagccggaatcactgggatcctgatgtccgccgctggtttaccggtgtgcctaacccgacctccaaaactggttttgcaccccccaccagtatctaagagtgagatcaaatccatacccggagtgagcaatacctctcggaagactaccaaaaagcaggctaagaaaggaaaaacacccgaggaggtcctcaagaagtacctgcaaaaagtccggcacccgccagatgaagattgcacaatctgcatggagcggctcacagcgccatctgggtataaaggcccccagcctactgtcaagccggacctagtcgggaagctttcacgttgcggccatgtataccatatttactgcctggttgcgatgtataacaatggcaacaaggatgggtctctgcagtgccccacctgtaagaccatttatggtgtaaagaccgggacgcagcctcccgggaagatggagtaccacctgattcctcacagcctgccagggcatcctgattgcaagaccattcgtataatctactccattcctccgggtatccagggaccagagcatcccaaccccggcaagtcttttagcgcccggggattcccacgacactgttacctccctgattctgagaaaggccgtaaagtgctaaagctcctgctcgtggcctgggaccggcgactgatcttcgccattggcacaagctctaccacaggcgagtccgatactgtgatttggaacgaggtccatcacaagaccgagtttggctctaaccttacaggccacggatatcctgatgctaactacctggacaatgtgctcgccgagttagccgctcaggggatttcggaagacagcaccgctcaggagaaggattag

SEQ ID NO: 184999 - DNA, 1860 bp, Artificial Sequence
  derived and/or modified sequence
atgctgctggccagcgctgtggtggtgtgggagtggctgaatgagcacggccgctggaggccctacagccctgctgtgagccaccacatcgaggccgtggtgcgggccggcccccgggccggcggctctgtggtgctgggccaggtggacagccggctggccccctacatcatcgacctgcagagcatgaaccagttccggcaggacaccggcaccctgcggcctgtgagaagaaactactatgaccccagcagcgcccctggaaaaggagtggtgtgggagtgggagaatgacaatggctcctggaccccctatgacatggaggtgggcatcaccatccagcacgcctatgagaagcagcacccctggattgacctgaccagcatcggcttctcctatgtgattgacttcaacaccatgggccagatcaaccggcagacccagaggcagaggagagtgagaagaaggctggacctgatctaccccatggtgacaggcaccctgcccaaggcccagagctggcctgtgtccccaggccctgccaccagcccccccatgagcccctgcagctgcccccagtgtgtgctggtgatgtctgtgaaggctgctgtggtgaatggcagcacaggccccctgcagctgcctgtgaccaggaagaacatgcctcctcctggggtggtgaagctgccccccctgcccggcagcggggccaagcccctggacagcacaggcaccatccggggccccctgaagacagcccccagccaggtgatccggcggcaggccagctccatgcccaccggcaccaccatgggcagccctgccagccccccaggccccaacagcaagacaggccgggtggccctggccaccctgaacagaaccaacctgcagaggctggccatcgcccagagccgggtgctgattgccagcggcgtgcccaccgtgcctgtgaagaacctgaatggcagcagccctgtgaacccagccctggccggcatcaccggcatcctgatgtctgctgctggcctgcctgtgtgcctgaccaggcctcccaagctggtgctgcaccccccacctgtgtccaagtctgagatcaagagcatccctggggtgagcaacaccagcaggaagaccaccaagaagcaggccaagaagggcaagaccccagaggaggtgctgaagaagtacctgcagaaggtgcgccaccccccagatgaggactgcaccatctgcatggagcggctgacagcccccagcggctacaagggcccccagcccaccgtgaagccagacctggtgggcaagctgagccgctgtggccacgtgtaccacatctactgcctggtggccatgtacaacaatggaaacaaggatggcagcctgcagtgccccacctgcaagaccatctatggagtgaagacaggcacccagcccccaggcaagatggagtaccacctgatcccccacagcctgcccggccacccagactgcaagaccatccgcatcatctacagcatccccccaggcatccagggccctgagcaccccaaccctgggaagagcttcagcgcccggggcttccccaggcactgctacctgcctgattctgagaagggcaggaaggtgctgaagctgctgctggtggcctgggacagaagactcatctttgccatcggcaccagcagcaccactggagagagtgacaccgtcatctggaatgaggtgcaccacaagacagaatttggcagcaacctgactggacatggctacccagatgccaactacctggacaacgtgctggccgagctggccgcccagggcatcagcgaggacagcacagcccaggagaaggactag

SEQ ID NO: 185000 - DNA, 1860 bp, Artificial Sequence
  derived and/or modified sequence
atgctgctggccagcgccgtggtggtgtgggagtggctgaacgagcacggacggtggcgaccctatagccccgccgtgagtcaccacattgaagcagttgtcagagcagggcccagagccggaggatccgttgtactgggacaggtcgatagccggctagccccttatattatcgacctccaaagcatgaatcagttccgtcaggataccggaactctgcgccccgtccgcaggaactattacgacccgtcgtctgcaccgggtaagggcgtggtgtgggaatgggagaacgataacgggtcttggaccccatatgacatggaggtggggatcactattcagcatgcctacgaaaaacagcatccatggattgaccttacctcaattggattctcgtacgtaatcgactttaacacaatgggtcagattaatagacagacgcagagacagcggagggtgcgacgcaggttggatctaatatacccgatggtaacaggcacactgccgaaggcgcagtcctggcccgtgtcgccggggcctgcgacgtccccccctatgagcccctgttcttgcccacagtgtgtgctcgtgatgtccgtcaaagctgccgtcgtaaatggctccacaggaccgttgcagctcccggtgacacggaaaaacatgcctccacctggggtagttaagttgccacccctgcctggctcgggggccaaaccgctggacagcactgggactatacgcggcccactgaagactgccccgtcccaagttattcgccgtcaggcgtcatcgatgcctacagggactacaatgggatcccctgcctcccctccagggccaaatagtaaaaccggacgtgtggccttagccactctgaatcgcacaaacctacaaaggcttgctatagctcaaagtagagttctgattgccagcggggtccctaccgttccggtcaaaaatctgaacggcagctcgcccgtaaatccagctctcgccgggattacaggcatcctgatgagcgcagctggactgcccgtgtgcctgaccagacccccaaagctggtattgcacccaccacccgtttccaaatccgagatcaaaagcattccaggcgtcagtaatacctcaaggaagactaccaaaaagcaggccaagaaaggaaagacgcctgaagaagtcctgaagaagtacttacagaaagtgaggcaccctccagacgaggactgtaccatatgtatggaacgcctaaccgccccctctggctataaagggcctcagcccaccgtgaagccagatctggtcggtaagctgagtaggtgtgggcacgtataccatatttattgcctggtggctatgtacaataatgggaataaagatggctctctgcagtgccctacctgtaaaaccatatatggagttaagactggaacacaacctccaggaaaaatggagtatcatcttatccctcattccctgcccggtcatcccgactgcaaaacaatacgtatcatctacagtatccccccaggaatccagggacctgagcaccccaacccaggaaaatcatttagcgcgaggggttttccccggcattgctacctcccagacagcgagaagggacggaaagttttgaaactcttgctggtcgcatgggaccgcagactcatattcgccattgggacaagctccacaacaggtgagagtgacactgtcatctggaatgaagtccaccacaaaactgaattcggttccaatttaacgggacatggctaccccgatgcgaactacctcgacaacgtcctggcagaattagccgcccagggcatttccgaggattcaactgctcaggaaaaggactag

SEQ ID NO: 185001 - DNA, 1860 bp, Artificial Sequence
  derived and/or modified sequence
atgctgcttgccagtgccgtggtcgtatgggagtggctcaacgaacatggacggtggcgtccatactcccctgctgtgtcccatcacatcgaagcggtcgtgagagctggtccgagagctggcggtagcgtcgtcctgggtcaggtggacagccgtctggcaccctatattattgacctccagtccatgaatcaatttaggcaggacacggggacactgcggcctgttagacggaattattacgatccttcgtctgctccgggaaagggagtagtctgggaatgggaaaacgacaatgggtcctggacaccctacgatatggaggtgggaatcacaattcagcatgcttatgaaaagcagcatccctggatcgacctgactagtatcggctttagctatgtcattgactttaataccatgggtcaaataaaccgccaaactcagagacaaagaagggtccggagaaggcttgatctcatctaccccatggtgactggtactctgccgaaggcacagtcatggcccgtgtcacccggacctgctacaagccctcccatgtctccttgcagttgcccacaatgtgttctcgtcatgtcagtaaaagctgccgtagtgaatggaagtactgggcctctccagctgcccgttacacgaaagaatatgccacccccaggagtcgtgaaactcccacctctgccaggctccggggctaaacccctggatagtacagggacaattaggggccctttgaaaaccgctccctcacaggtgataaggaggcaggccagcagcatgccgaccggtacaaccatgggaagccccgcttctcctcccggacctaactcaaaaaccggcagggttgcgttggctactctcaatcggaccaatctccaaaggctggccatagcccaaagcagagtgctgattgcctctggggtgcctacagtacctgtcaagaacctgaatgggtcgtctccagtgaaccccgctctggctggcattactggtatcctaatgtctgcggcaggcctgcctgtgtgtctcacccggccacctaaattagttttgcatcctccccctgtgagcaagagcgagatcaagagcattcctggagtgtcgaacaccagtagaaaaacgactaagaagcaggcaaaaaagggcaagactcccgaggaagtgttgaagaagtacctgcagaaagtgcgacacccccctgatgaagactgcacaatctgcatggagcgccttaccgctcctagtgggtataaagggcctcagcccacagtaaagccagatctggtgggcaaactgtctcgatgcggacatgtttatcatatttactgcctcgtggcaatgtacaataacggcaacaaggatggcagcctccagtgtccgacctgcaagacaatttacggagtgaagacggggactcagcctcccggaaagatggaataccatcttattccccactctctgccaggacaccctgactgcaagacgattcgtattatctatagcatccctccgggtatccagggacccgaacatcccaatccaggaaaatccttcagcgcacggggtttccctcgccactgctacctgcctgattccgagaaggggagaaaggtgctgaaactgcttctggttgcttgggatcggagactcatcttcgccatcggcacttccagcactactggcgagagcgatacagtcatatggaatgaagttcaccacaaaacagagtttgggtcgaatctaaccggccacggttatcctgatgcaaattacctcgacaatgtactcgctgagctggctgctcaaggcatcagtgaggatagcaccgcccaggagaaggattag

SEQ ID NO: 185002 - protein, 6885 aa, Artificial Sequence
  derived and/or modified sequence
MASSPELPTEDEQGSWGIDDLHISLQAEQEDTQKKAFTCWINSQLARHTSPSVISDLFTDIKKGHVLLDLLEVLSGQQLPRDKGSNTFQCRINIEHALTFLRNRSIKLINIHVTDIIDGNPSIILGLIWTIILHFHIEKLAQTLSCNYNQPSLDDVSVVDSSPASSPPAKKCSKVQARWQMSARKALLLWAQEQCATYESVNVTDFKSSWRNGMAFLAIIHALRPDLIDMKSVKHRSNKDNLREAFRIAEQELKIPRLLEPEDVDVVDPDEKSIMTYVAQFLQYSKDAPGTGEEAQGKVKDAMGWLTLQKEKLQKLLKDSENDTYFKKYNSLLSFMESFNEEKKSFLDVLSIKRDLDELDKDHLQLREAWDGLDHQINAWKIKLNYALPPPLHQTEAWLQEVEELMDEDLSASQDHSQAVTLIQEKMTLFKSLMDRFEHHSNILLTFENKDENHLPLVPPNKLEEMKRRINNILEKKFILLLEFHYYKCLVLGLVDEVKSKLDIWNIKYGSRESVELLLEDWHKFIEEKEFLARLDTSFQKCGEIYKNLAGECQNINKQYMMVKSDVCMYRKNIYNVKSTLQKVLACWATYVENLRLLRACFEETKKEEIKEVPFETLAQWNLEHATLNEAGNFLVEVSNDVVGSSISKELRRLNKRWRKLVSKTQLEMNLPLMIKKQDQPTFDNSGNILSKEEKATVEFSTDMSVELPENYNQNIKAGEKHEKENEEFTGQLKVAKDVEKLIGQVEIWEAEAKSVLDQDDVDTSMEESLKHLIAKGSMFDELMARSEDMLQMDIQNISSQESFQHVLTTGLQAKIQEAKEKVQINVVKLIAALKNLTDVSPDLDIRLKMEESQKELESYMMRAQQLLGQRESPGELISKHKEALIISNTKSLAKYLKAVEELKNNVTEDIKMSLEEKSRDVCAKWESLHHELSLYVQQLKIDIEKGKLSDNILKLEKQINKEKKLIRRGRTKGLIKEHEACFSEEGCLYQLNHHMEVLRELCEELPSQKSQQEVKRLLKDYEQKIERLLKCASEIHMTLQPTAGGTSKNEGTITTSENRGGDPHSEAPFAKSDNQPSTEKAMEPTMKFSLASVLRPLQEESIMEKDYSASINSLLERYDTYRDILEHHLQNNKFRITSDFSSEEDRSSSCLQAKLTDLQVIKNETDARWKEFEIISLKLENHVNDIKKPFVIKERDTLKERERELQMTLNTRMESLETALRLVLPVEKASLLLCGSDLPLHKMAIQGFHLIDADRIYQHLRNIQDSIAKQIEICNRLEEPGNFVLKELHPFDLHAMQNIILKYKTQFEGMNHRVQRSEDTLKALEDFLASLRTAKLSAEPVTDLSASDTQVAQENTLTVKNKEGEIHLMKDKAKHLDKCLKMLDMSFKDAERGDDTSCENLLDAFSIKLSETHGYGVQEEFTEENKLLEACIFKNNELLKNIQDVQSQISKIGLKDPTVPAVKHRKKSLIRLDKVLDEYEEEKRHLQEMANSLPHFKDGREKTVNQQCQNTVVLWENTKALVTECLEQCGRVLELLKQYQNFKSILTTLIQKEESVISLQASYMGKENLKKRIAEIEIVKEEFNEHLEVVDKINQVCKNLQFYLNKMKTFEEPPFEKEANIIVDRWLDINEKTEDYYENLGRALALWDKLFNLKNVIDEWTEKALQKMELHQLTEEDRERLKEELQVHEQKTSEFSRRVAEIQFLLQSSEIPLELQVMESSILNKMEHVQKCLTGESNCHALSGSTAELREDLDQAKTQIGMTESLLKALSPSDSLEIFTKLEEIQQQILQQKHSMILLENQIGCLTPELSELKKQYESVSDLFNTKKSVLQDHFSKLLNDQCKNFNDWFSNIKVNLKECFESSETKKSVEQKLQKLSDFLTLEGRNSKIKQVDSVLKHVKKHLPKAHVKELISWLVGQEFELEKMESICQARAKELEDSLQQLLRLQDDHRNLRKWLTNQEEKWKGMEEPGEKTELFCQALARKREQFESVAQLNNSLKEYGFTEEEEIIMEATCLMDRYQTLLRQLSEIEEEDKLLPTEDQSFNDLAHDVIHWIKEIKESLMVLNSSEGKMPLEERIQKIKEIILLKPEGDARIETIMKQAESSEAPLVQKTLTDISNQWDNTLHLASTYLSHQEKLLLEGEKYLQSKEDLRLMLIELKKKQEAGFALQHGLQEKKAQLKIYKKFLKKAQDLTSLLKELKSQGNYLLECTKNPSFSEEPWLEIKHLHESLLQQLQDSVQNLDGHVREHDSYQVCVTDLNTTLDNFSKEFVSFSDKPVDQIAVEEKLQKLQELENRLSLQDGTLKKILALAKSVKQNTSSVGQKIIKDDIKSLQCKQKDLENRLASAKQEMECCLNSILKSKRSTEKKGKFTLPGREKQATSDVQESTQESAAVEKLEEDWEINKDSAVEMAMSKQLSLNAQESMKNTEDERKVNELQNQPLELDTMLRNEQLEEIEKLYTQLEAKKAAIKPLEQTECLNKTETGALVLHNIGYSAQHLDNLLQALITLKKNKESQYCVLRDFQEYLAAVESSMKALLTDKESLKVGPLDSVTYLDKIKKFIASIEKEKDSLGNLKIKWENLSNHVTDMDKKLLESQIKQLEHGWEQVEQQIQKKYSQQVVEYDEFTTLMNKVQDTEISLQQQQQHLQLRLKSPEERAGNQSMIALTTDLQATKHGFSVLKGQAELQMKRIWGEKEKKNLEDGINNLKKQWETLEPLHLEAENQIKKCDIRNKMKETILWAKNLLGELNPSIPLLPDDILSQIRKCKVTHDGILARQQSVESLAEEVKDKVPSLTTYEGSDLNNTLEDLRNQYQMLVLKSTQRSQQLEFKLEERSNFFAIIRKFQLMVQESETLIIPRVETAATEAELKHHHVTLEASQKELQEIDSGISTHLQELTNIYEELNVFERLFLEDQLKNLKIRTNRIQRFIQNTCNEVEHKIKFCRQFHEKTSALQEEADSIQRNELLLNQEVNKGVKEEIYNLKDRLTAIKCCILQVLKLKKVFDYIGLNWDFSQLDQLQTQVFEKEKELEEKIKQLDTFEEEHGKYQALLSKMRAIDLQIKKMTEVVLKAPDSSPESRRLNAQILSQRIEKAKCLCDEIIKKLNENKTFDDSFKEKEILQIKLNAEENDKLYKVLQNMVLELSPKELDEKNCQDKLETSLHVLNQIKSQLQQPLLINLEIKHIQNEKDNCEAFQEQVWAEMCSIKAVTAIEKQREENSSEASDVETKLREFEDLQMQLNTSIDLRTNVLNDAYENLTRYKEAVTRAVESITSLEAIIIPYRVDVGNPEESLEMPLRKQEELESTVAHIQDLTEKLGMISSPEAKLQLQYTLQELVSKNSAMKEAFKAQETEAERYLENYKCYRKMEEDIYTNLSKMETVLGQSMSSLPLSYREALERLEQSKALVSNLISTKEELMKLRQILRLLRLRCTENDGICLLKIVSALWEKWLSLLEAAKEWEMWCEELKQEWKFVSEEIEREAIILDNLQEELPEISKTKEAATTEELSELLDCLCQYGENVEKQQLLLTLLLQRIRSIQNVPESSGAVETVPAFQEITSMKERCNKLLQKVQKNKELVQTEIQERHSFTKEIIALKNFFQQTTTSFQNMAFQDHPEKSEQFEELQSILKKGKLTFENIMEKLRIKYSEMYTIVPAEIESQVEECRKALEDIDEKISNEVLKSSPSYAMRRKIEEINNGLHNVEKMLQQKSKNIEKAQEIQKKMWDELDLWHSKLNELDSEVQDIVEQDPGQAQEWMDNLMIPFQQYQQVSQRAECRTSQLNKATVKMEEYSDLLKSTEAWIENTSHLLANPADYDSLRTLSHHASTVQMALEDSEQKHNLLHSIFMDLEDLSIIFETDELTQSIQELSNQVTALQQKIMESLPQIQRMADDVVAIESEVKSMEKRVSKIKTILLSKEIFDFSPEEHLKHGEVILENIRPMKKTIAEIVSYQVELRLPQTGMKPLPVFQRTNQLLQDIKLLENVTQEQNELLKVVIKQTNEWDEEIENLKQILNNYSAQFSLEHMSPDQADKLPQLQGEIERMEKQILSLNQRKEDLLVDLKATVLNLHQHLKQEQEGVERDRLPAVTSEEGGVAERDASERKLNRRGSMSYLAAVEEEVEESSVKSDNGDEKAEPSPQSWSSLWKHDKDMEEDRASSSSGTIVQEAYGKISTSDNSMAQILTPDSLNTEQGPECSLRPNQTEEGTTPPIEADTLDSSDAQGGLEPRVEKTRPEPTEVLHACKTQVAELELWLQQANVAVEPETLNADMQQVLEQQLVGCQAMLTEIEHKVAFLLETCKDQGLGDNGATQHEAEALSLKLKTVKCNLEKVQMMLQEKHSEDQHPTILKKSSEPEHQEALQPVNLSELESIVTERPQFSRQKDFQQQQVLELKPMEQKDFIKFIEFNAKKMWPQYCQHDNDTTQESSASNQASSPENDVPDSILSPQGQNGDKWQYLHHELSSKIKLPLPQLVEPQVSTNMGILPSVTMYNFRYPTTEELKTYTTQLEDLRQEASNLQTQENMTEEAYINLDKKLFELFLTLSQCLSSVEEMLEMPRLYREDGSGQQVHYETLALELKKLYLALSDKKGDLLKAMTWPGENTNLLLECFDNLQVCLEHTQAAAVCRSKSLKAGLDYNRSYQNEIKRLYHQLIKSKTSLQQSLNEISGQSVAEQLQKADAYTVELENAESRVAKLRDEGERLHLPYALLQEVYKLEDVLDSMWGMLRARYTELSSPFVTESQQDALLQGMVELVKIGKEKLAHGHLKQTKSKVALQAQIENHKVFFQKLVADMLLIQAYSAKILPSLLQNRETFWAEQVTEVKILEEKSRQCGMKLQSLLQKWEEFDENYASLEKDLEILISTLPSVSLVEETEERLVERISFYQQIKRNIGGKHARLYQTLNEGKQLVASVSCPELEGQIAKLEEQWLSLNKKIDHELHRLQALLKHLLSYNRDSDQLTKWLESSQHTLNYWKEQSLNVSQDLDTIRSNINNFFEFSKEVDEKSSLKTAVISIGNQLLHLKETDTATLRASLAQFEQKWTMLITQLPDIQEKLHQLQMEKLPSRKAITEMISWMNNVEHQTSDEDSVHSPSSASQVKHLLQKHKEFRMEMDYKQWIVDFVNQSLLQLSTCDVESKRYERTEFAEHLGEMNRQWHRVHGMLNRKIQHLEQLLESITESENKIQILNNWLEAQEERLKTLQKPESVISVQKLLLDCQDIENQLAIKSKALDELKQSYLTLESGAVPLLEDTASRIDELFQKRSSVLTQVNQLKTSMQSVLQEWKIYDQLYDEVNMMTIRFWYCMEHSKPVVLSLETLRCQVENLQSLQDEAESSEGSWEKLQEVIGKLKGLCPSVAEIIEEKCQNTHKRWTQVNQAIADQLQKAQSLLQLWKAYSNAHGEAAARLKQQEAKFQQLANISMSGNNLAEILPPALQDIKELQHDVQKTKEAFLQNSSVLDRLPQPAESSTHMLLPGPLHSLQRAAYLEKMLLVKANEFEFVLSQFKDFGVRLESLKGLIMHEEENLDRLHQQEKENPDSFLNHVLALTAQSPDIEHLNEVSLKLPLSDVAVKTLQNMNRQWIRATATALERCSELQGIGLNEKFLYCCEKWIQLLEKIEEALKVDVANSLPELLEQQKTYKMLEAEVSINQTIADSYVTQSLQLLDTTEIENRPEFITEFSKLTDRWQNAVQGVRQRKGDVDGLVRQWQDFTTSVENLFRFLTDTSHLLSAVKGQERFSLYQTRSLIHELKNKEIHFQRRRTTCALTLEAGEKLLLTTDLKTKESVGRRISQLQDSWKDMEPQLAEMIKQFQSTVETWDQCEKKIKELKSRLQVLKAQSEDPLPELHEDLHNEKELIKELEQSLASWTQNLKELQTMKADLTRHVLVEDVMVLKEQIEHLHRQWEDLCLRVAIRKQEIEDRLNTWVVFNEKNKELCAWLVQMENKVLQTADISIEEMIEKLQKDCMEEINLFSENKLQLKQMGDQLIKASNKSRAAEIDDKLNKINDRWQHLFDVIGSRVKKLKETFAFIQQLDKNMSNLRTWLARIESELSKPVVYDVCDDQEIQKRLAEQQDLQRDIEQHSAGVESVFNICDVLLHDSDACANETECDSIQQTTRSLDRRWRNICAMSMERRMKIEETWRLWQKFLDDYSRFEDWLKSAERTAACPNSSEVLYTSAKEELKRFEAFQRQIHERLTQLELINKQYRRLARENRTDTASRLKQMVHEGNQRWDNLQRRVTAVLRRLRHFTNQREEFEGTRESILVWLTEMDLQLTNVEHFSESDADDKMRQLNGFQQEITLNTNKIDQLIVFGEQLIQKSEPLDAVLIEDELEELHRYCQEVFGRVSRFHRRLTSCTPGLEDEKEASENETDMEDPREIQTDSWRKRGESEEPSSPQSLCHLVAPGHERSGCETPVSVDSIPLEWDHTGDVGGSSSHEEDEEGPYYSALSGKSISDGHSWHVPDSPSCPEHHYKQMEGDRNVPPVPPASSTPYKPPYGKLLLPPGTDGGKEGPRVLNGNPQQEDGGLAGITEQQSGAFDRWEMIQAQELHNKLKIKQNLQQLNSDISAITTWLKKTEAELEMLKMAKPPSDIQEIELRVKRLQEILKAFDTYKALVVSVNVSSKEFLQTESPESTELQSRLRQLSLLWEAAQGAVDSWRGGLRQSLMQCQDFHQLSQNLLLWLASAKNRRQKAHVTDPKADPRALLECRRELMQLEKELVERQPQVDMLQEISNSLLIKGHGEDCIEAEEKVHVIEKKLKQLREQVSQDLMALQGTQNPASPLPSFDEVDSGDQPPATSVPAPRAKQFRAVRTTEGEEETESRVPGSTRPQRSFLSRVVRAALPLQLLLLLLLLLACLLPSSEEDYSCTQANNFARSFYPMLRYTNGPPPT

SEQ ID NO: 185003 - protein, 3270 aa, Artificial Sequence
  derived and/or modified sequence
MEKLRIKYSEMYTIVPAEIESQVEECRKALEDIDEKISNEVLKSSPSYAMRRKIEEINNGLHNVEKMLQQKSKNIEKAQEIQKKMWDELDLWHSKLNELDSEVQDIVEQDPGQAQEWMDNLMIPFQQYQQVSQRAECRTSQLNKATVKMEEYSDLLKSTEAWIENTSHLLANPADYDSLRTLSHHASTVQDSKCFRSGPRPNIYVSYYVTVIQMALEDSEQKHNLLHSIFMDLEDLSIIFETDELTQSIQELSNQVTALQQKIMESLPQIQRMADDVVAIESEVKSMEKRVSKIKTILLSKEIFDFSPEEHLKHGEVILENIRPMKKTIAEIVSYQVELRLPQTGMKPLPVFQRTNQLLQDIKLLENVTQEQNELLKVVIKQTNEWDEEIENLKQILNNYSAQFSLEHMSPDQADKLPQLQGEIERMEKQILSLNQRKEDLLVDLKATVLNLHQHLKQEQEGVERDRLPAVTSEEGGVAERDASERKLNRRGSMSYLAAVEEEVEESSVKSDNGDEKAEPSPQSWSSLWKHDKDMEEDRASSSSGTIVQEAYGKISTSDNSMAQILTPDSLNTEQGPECSLRPNQTEEGTTPPIEADTLDSSDAQGGLEPRVEKTRPEPTEVLHACKTQVAELELWLQQANVAVEPETLNADMQQVLEQQLVGCQAMLTEIEHKVAFLLETCKDQGLGDNGATQHEAEALSLKLKTVKCNLEKVQMMLQEKHSEDQHPTILKKSSEPEHQEALQPVNLSELESIVTERPQFSRQKDFQQQQVLELKPMEQKDFIKFIEFNAKKMWPQYCQHDNDTTQESSASNQASSPENDVPDSILSPQGQNGDKWQYLHHELSSKIKLPLPQLVEPQVSTNMGILPSVTMYNFRYPTTEELKTYTTQLEDLRQEASNLQTQENMTEEAYINLDKKLFELFLTLSQCLSSVEEMLEMPRLYREDGSGQQVHYETLALELKKLYLALSDKKGDLLKAMTWPGENTNLLLECFDNLQVCLEHTQAAAVCRSKSLKAGLDYNRSYQNEIKRLYHQLIKSKTSLQQSLNEISGQSVAEQLQKADAYTVELENAESRVAKLRDEGERLHLPYALLQEVYKLEDVLDSMWGMLRARYTELSSPFVTESQQDALLQGMVELVKIGKEKLAHGHLKQTKSKVALQAQIENHKVFFQKLVADMLLIQAYSAKILPSLLQNRETFWAEQVTEVKILEEKSRQCGMKLQSLLQKWEEFDENYASLEKDLEILISTLPSVSLVEETEERLVERISFYQQIKRNIGGKHARLYQTLNEGKQLVASVSCPELEGQIAKLEEQWLSLNKKIDHELHRLQALLKHLLSYNRDSDQLTKWLESSQHTLNYWKEQSLNVSQDLDTIRSNINNFFEFSKEVDEKSSLKTAVISIGNQLLHLKETDTATLRASLAQFEQKWTMLITQLPDIQEKLHQLQMEKLPSRKAITEMISWMNNVEHQTSDEDSVHSPSSASQVKHLLQKHKEFRMEMDYKQWIVDFVNQSLLQLSTCDVESKRYERTEFAEHLGEMNRQWHRVHGMLNRKIQHLEQLLESITESENKIQILNNWLEAQEERLKTLQKPESVISVQKLLLDCQDIENQLAIKSKALDELKQSYLTLESGAVPLLEDTASRIDELFQKRSSVLTQVNQLKTSMQSVLQEWKIYDQLYDEVNMMTIRFWYCMEHSKPVVLSLETLRCQVENLQSLQDEAESSEGSWEKLQEVIGKLKGLCPSVAEIIEEKCQNTHKRWTQVNQAIADQLQKAQSLLQLWKAYSNAHGEAAARLKQQEAKFQQLANISMSGNNLAEILPPALQDIKELQHDVQKTKEAFLQNSSVLDRLPQPAESSTHMLLPGPLHSLQRAAYLEKMLLVKANEFEFVLSQFKDFGVRLESLKGLIMHEEENLDRLHQQEKENPDSFLNHVLALTAQSPDIEHLNEVSLKLPLSDVAVKTLQNMNRQWIRATATALERCSELQGIGLNEKFLYCCEKWIQLLEKIEEALKVDVANSLPELLEQQKTYKMLEAEVSINQTIADSYVTQSLQLLDTTEIENRPEFITEFSKLTDRWQNAVQGVRQRKGDVDGLVRQWQDFTTSVENLFRFLTDTSHLLSAVKGQERFSLYQTRSLIHELKNKEIHFQRRRTTCALTLEAGEKLLLTTDLKTKESVGRRISQLQDSWKDMEPQLAEMIKQFQSTVETWDQCEKKIKELKSRLQVLKAQSEDPLPELHEDLHNEKELIKELEQSLASWTQNLKELQTMKADLTRHVLVEDVMVLKEQIEHLHRQWEDLCLRVAIRKQEIEDRLNTWVVFNEKNKELCAWLVQMENKVLQTADISIEEMIEKLQKDCMEEINLFSENKLQLKQMGDQLIKASNKSRAAEIDDKLNKINDRWQHLFDVIGSRVKKLKETFAFIQQLDKNMSNLRTWLARIESELSKPVVYDVCDDQEIQKRLAEQQDLQRDIEQHSAGVESVFNICDVLLHDSDACANETECDSIQQTTRSLDRRWRNICAMSMERRMKIEETWRLWQKFLDDYSRFEDWLKSAERTAACPNSSEVLYTSAKEELKRFEAFQRQIHERLTQLELINKQYRRLARENRTDTASRLKQMVHEGNQRWDNLQRRVTAVLRRLRHFTNQREEFEGTRESILVWLTEMDLQLTNVEHFSESDADDKMRQLNGFQQEITLNTNKIDQLIVFGEQLIQKSEPLDAVLIEDELEELHRYCQEVFGRVSRFHRRLTSCTPGLEDEKEASENETDMEDPREIQTDSWRKRGESEEPSSPQSLCHLVAPGHERSGCETPVSVDSIPLEWDHTGDVGGSSSHEEDEEGPYYSALSGKSISDGHSWHVPDSPSCPEHHYKQMEGDRNVPPVPPASSTPYKPPYGKLLLPPGTDGGKEGPRVLNGNPQQEDGGLAGITEQQSGAFDRWEMIQAQELHNKLKIKQNLQQLNSDISAITTWLKKTEAELEMLKMAKPPSDIQEIELRVKRLQEILKAFDTYKALVVSVNVSSKEFLQTESPESTELQSRLRQLSLLWEAAQGAVDSWRGGLRQSLMQCQDFHQLSQNLLLWLASAKNRRQKAHVTDPKADPRALLECRRELMQLEKELVERQPQVDMLQEISNSLLIKGHGEDCIEAEEKVHVIEKKLKQLREQVSQDLMALQGTQNPASPLPSFDEVDSGDQPPATSVPAPRAKQFRAVRTTEGEEETESRVPGSTRPQRSFLSRVVRAALPLQLLLLLLLLLACLLPSSEEDYSCTQANNFARSFYPMLRYTNGPPPT

SEQ ID NO: 185004 - protein, 668 aa, Artificial Sequence
  derived and/or modified sequence
MVHEGNQRWDNLQRRVTAVLRRLRHFTNQREEFEGTRESILVWLTEMDLQLTNVEHFSESDADDKMRQLNGFQQEITLNTNKIDQLIVFGEQLIQKSEPLDAVLIEDELEELHRYCQEVFGRVSRFHRRLTSCTPGLEDEKEASENETDMEDPREIQTDSWRKRGESEEPSSPQSLCHLVAPGHERSGCETPVSVDSIPLEWDHTGDVGGSSSHEEDEEGPYYSALSGKSISDGHSWHVPDSPSCPEHHYKQMEGDRNVPPVPPASSTPYKPPYGKLLLPPGTDGGKEGPRVLNGNPQQEDGGLAGITEQQSGAFDRWEMIQAQELHNKLKIKQNLQQLNSDISAITTWLKKTEAELEMLKMAKPPSDIQEIELRVKRLQEILKAFDTYKALVVSVNVSSKEFLQTESPESTELQSRLRQLSLLWEAAQGAVDSWRGGLRQSLMQCQDFHQLSQNLLLWLASAKNRRQKAHVTDPKADPRALLECRRELMQLEKELVERQPQVDMLQEISNSLLIKGHGEDCIEAEEKVHVIEKKLKQLREQVSQDLMALQGTQNPASPLPSFDEVDSGDQPPATSVPAPRAKQFRAVRTTEGEEETESRVPGSTRPQRSFLSRVVRAALPLQLLLLLLLLLACLLPSSEEDYSCTQANNFARSFYPMLRYTNGPPPT

SEQ ID NO: 185005 - protein, 763 aa, Artificial Sequence
  derived and/or modified sequence
MSMERRMKIEETWRLWQKFLDDYSRFEDWLKSAERTAACPNSSEVLYTSAKEELKRFEAFQRQIHERLTQLELINKQYRRLARENRTDTASRLKQMVHEGNQRWDNLQRRVTAVLRRLRHFTNQREEFEGTRESILVWLTEMDLQLTNVEHFSESDADDKMRQLNGFQQEITLNTNKIDQLIVFGEQLIQKSEPLDAVLIEDELEELHRYCQEVFGRVSRFHRRLTSCTPGLEDEKEASENETDMEDPREIQTDSWRKRGESEEPSSPQSLCHLVAPGHERSGCETPVSVDSIPLEWDHTGDVGGSSSHEEDEEGPYYSALSGKSISDGHSWHVPDSPSCPEHHYKQMEGDRNVPPVPPASSTPYKPPYGKLLLPPGTDGGKEGPRVLNGNPQQEDGGLAGITEQQSGAFDRWEMIQAQELHNKLKIKQNLQQLNSDISAITTWLKKTEAELEMLKMAKPPSDIQEIELRVKRLQEILKAFDTYKALVVSVNVSSKEFLQTESPESTELQSRLRQLSLLWEAAQGAVDSWRGGLRQSLMQCQDFHQLSQNLLLWLASAKNRRQKAHVTDPKADPRALLECRRELMQLEKELVERQPQVDMLQEISNSLLIKGHGEDCIEAEEKVHVIEKKLKQLREQVSQDLMALQGTQNPASPLPSFDEVDSGDQPPATSVPAPRAKQFRAVRTTEGEEETESRVPGSTRPQRSFLSRVVRAALPLQLLLLLLLLLACLLPSSEEDYSCTQANNFARSFYPMLRYTNGPPPT

SEQ ID NO: 185006 - DNA, 20658 bp, Artificial Sequence
  derived and/or modified sequence
atggccagcagccccgagctgcccaccgaggacgagcagggcagctggggcatcgacgacctgcacatcagcctgcaggccgagcaggaggacacccagaagaaggccttcacctgctggatcaacagccagctggccagacacaccagccccagcgtgatcagcgacctgttcaccgacatcaagaagggccacgtgctgctggacctgctggaggtgctgagcggccagcagctgcccagagacaagggcagcaacaccttccagtgcagaatcaacatcgagcacgccctgaccttcctgagaaacagaagcatcaagctgatcaacatccacgtgaccgacatcatcgacggcaaccccagcatcatcctgggcctgatctggaccatcatcctgcacttccacatcgagaagctggcccagaccctgagctgcaactacaaccagcccagcctggacgacgtgagcgtggtggacagcagccccgccagcagcccccccgccaagaagtgcagcaaggtgcaggccagatggcagatgagcgccagaaaggccctgctgctgtgggcccaggagcagtgcgccacctacgagagcgtgaacgtgaccgacttcaagagcagctggagaaacggcatggccttcctggccatcatccacgccctgagacccgacctgatcgacatgaagagcgtgaagcacagaagcaacaaggacaacctgagagaggccttcagaatcgccgagcaggagctgaagatccccagactgctggagcccgaggacgtggacgtggtggaccccgacgagaagagcatcatgacctacgtggcccagttcctgcagtacagcaaggacgcccccggcaccggcgaggaggcccagggcaaggtgaaggacgccatgggctggctgaccctgcagaaggagaagctgcagaagctgctgaaggacagcgagaacgacacctacttcaagaagtacaacagcctgctgagcttcatggagagcttcaacgaggagaagaagagcttcctggacgtgctgagcatcaagagagacctggacgagctggacaaggaccacctgcagctgagagaggcctgggacggcctggaccaccagatcaacgcctggaagatcaagctgaactacgccctgcccccccccctgcaccagaccgaggcctggctgcaggaggtggaggagctgatggacgaggacctgagcgccagccaggaccacagccaggccgtgaccctgatccaggagaagatgaccctgttcaagagcctgatggacagattcgagcaccacagcaacatcctgctgaccttcgagaacaaggacgagaaccacctgcccctggtgccccccaacaagctggaggagatgaagagaagaatcaacaacatcctggagaagaagttcatcctgctgctggagttccactactacaagtgcctggtgctgggcctggtggacgaggtgaagagcaagctggacatctggaacatcaagtacggcagcagagagagcgtggagctgctgctggaggactggcacaagttcatcgaggagaaggagttcctggccagactggacaccagcttccagaagtgcggcgagatctacaagaacctggccggcgagtgccagaacatcaacaagcagtacatgatggtgaagagcgacgtgtgcatgtacagaaagaacatctacaacgtgaagagcaccctgcagaaggtgctggcctgctgggccacctacgtggagaacctgagactgctgagagcctgcttcgaggagaccaagaaggaggagatcaaggaggtgcccttcgagaccctggcccagtggaacctggagcacgccaccctgaacgaggccggcaacttcctggtggaggtgagcaacgacgtggtgggcagcagcatcagcaaggagctgagaagactgaacaagagatggagaaagctggtgagcaagacccagctggagatgaacctgcccctgatgatcaagaagcaggaccagcccaccttcgacaacagcggcaacatcctgagcaaggaggagaaggccaccgtggagttcagcaccgacatgagcgtggagctgcccgagaactacaaccagaacatcaaggccggcgagaagcacgagaaggagaacgaggagttcaccggccagctgaaggtggccaaggacgtggagaagctgatcggccaggtggagatctgggaggccgaggccaagagcgtgctggaccaggacgacgtggacaccagcatggaggagagcctgaagcacctgatcgccaagggcagcatgttcgacgagctgatggccagaagcgaggacatgctgcagatggacatccagaacatcagcagccaggagagcttccagcacgtgctgaccaccggcctgcaggccaagatccaggaggccaaggagaaggtgcagatcaacgtggtgaagctgatcgccgccctgaagaacctgaccgacgtgagccccgacctggacatcagactgaagatggaggagagccagaaggagctggagagctacatgatgagagcccagcagctgctgggccagagagagagccccggcgagctgatcagcaagcacaaggaggccctgatcatcagcaacaccaagagcctggccaagtacctgaaggccgtggaggagctgaagaacaacgtgaccgaggacatcaagatgagcctggaggagaagagcagagacgtgtgcgccaagtgggagagcctgcaccacgagctgagcctgtacgtgcagcagctgaagatcgacatcgagaagggcaagctgagcgacaacatcctgaagctggagaagcagatcaacaaggagaagaagctgatcagaagaggcagaaccaagggcctgatcaaggagcacgaggcctgcttcagcgaggagggctgcctgtaccagctgaaccaccacatggaggtgctgagagagctgtgcgaggagctgcccagccagaagagccagcaggaggtgaagagactgctgaaggactacgagcagaagatcgagagactgctgaagtgcgccagcgagatccacatgaccctgcagcccaccgccggcggcaccagcaagaacgagggcaccatcaccaccagcgagaacagaggcggcgacccccacagcgaggcccccttcgccaagagcgacaaccagcccagcaccgagaaggccatggagcccaccatgaagttcagcctggccagcgtgctgagacccctgcaggaggagagcatcatggagaaggactacagcgccagcatcaacagcctgctggagagatacgacacctacagagacatcctggagcaccacctgcagaacaacaagttcagaatcaccagcgacttcagcagcgaggaggacagaagcagcagctgcctgcaggccaagctgaccgacctgcaggtgatcaagaacgagaccgacgccagatggaaggagttcgagatcatcagcctgaagctggagaaccacgtgaacgacatcaagaagcccttcgtgatcaaggagagagacaccctgaaggagagagagagagagctgcagatgaccctgaacaccagaatggagagcctggagaccgccctgagactggtgctgcccgtggagaaggccagcctgctgctgtgcggcagcgacctgcccctgcacaagatggccatccagggcttccacctgatcgacgccgacagaatctaccagcacctgagaaacatccaggacagcatcgccaagcagatcgagatctgcaacagactggaggagcccggcaacttcgtgctgaaggagctgcaccccttcgacctgcacgccatgcagaacatcatcctgaagtacaagacccagttcgagggcatgaaccacagagtgcagagaagcgaggacaccctgaaggccctggaggacttcctggccagcctgagaaccgccaagctgagcgccgagcccgtgaccgacctgagcgccagcgacacccaggtggcccaggagaacaccctgaccgtgaagaacaaggagggcgagatccacctgatgaaggacaaggccaagcacctggacaagtgcctgaagatgctggacatgagcttcaaggacgccgagagaggcgacgacaccagctgcgagaacctgctggacgccttcagcatcaagctgagcgagacccacggctacggcgtgcaggaggagttcaccgaggagaacaagctgctggaggcctgcatcttcaagaacaacgagctgctgaagaacatccaggacgtgcagagccagatcagcaagatcggcctgaaggaccccaccgtgcccgccgtgaagcacagaaagaagagcctgatcagactggacaaggtgctggacgagtacgaggaggagaagagacacctgcaggagatggccaacagcctgccccacttcaaggacggcagagagaagaccgtgaaccagcagtgccagaacaccgtggtgctgtgggagaacaccaaggccctggtgaccgagtgcctggagcagtgcggcagagtgctggagctgctgaagcagtaccagaacttcaagagcatcctgaccaccctgatccagaaggaggagagcgtgatcagcctgcaggccagctacatgggcaaggagaacctgaagaagagaatcgccgagatcgagatcgtgaaggaggagttcaacgagcacctggaggtggtggacaagatcaaccaggtgtgcaagaacctgcagttctacctgaacaagatgaagaccttcgaggagccccccttcgagaaggaggccaacatcatcgtggacagatggctggacatcaacgagaagaccgaggactactacgagaacctgggcagagccctggccctgtgggacaagctgttcaacctgaagaacgtgatcgacgagtggaccgagaaggccctgcagaagatggagctgcaccagctgaccgaggaggacagagagagactgaaggaggagctgcaggtgcacgagcagaagaccagcgagttcagcagaagagtggccgagatccagttcctgctgcagagcagcgagatccccctggagctgcaggtgatggagagcagcatcctgaacaagatggagcacgtgcagaagtgcctgaccggcgagagcaactgccacgccctgagcggcagcaccgccgagctgagagaggacctggaccaggccaagacccagatcggcatgaccgagagcctgctgaaggccctgagccccagcgacagcctggagatcttcaccaagctggaggagatccagcagcagatcctgcagcagaagcacagcatgatcctgctggagaaccagatcggctgcctgacccccgagctgagcgagctgaagaagcagtacgagagcgtgagcgacctgttcaacaccaagaagagcgtgctgcaggaccacttcagcaagctgctgaacgaccagtgcaagaacttcaacgactggttcagcaacatcaaggtgaacctgaaggagtgcttcgagagcagcgagaccaagaagagcgtggagcagaagctgcagaagctgagcgacttcctgaccctggagggcagaaacagcaagatcaagcaggtggacagcgtgctgaagcacgtgaagaagcacctgcccaaggcccacgtgaaggagctgatcagctggctggtgggccaggagttcgagctggagaagatggagagcatctgccaggccagagccaaggagctggaggacagcctgcagcagctgctgagactgcaggacgaccacagaaacctgagaaagtggctgaccaaccaggaggagaagtggaagggcatggaggagcccggcgagaagaccgagctgttctgccaggccctggccagaaagagagagcagttcgagagcgtggcccagctgaacaacagcctgaaggagtacggcttcaccgaggaggaggagatcatcatggaggccacctgcctgatggacagataccagaccctgctgagacagctgagcgagatcgaggaggaggacaagctgctgcccaccgaggaccagagcttcaacgacctggcccacgacgtgatccactggatcaaggagatcaaggagagcctgatggtgctgaacagcagcgagggcaagatgcccctggaggagagaatccagaagatcaaggagatcatcctgctgaagcccgagggcgacgccagaatcgagaccatcatgaagcaggccgagagcagcgaggcccccctggtgcagaagaccctgaccgacatcagcaaccagtgggacaacaccctgcacctggccagcacctacctgagccaccaggagaagctgctgctggagggcgagaagtacctgcagagcaaggaggacctgagactgatgctgatcgagctgaagaagaagcaggaggccggcttcgccctgcagcacggcctgcaggagaagaaggcccagctgaagatctacaagaagttcctgaagaaggcccaggacctgaccagcctgctgaaggagctgaagagccagggcaactacctgctggagtgcaccaagaaccccagcttcagcgaggagccctggctggagatcaagcacctgcacgagagcctgctgcagcagctgcaggacagcgtgcagaacctggacggccacgtgagagagcacgacagctaccaggtgtgcgtgaccgacctgaacaccaccctggacaacttcagcaaggagttcgtgagcttcagcgacaagcccgtggaccagatcgccgtggaggagaagctgcagaagctgcaggagctggagaacagactgagcctgcaggacggcaccctgaagaagatcctggccctggccaagagcgtgaagcagaacaccagcagcgtgggccagaagatcatcaaggacgacatcaagagcctgcagtgcaagcagaaggacctggagaacagactggccagcgccaagcaggagatggagtgctgcctgaacagcatcctgaagagcaagagaagcaccgagaagaagggcaagttcaccctgcccggcagagagaagcaggccaccagcgacgtgcaggagagcacccaggagagcgccgccgtggagaagctggaggaggactgggagatcaacaaggacagcgccgtggagatggccatgagcaagcagctgagcctgaacgcccaggagagcatgaagaacaccgaggacgagagaaaggtgaacgagctgcagaaccagcccctggagctggacaccatgctgagaaacgagcagctggaggagatcgagaagctgtacacccagctggaggccaagaaggccgccatcaagcccctggagcagaccgagtgcctgaacaagaccgagaccggcgccctggtgctgcacaacatcggctacagcgcccagcacctggacaacctgctgcaggccctgatcaccctgaagaagaacaaggagagccagtactgcgtgctgagagacttccaggagtacctggccgccgtggagagcagcatgaaggccctgctgaccgacaaggagagcctgaaggtgggccccctggacagcgtgacctacctggacaagatcaagaagttcatcgccagcatcgagaaggagaaggacagcctgggcaacctgaagatcaagtgggagaacctgagcaaccacgtgaccgacatggacaagaagctgctggagagccagatcaagcagctggagcacggctgggagcaggtggagcagcagatccagaagaagtacagccagcaggtggtggagtacgacgagttcaccaccctgatgaacaaggtgcaggacaccgagatcagcctgcagcagcagcagcagcacctgcagctgagactgaagagccccgaggagagagccggcaaccagagcatgatcgccctgaccaccgacctgcaggccaccaagcacggcttcagcgtgctgaagggccaggccgagctgcagatgaagagaatctggggcgagaaggagaagaagaacctggaggacggcatcaacaacctgaagaagcagtgggagaccctggagcccctgcacctggaggccgagaaccagatcaagaagtgcgacatcagaaacaagatgaaggagaccatcctgtgggccaagaacctgctgggcgagctgaaccccagcatccccctgctgcccgacgacatcctgagccagatcagaaagtgcaaggtgacccacgacggcatcctggccagacagcagagcgtggagagcctggccgaggaggtgaaggacaaggtgcccagcctgaccacctacgagggcagcgacctgaacaacaccctggaggacctgagaaaccagtaccagatgctggtgctgaagagcacccagagaagccagcagctggagttcaagctggaggagagaagcaacttcttcgccatcatcagaaagttccagctgatggtgcaggagagcgagaccctgatcatccccagagtggagaccgccgccaccgaggccgagctgaagcaccaccacgtgaccctggaggccagccagaaggagctgcaggagatcgacagcggcatcagcacccacctgcaggagctgaccaacatctacgaggagctgaacgtgttcgagagactgttcctggaggaccagctgaagaacctgaagatcagaaccaacagaatccagagattcatccagaacacctgcaacgaggtggagcacaagatcaagttctgcagacagttccacgagaagaccagcgccctgcaggaggaggccgacagcatccagagaaacgagctgctgctgaaccaggaggtgaacaagggcgtgaaggaggagatctacaacctgaaggacagactgaccgccatcaagtgctgcatcctgcaggtgctgaagctgaagaaggtgttcgactacatcggcctgaactgggacttcagccagctggaccagctgcagacccaggtgttcgagaaggagaaggagctggaggagaagatcaagcagctggacaccttcgaggaggagcacggcaagtaccaggccctgctgagcaagatgagagccatcgacctgcagatcaagaagatgaccgaggtggtgctgaaggcccccgacagcagccccgagagcagaagactgaacgcccagatcctgagccagagaatcgagaaggccaagtgcctgtgcgacgagatcatcaagaagctgaacgagaacaagaccttcgacgacagcttcaaggagaaggagatcctgcagatcaagctgaacgccgaggagaacgacaagctgtacaaggtgctgcagaacatggtgctggagctgagccccaaggagctggacgagaagaactgccaggacaagctggagaccagcctgcacgtgctgaaccagatcaagagccagctgcagcagcccctgctgatcaacctggagatcaagcacatccagaacgagaaggacaactgcgaggccttccaggagcaggtgtgggccgagatgtgcagcatcaaggccgtgaccgccatcgagaagcagagagaggagaacagcagcgaggccagcgacgtggagaccaagctgagagagttcgaggacctgcagatgcagctgaacaccagcatcgacctgagaaccaacgtgctgaacgacgcctacgagaacctgaccagatacaaggaggccgtgaccagagccgtggagagcatcaccagcctggaggccatcatcatcccctacagagtggacgtgggcaaccccgaggagagcctggagatgcccctgagaaagcaggaggagctggagagcaccgtggcccacatccaggacctgaccgagaagctgggcatgatcagcagccccgaggccaagctgcagctgcagtacaccctgcaggagctggtgagcaagaacagcgccatgaaggaggccttcaaggcccaggagaccgaggccgagagatacctggagaactacaagtgctacagaaagatggaggaggacatctacaccaacctgagcaagatggagaccgtgctgggccagagcatgagcagcctgcccctgagctacagagaggccctggagagactggagcagagcaaggccctggtgagcaacctgatcagcaccaaggaggagctgatgaagctgagacagatcctgagactgctgagactgagatgcaccgagaacgacggcatctgcctgctgaagatcgtgagcgccctgtgggagaagtggctgagcctgctggaggccgccaaggagtgggagatgtggtgcgaggagctgaagcaggagtggaagttcgtgagcgaggagatcgagagagaggccatcatcctggacaacctgcaggaggagctgcccgagatcagcaagaccaaggaggccgccaccaccgaggagctgagcgagctgctggactgcctgtgccagtacggcgagaacgtggagaagcagcagctgctgctgaccctgctgctgcagagaatcagaagcatccagaacgtgcccgagagcagcggcgccgtggagaccgtgcccgccttccaggagatcaccagcatgaaggagagatgcaacaagctgctgcagaaggtgcagaagaacaaggagctggtgcagaccgagatccaggagagacacagcttcaccaaggagatcatcgccctgaagaacttcttccagcagaccaccaccagcttccagaacatggccttccaggaccaccccgagaagagcgagcagttcgaggagctgcagagcatcctgaagaagggcaagctgaccttcgagaacatcatggagaagctgagaatcaagtacagcgagatgtacaccatcgtgcccgccgagatcgagagccaggtggaggagtgcagaaaggccctggaggacatcgacgagaagatcagcaacgaggtgctgaagagcagccccagctacgccatgagaagaaagatcgaggagatcaacaacggcctgcacaacgtggagaagatgctgcagcagaagagcaagaacatcgagaaggcccaggagatccagaagaagatgtgggacgagctggacctgtggcacagcaagctgaacgagctggacagcgaggtgcaggacatcgtggagcaggaccccggccaggcccaggagtggatggacaacctgatgatccccttccagcagtaccagcaggtgagccagagagccgagtgcagaaccagccagctgaacaaggccaccgtgaagatggaggagtacagcgacctgctgaagagcaccgaggcctggatcgagaacaccagccacctgctggccaaccccgccgactacgacagcctgagaaccctgagccaccacgccagcaccgtgcagatggccctggaggacagcgagcagaagcacaacctgctgcacagcatcttcatggacctggaggacctgagcatcatcttcgagaccgacgagctgacccagagcatccaggagctgagcaaccaggtgaccgccctgcagcagaagatcatggagagcctgccccagatccagagaatggccgacgacgtggtggccatcgagagcgaggtgaagagcatggagaagagagtgagcaagatcaagaccatcctgctgagcaaggagatcttcgacttcagccccgaggagcacctgaagcacggcgaggtgatcctggagaacatcagacccatgaagaagaccatcgccgagatcgtgagctaccaggtggagctgagactgccccagaccggcatgaagcccctgcccgtgttccagagaaccaaccagctgctgcaggacatcaagctgctggagaacgtgacccaggagcagaacgagctgctgaaggtggtgatcaagcagaccaacgagtgggacgaggagatcgagaacctgaagcagatcctgaacaactacagcgcccagttcagcctggagcacatgagccccgaccaggccgacaagctgccccagctgcagggcgagatcgagagaatggagaagcagatcctgagcctgaaccagagaaaggaggacctgctggtggacctgaaggccaccgtgctgaacctgcaccagcacctgaagcaggagcaggagggcgtggagagagacagactgcccgccgtgaccagcgaggagggcggcgtggccgagagagacgccagcgagagaaagctgaacagaagaggcagcatgagctacctggccgccgtggaggaggaggtggaggagagcagcgtgaagagcgacaacggcgacgagaaggccgagcccagcccccagagctggagcagcctgtggaagcacgacaaggacatggaggaggacagagccagcagcagcagcggcaccatcgtgcaggaggcctacggcaagatcagcaccagcgacaacagcatggcccagatcctgacccccgacagcctgaacaccgagcagggccccgagtgcagcctgagacccaaccagaccgaggagggcaccaccccccccatcgaggccgacaccctggacagcagcgacgcccagggcggcctggagcccagagtggagaagaccagacccgagcccaccgaggtgctgcacgcctgcaagacccaggtggccgagctggagctgtggctgcagcaggccaacgtggccgtggagcccgagaccctgaacgccgacatgcagcaggtgctggagcagcagctggtgggctgccaggccatgctgaccgagatcgagcacaaggtggccttcctgctggagacctgcaaggaccagggcctgggcgacaacggcgccacccagcacgaggccgaggccctgagcctgaagctgaagaccgtgaagtgcaacctggagaaggtgcagatgatgctgcaggagaagcacagcgaggaccagcaccccaccatcctgaagaagagcagcgagcccgagcaccaggaggccctgcagcccgtgaacctgagcgagctggagagcatcgtgaccgagagaccccagttcagcagacagaaggacttccagcagcagcaggtgctggagctgaagcccatggagcagaaggacttcatcaagttcatcgagttcaacgccaagaagatgtggccccagtactgccagcacgacaacgacaccacccaggagagcagcgccagcaaccaggccagcagccccgagaacgacgtgcccgacagcatcctgagcccccagggccagaacggcgacaagtggcagtacctgcaccacgagctgagcagcaagatcaagctgcccctgccccagctggtggagccccaggtgagcaccaacatgggcatcctgcccagcgtgaccatgtacaacttcagataccccaccaccgaggagctgaagacctacaccacccagctggaggacctgagacaggaggccagcaacctgcagacccaggagaacatgaccgaggaggcctacatcaacctggacaagaagctgttcgagctgttcctgaccctgagccagtgcctgagcagcgtggaggagatgctggagatgcccagactgtacagagaggacggcagcggccagcaggtgcactacgagaccctggccctggagctgaagaagctgtacctggccctgagcgacaagaagggcgacctgctgaaggccatgacctggcccggcgagaacaccaacctgctgctggagtgcttcgacaacctgcaggtgtgcctggagcacacccaggccgccgccgtgtgcagaagcaagagcctgaaggccggcctggactacaacagaagctaccagaacgagatcaagagactgtaccaccagctgatcaagagcaagaccagcctgcagcagagcctgaacgagatcagcggccagagcgtggccgagcagctgcagaaggccgacgcctacaccgtggagctggagaacgccgagagcagagtggccaagctgagagacgagggcgagagactgcacctgccctacgccctgctgcaggaggtgtacaagctggaggacgtgctggacagcatgtggggcatgctgagagccagatacaccgagctgagcagccccttcgtgaccgagagccagcaggacgccctgctgcagggcatggtggagctggtgaagatcggcaaggagaagctggcccacggccacctgaagcagaccaagagcaaggtggccctgcaggcccagatcgagaaccacaaggtgttcttccagaagctggtggccgacatgctgctgatccaggcctacagcgccaagatcctgcccagcctgctgcagaacagagagaccttctgggccgagcaggtgaccgaggtgaagatcctggaggagaagagcagacagtgcggcatgaagctgcagagcctgctgcagaagtgggaggagttcgacgagaactacgccagcctggagaaggacctggagatcctgatcagcaccctgcccagcgtgagcctggtggaggagaccgaggagagactggtggagagaatcagcttctaccagcagatcaagagaaacatcggcggcaagcacgccagactgtaccagaccctgaacgagggcaagcagctggtggccagcgtgagctgccccgagctggagggccagatcgccaagctggaggagcagtggctgagcctgaacaagaagatcgaccacgagctgcacagactgcaggccctgctgaagcacctgctgagctacaacagagacagcgaccagctgaccaagtggctggagagcagccagcacaccctgaactactggaaggagcagagcctgaacgtgagccaggacctggacaccatcagaagcaacatcaacaacttcttcgagttcagcaaggaggtggacgagaagagcagcctgaagaccgccgtgatcagcatcggcaaccagctgctgcacctgaaggagaccgacaccgccaccctgagagccagcctggcccagttcgagcagaagtggaccatgctgatcacccagctgcccgacatccaggagaagctgcaccagctgcagatggagaagctgcccagcagaaaggccatcaccgagatgatcagctggatgaacaacgtggagcaccagaccagcgacgaggacagcgtgcacagccccagcagcgccagccaggtgaagcacctgctgcagaagcacaaggagttcagaatggagatggactacaagcagtggatcgtggacttcgtgaaccagagcctgctgcagctgagcacctgcgacgtggagagcaagagatacgagagaaccgagttcgccgagcacctgggcgagatgaacagacagtggcacagagtgcacggcatgctgaacagaaagatccagcacctggagcagctgctggagagcatcaccgagagcgagaacaagatccagatcctgaacaactggctggaggcccaggaggagagactgaagaccctgcagaagcccgagagcgtgatcagcgtgcagaagctgctgctggactgccaggacatcgagaaccagctggccatcaagagcaaggccctggacgagctgaagcagagctacctgaccctggagagcggcgccgtgcccctgctggaggacaccgccagcagaatcgacgagctgttccagaagagaagcagcgtgctgacccaggtgaaccagctgaagaccagcatgcagagcgtgctgcaggagtggaagatctacgaccagctgtacgacgaggtgaacatgatgaccatcagattctggtactgcatggagcacagcaagcccgtggtgctgagcctggagaccctgagatgccaggtggagaacctgcagagcctgcaggacgaggccgagagcagcgagggcagctgggagaagctgcaggaggtgatcggcaagctgaagggcctgtgccccagcgtggccgagatcatcgaggagaagtgccagaacacccacaagagatggacccaggtgaaccaggccatcgccgaccagctgcagaaggcccagagcctgctgcagctgtggaaggcctacagcaacgcccacggcgaggccgccgccagactgaagcagcaggaggccaagttccagcagctggccaacatcagcatgagcggcaacaacctggccgagatcctgccccccgccctgcaggacatcaaggagctgcagcacgacgtgcagaagaccaaggaggccttcctgcagaacagcagcgtgctggacagactgccccagcccgccgagagcagcacccacatgctgctgcccggccccctgcacagcctgcagagagccgcctacctggagaagatgctgctggtgaaggccaacgagttcgagttcgtgctgagccagttcaaggacttcggcgtgagactggagagcctgaagggcctgatcatgcacgaggaggagaacctggacagactgcaccagcaggagaaggagaaccccgacagcttcctgaaccacgtgctggccctgaccgcccagagccccgacatcgagcacctgaacgaggtgagcctgaagctgcccctgagcgacgtggccgtgaagaccctgcagaacatgaacagacagtggatcagagccaccgccaccgccctggagagatgcagcgagctgcagggcatcggcctgaacgagaagttcctgtactgctgcgagaagtggatccagctgctggagaagatcgaggaggccctgaaggtggacgtggccaacagcctgcccgagctgctggagcagcagaagacctacaagatgctggaggccgaggtgagcatcaaccagaccatcgccgacagctacgtgacccagagcctgcagctgctggacaccaccgagatcgagaacagacccgagttcatcaccgagttcagcaagctgaccgacagatggcagaacgccgtgcagggcgtgagacagagaaagggcgacgtggacggcctggtgagacagtggcaggacttcaccaccagcgtggagaacctgttcagattcctgaccgacaccagccacctgctgagcgccgtgaagggccaggagagattcagcctgtaccagaccagaagcctgatccacgagctgaagaacaaggagatccacttccagagaagaagaaccacctgcgccctgaccctggaggccggcgagaagctgctgctgaccaccgacctgaagaccaaggagagcgtgggcagaagaatcagccagctgcaggacagctggaaggacatggagccccagctggccgagatgatcaagcagttccagagcaccgtggagacctgggaccagtgcgagaagaagatcaaggagctgaagagcagactgcaggtgctgaaggcccagagcgaggaccccctgcccgagctgcacgaggacctgcacaacgagaaggagctgatcaaggagctggagcagagcctggccagctggacccagaacctgaaggagctgcagaccatgaaggccgacctgaccagacacgtgctggtggaggacgtgatggtgctgaaggagcagatcgagcacctgcacagacagtgggaggacctgtgcctgagagtggccatcagaaagcaggagatcgaggacagactgaacacctgggtggtgttcaacgagaagaacaaggagctgtgcgcctggctggtgcagatggagaacaaggtgctgcagaccgccgacatcagcatcgaggagatgatcgagaagctgcagaaggactgcatggaggagatcaacctgttcagcgagaacaagctgcagctgaagcagatgggcgaccagctgatcaaggccagcaacaagagcagagccgccgagatcgacgacaagctgaacaagatcaacgacagatggcagcacctgttcgacgtgatcggcagcagagtgaagaagctgaaggagaccttcgccttcatccagcagctggacaagaacatgagcaacctgagaacctggctggccagaatcgagagcgagctgagcaagcccgtggtgtacgacgtgtgcgacgaccaggagatccagaagagactggccgagcagcaggacctgcagagagacatcgagcagcacagcgccggcgtggagagcgtgttcaacatctgcgacgtgctgctgcacgacagcgacgcctgcgccaacgagaccgagtgcgacagcatccagcagaccaccagaagcctggacagaagatggagaaacatctgcgccatgagcatggagagaagaatgaagatcgaggagacctggagactgtggcagaagttcctggacgactacagcagattcgaggactggctgaagagcgccgagagaaccgccgcctgccccaacagcagcgaggtgctgtacaccagcgccaaggaggagctgaagagattcgaggccttccagagacagatccacgagagactgacccagctggagctgatcaacaagcagtacagaagactggccagagagaacagaaccgacaccgccagcagactgaagcagatggtgcacgagggcaaccagagatgggacaacctgcagagaagagtgaccgccgtgctgagaagactgagacacttcaccaaccagagagaggagttcgagggcaccagagagagcatcctggtgtggctgaccgagatggacctgcagctgaccaacgtggagcacttcagcgagagcgacgccgacgacaagatgagacagctgaacggcttccagcaggagatcaccctgaacaccaacaagatcgaccagctgatcgtgttcggcgagcagctgatccagaagagcgagcccctggacgccgtgctgatcgaggacgagctggaggagctgcacagatactgccaggaggtgttcggcagagtgagcagattccacagaagactgaccagctgcacccccggcctggaggacgagaaggaggccagcgagaacgagaccgacatggaggaccccagagagatccagaccgacagctggagaaagagaggcgagagcgaggagcccagcagcccccagagcctgtgccacctggtggcccccggccacgagagaagcggctgcgagacccccgtgagcgtggacagcatccccctggagtgggaccacaccggcgacgtgggcggcagcagcagccacgaggaggacgaggagggcccctactacagcgccctgagcggcaagagcatcagcgacggccacagctggcacgtgcccgacagccccagctgccccgagcaccactacaagcagatggagggcgacagaaacgtgccccccgtgccccccgccagcagcaccccctacaagcccccctacggcaagctgctgctgccccccggcaccgacggcggcaaggagggccccagagtgctgaacggcaacccccagcaggaggacggcggcctggccggcatcaccgagcagcagagcggcgccttcgacagatgggagatgatccaggcccaggagctgcacaacaagctgaagatcaagcagaacctgcagcagctgaacagcgacatcagcgccatcaccacctggctgaagaagaccgaggccgagctggagatgctgaagatggccaagccccccagcgacatccaggagatcgagctgagagtgaagagactgcaggagatcctgaaggccttcgacacctacaaggccctggtggtgagcgtgaacgtgagcagcaaggagttcctgcagaccgagagccccgagagcaccgagctgcagagcagactgagacagctgagcctgctgtgggaggccgcccagggcgccgtggacagctggagaggcggcctgagacagagcctgatgcagtgccaggacttccaccagctgagccagaacctgctgctgtggctggccagcgccaagaacagaagacagaaggcccacgtgaccgaccccaaggccgaccccagagccctgctggagtgcagaagagagctgatgcagctggagaaggagctggtggagagacagccccaggtggacatgctgcaggagatcagcaacagcctgctgatcaagggccacggcgaggactgcatcgaggccgaggagaaggtgcacgtgatcgagaagaagctgaagcagctgagagagcaggtgagccaggacctgatggccctgcagggcacccagaaccccgccagccccctgcccagcttcgacgaggtggacagcggcgaccagccccccgccaccagcgtgcccgcccccagagccaagcagttcagagccgtgagaaccaccgagggcgaggaggagaccgagagcagagtgcccggcagcaccagaccccagagaagcttcctgagcagagtggtgagagccgccctgcccctgcagctgctgctgctgctgctgctgctgctggcctgcctgctgcccagcagcgaggaggactacagctgcacccaggccaacaacttcgccagaagcttctaccccatgctgagatacaccaacggccccccccccacctag

SEQ ID NO: 185007 - DNA, 9813 bp, Artificial Sequence
  derived and/or modified sequence
atggagaagctgagaatcaagtacagcgagatgtacaccatcgtgcccgccgagatcgagagccaggtggaggagtgcagaaaggccctggaggacatcgacgagaagatcagcaacgaggtgctgaagagcagccccagctacgccatgagaagaaagatcgaggagatcaacaacggcctgcacaacgtggagaagatgctgcagcagaagagcaagaacatcgagaaggcccaggagatccagaagaagatgtgggacgagctggacctgtggcacagcaagctgaacgagctggacagcgaggtgcaggacatcgtggagcaggaccccggccaggcccaggagtggatggacaacctgatgatccccttccagcagtaccagcaggtgagccagagagccgagtgcagaaccagccagctgaacaaggccaccgtgaagatggaggagtacagcgacctgctgaagagcaccgaggcctggatcgagaacaccagccacctgctggccaaccccgccgactacgacagcctgagaaccctgagccaccacgccagcaccgtgcaggacagcaagtgcttcagaagcggccccagacccaacatctacgtgagctactacgtgaccgtgatccagatggccctggaggacagcgagcagaagcacaacctgctgcacagcatcttcatggacctggaggacctgagcatcatcttcgagaccgacgagctgacccagagcatccaggagctgagcaaccaggtgaccgccctgcagcagaagatcatggagagcctgccccagatccagagaatggccgacgacgtggtggccatcgagagcgaggtgaagagcatggagaagagagtgagcaagatcaagaccatcctgctgagcaaggagatcttcgacttcagccccgaggagcacctgaagcacggcgaggtgatcctggagaacatcagacccatgaagaagaccatcgccgagatcgtgagctaccaggtggagctgagactgccccagaccggcatgaagcccctgcccgtgttccagagaaccaaccagctgctgcaggacatcaagctgctggagaacgtgacccaggagcagaacgagctgctgaaggtggtgatcaagcagaccaacgagtgggacgaggagatcgagaacctgaagcagatcctgaacaactacagcgcccagttcagcctggagcacatgagccccgaccaggccgacaagctgccccagctgcagggcgagatcgagagaatggagaagcagatcctgagcctgaaccagagaaaggaggacctgctggtggacctgaaggccaccgtgctgaacctgcaccagcacctgaagcaggagcaggagggcgtggagagagacagactgcccgccgtgaccagcgaggagggcggcgtggccgagagagacgccagcgagagaaagctgaacagaagaggcagcatgagctacctggccgccgtggaggaggaggtggaggagagcagcgtgaagagcgacaacggcgacgagaaggccgagcccagcccccagagctggagcagcctgtggaagcacgacaaggacatggaggaggacagagccagcagcagcagcggcaccatcgtgcaggaggcctacggcaagatcagcaccagcgacaacagcatggcccagatcctgacccccgacagcctgaacaccgagcagggccccgagtgcagcctgagacccaaccagaccgaggagggcaccaccccccccatcgaggccgacaccctggacagcagcgacgcccagggcggcctggagcccagagtggagaagaccagacccgagcccaccgaggtgctgcacgcctgcaagacccaggtggccgagctggagctgtggctgcagcaggccaacgtggccgtggagcccgagaccctgaacgccgacatgcagcaggtgctggagcagcagctggtgggctgccaggccatgctgaccgagatcgagcacaaggtggccttcctgctggagacctgcaaggaccagggcctgggcgacaacggcgccacccagcacgaggccgaggccctgagcctgaagctgaagaccgtgaagtgcaacctggagaaggtgcagatgatgctgcaggagaagcacagcgaggaccagcaccccaccatcctgaagaagagcagcgagcccgagcaccaggaggccctgcagcccgtgaacctgagcgagctggagagcatcgtgaccgagagaccccagttcagcagacagaaggacttccagcagcagcaggtgctggagctgaagcccatggagcagaaggacttcatcaagttcatcgagttcaacgccaagaagatgtggccccagtactgccagcacgacaacgacaccacccaggagagcagcgccagcaaccaggccagcagccccgagaacgacgtgcccgacagcatcctgagcccccagggccagaacggcgacaagtggcagtacctgcaccacgagctgagcagcaagatcaagctgcccctgccccagctggtggagccccaggtgagcaccaacatgggcatcctgcccagcgtgaccatgtacaacttcagataccccaccaccgaggagctgaagacctacaccacccagctggaggacctgagacaggaggccagcaacctgcagacccaggagaacatgaccgaggaggcctacatcaacctggacaagaagctgttcgagctgttcctgaccctgagccagtgcctgagcagcgtggaggagatgctggagatgcccagactgtacagagaggacggcagcggccagcaggtgcactacgagaccctggccctggagctgaagaagctgtacctggccctgagcgacaagaagggcgacctgctgaaggccatgacctggcccggcgagaacaccaacctgctgctggagtgcttcgacaacctgcaggtgtgcctggagcacacccaggccgccgccgtgtgcagaagcaagagcctgaaggccggcctggactacaacagaagctaccagaacgagatcaagagactgtaccaccagctgatcaagagcaagaccagcctgcagcagagcctgaacgagatcagcggccagagcgtggccgagcagctgcagaaggccgacgcctacaccgtggagctggagaacgccgagagcagagtggccaagctgagagacgagggcgagagactgcacctgccctacgccctgctgcaggaggtgtacaagctggaggacgtgctggacagcatgtggggcatgctgagagccagatacaccgagctgagcagccccttcgtgaccgagagccagcaggacgccctgctgcagggcatggtggagctggtgaagatcggcaaggagaagctggcccacggccacctgaagcagaccaagagcaaggtggccctgcaggcccagatcgagaaccacaaggtgttcttccagaagctggtggccgacatgctgctgatccaggcctacagcgccaagatcctgcccagcctgctgcagaacagagagaccttctgggccgagcaggtgaccgaggtgaagatcctggaggagaagagcagacagtgcggcatgaagctgcagagcctgctgcagaagtgggaggagttcgacgagaactacgccagcctggagaaggacctggagatcctgatcagcaccctgcccagcgtgagcctggtggaggagaccgaggagagactggtggagagaatcagcttctaccagcagatcaagagaaacatcggcggcaagcacgccagactgtaccagaccctgaacgagggcaagcagctggtggccagcgtgagctgccccgagctggagggccagatcgccaagctggaggagcagtggctgagcctgaacaagaagatcgaccacgagctgcacagactgcaggccctgctgaagcacctgctgagctacaacagagacagcgaccagctgaccaagtggctggagagcagccagcacaccctgaactactggaaggagcagagcctgaacgtgagccaggacctggacaccatcagaagcaacatcaacaacttcttcgagttcagcaaggaggtggacgagaagagcagcctgaagaccgccgtgatcagcatcggcaaccagctgctgcacctgaaggagaccgacaccgccaccctgagagccagcctggcccagttcgagcagaagtggaccatgctgatcacccagctgcccgacatccaggagaagctgcaccagctgcagatggagaagctgcccagcagaaaggccatcaccgagatgatcagctggatgaacaacgtggagcaccagaccagcgacgaggacagcgtgcacagccccagcagcgccagccaggtgaagcacctgctgcagaagcacaaggagttcagaatggagatggactacaagcagtggatcgtggacttcgtgaaccagagcctgctgcagctgagcacctgcgacgtggagagcaagagatacgagagaaccgagttcgccgagcacctgggcgagatgaacagacagtggcacagagtgcacggcatgctgaacagaaagatccagcacctggagcagctgctggagagcatcaccgagagcgagaacaagatccagatcctgaacaactggctggaggcccaggaggagagactgaagaccctgcagaagcccgagagcgtgatcagcgtgcagaagctgctgctggactgccaggacatcgagaaccagctggccatcaagagcaaggccctggacgagctgaagcagagctacctgaccctggagagcggcgccgtgcccctgctggaggacaccgccagcagaatcgacgagctgttccagaagagaagcagcgtgctgacccaggtgaaccagctgaagaccagcatgcagagcgtgctgcaggagtggaagatctacgaccagctgtacgacgaggtgaacatgatgaccatcagattctggtactgcatggagcacagcaagcccgtggtgctgagcctggagaccctgagatgccaggtggagaacctgcagagcctgcaggacgaggccgagagcagcgagggcagctgggagaagctgcaggaggtgatcggcaagctgaagggcctgtgccccagcgtggccgagatcatcgaggagaagtgccagaacacccacaagagatggacccaggtgaaccaggccatcgccgaccagctgcagaaggcccagagcctgctgcagctgtggaaggcctacagcaacgcccacggcgaggccgccgccagactgaagcagcaggaggccaagttccagcagctggccaacatcagcatgagcggcaacaacctggccgagatcctgccccccgccctgcaggacatcaaggagctgcagcacgacgtgcagaagaccaaggaggccttcctgcagaacagcagcgtgctggacagactgccccagcccgccgagagcagcacccacatgctgctgcccggccccctgcacagcctgcagagagccgcctacctggagaagatgctgctggtgaaggccaacgagttcgagttcgtgctgagccagttcaaggacttcggcgtgagactggagagcctgaagggcctgatcatgcacgaggaggagaacctggacagactgcaccagcaggagaaggagaaccccgacagcttcctgaaccacgtgctggccctgaccgcccagagccccgacatcgagcacctgaacgaggtgagcctgaagctgcccctgagcgacgtggccgtgaagaccctgcagaacatgaacagacagtggatcagagccaccgccaccgccctggagagatgcagcgagctgcagggcatcggcctgaacgagaagttcctgtactgctgcgagaagtggatccagctgctggagaagatcgaggaggccctgaaggtggacgtggccaacagcctgcccgagctgctggagcagcagaagacctacaagatgctggaggccgaggtgagcatcaaccagaccatcgccgacagctacgtgacccagagcctgcagctgctggacaccaccgagatcgagaacagacccgagttcatcaccgagttcagcaagctgaccgacagatggcagaacgccgtgcagggcgtgagacagagaaagggcgacgtggacggcctggtgagacagtggcaggacttcaccaccagcgtggagaacctgttcagattcctgaccgacaccagccacctgctgagcgccgtgaagggccaggagagattcagcctgtaccagaccagaagcctgatccacgagctgaagaacaaggagatccacttccagagaagaagaaccacctgcgccctgaccctggaggccggcgagaagctgctgctgaccaccgacctgaagaccaaggagagcgtgggcagaagaatcagccagctgcaggacagctggaaggacatggagccccagctggccgagatgatcaagcagttccagagcaccgtggagacctgggaccagtgcgagaagaagatcaaggagctgaagagcagactgcaggtgctgaaggcccagagcgaggaccccctgcccgagctgcacgaggacctgcacaacgagaaggagctgatcaaggagctggagcagagcctggccagctggacccagaacctgaaggagctgcagaccatgaaggccgacctgaccagacacgtgctggtggaggacgtgatggtgctgaaggagcagatcgagcacctgcacagacagtgggaggacctgtgcctgagagtggccatcagaaagcaggagatcgaggacagactgaacacctgggtggtgttcaacgagaagaacaaggagctgtgcgcctggctggtgcagatggagaacaaggtgctgcagaccgccgacatcagcatcgaggagatgatcgagaagctgcagaaggactgcatggaggagatcaacctgttcagcgagaacaagctgcagctgaagcagatgggcgaccagctgatcaaggccagcaacaagagcagagccgccgagatcgacgacaagctgaacaagatcaacgacagatggcagcacctgttcgacgtgatcggcagcagagtgaagaagctgaaggagaccttcgccttcatccagcagctggacaagaacatgagcaacctgagaacctggctggccagaatcgagagcgagctgagcaagcccgtggtgtacgacgtgtgcgacgaccaggagatccagaagagactggccgagcagcaggacctgcagagagacatcgagcagcacagcgccggcgtggagagcgtgttcaacatctgcgacgtgctgctgcacgacagcgacgcctgcgccaacgagaccgagtgcgacagcatccagcagaccaccagaagcctggacagaagatggagaaacatctgcgccatgagcatggagagaagaatgaagatcgaggagacctggagactgtggcagaagttcctggacgactacagcagattcgaggactggctgaagagcgccgagagaaccgccgcctgccccaacagcagcgaggtgctgtacaccagcgccaaggaggagctgaagagattcgaggccttccagagacagatccacgagagactgacccagctggagctgatcaacaagcagtacagaagactggccagagagaacagaaccgacaccgccagcagactgaagcagatggtgcacgagggcaaccagagatgggacaacctgcagagaagagtgaccgccgtgctgagaagactgagacacttcaccaaccagagagaggagttcgagggcaccagagagagcatcctggtgtggctgaccgagatggacctgcagctgaccaacgtggagcacttcagcgagagcgacgccgacgacaagatgagacagctgaacggcttccagcaggagatcaccctgaacaccaacaagatcgaccagctgatcgtgttcggcgagcagctgatccagaagagcgagcccctggacgccgtgctgatcgaggacgagctggaggagctgcacagatactgccaggaggtgttcggcagagtgagcagattccacagaagactgaccagctgcacccccggcctggaggacgagaaggaggccagcgagaacgagaccgacatggaggaccccagagagatccagaccgacagctggagaaagagaggcgagagcgaggagcccagcagcccccagagcctgtgccacctggtggcccccggccacgagagaagcggctgcgagacccccgtgagcgtggacagcatccccctggagtgggaccacaccggcgacgtgggcggcagcagcagccacgaggaggacgaggagggcccctactacagcgccctgagcggcaagagcatcagcgacggccacagctggcacgtgcccgacagccccagctgccccgagcaccactacaagcagatggagggcgacagaaacgtgccccccgtgccccccgccagcagcaccccctacaagcccccctacggcaagctgctgctgccccccggcaccgacggcggcaaggagggccccagagtgctgaacggcaacccccagcaggaggacggcggcctggccggcatcaccgagcagcagagcggcgccttcgacagatgggagatgatccaggcccaggagctgcacaacaagctgaagatcaagcagaacctgcagcagctgaacagcgacatcagcgccatcaccacctggctgaagaagaccgaggccgagctggagatgctgaagatggccaagccccccagcgacatccaggagatcgagctgagagtgaagagactgcaggagatcctgaaggccttcgacacctacaaggccctggtggtgagcgtgaacgtgagcagcaaggagttcctgcagaccgagagccccgagagcaccgagctgcagagcagactgagacagctgagcctgctgtgggaggccgcccagggcgccgtggacagctggagaggcggcctgagacagagcctgatgcagtgccaggacttccaccagctgagccagaacctgctgctgtggctggccagcgccaagaacagaagacagaaggcccacgtgaccgaccccaaggccgaccccagagccctgctggagtgcagaagagagctgatgcagctggagaaggagctggtggagagacagccccaggtggacatgctgcaggagatcagcaacagcctgctgatcaagggccacggcgaggactgcatcgaggccgaggagaaggtgcacgtgatcgagaagaagctgaagcagctgagagagcaggtgagccaggacctgatggccctgcagggcacccagaaccccgccagccccctgcccagcttcgacgaggtggacagcggcgaccagccccccgccaccagcgtgcccgcccccagagccaagcagttcagagccgtgagaaccaccgagggcgaggaggagaccgagagcagagtgcccggcagcaccagaccccagagaagcttcctgagcagagtggtgagagccgccctgcccctgcagctgctgctgctgctgctgctgctgctggcctgcctgctgcccagcagcgaggaggactacagctgcacccaggccaacaacttcgccagaagcttctaccccatgctgagatacaccaacggccccccccccacctag

SEQ ID NO: 185008 - DNA, 2007 bp, Artificial Sequence
  derived and/or modified sequence
atggtgcacgagggcaaccagagatgggacaacctgcagagaagagtgaccgccgtgctgagaagactgagacacttcaccaaccagagagaggagttcgagggcaccagagagagcatcctggtgtggctgaccgagatggacctgcagctgaccaacgtggagcacttcagcgagagcgacgccgacgacaagatgagacagctgaacggcttccagcaggagatcaccctgaacaccaacaagatcgaccagctgatcgtgttcggcgagcagctgatccagaagagcgagcccctggacgccgtgctgatcgaggacgagctggaggagctgcacagatactgccaggaggtgttcggcagagtgagcagattccacagaagactgaccagctgcacccccggcctggaggacgagaaggaggccagcgagaacgagaccgacatggaggaccccagagagatccagaccgacagctggagaaagagaggcgagagcgaggagcccagcagcccccagagcctgtgccacctggtggcccccggccacgagagaagcggctgcgagacccccgtgagcgtggacagcatccccctggagtgggaccacaccggcgacgtgggcggcagcagcagccacgaggaggacgaggagggcccctactacagcgccctgagcggcaagagcatcagcgacggccacagctggcacgtgcccgacagccccagctgccccgagcaccactacaagcagatggagggcgacagaaacgtgccccccgtgccccccgccagcagcaccccctacaagcccccctacggcaagctgctgctgccccccggcaccgacggcggcaaggagggccccagagtgctgaacggcaacccccagcaggaggacggcggcctggccggcatcaccgagcagcagagcggcgccttcgacagatgggagatgatccaggcccaggagctgcacaacaagctgaagatcaagcagaacctgcagcagctgaacagcgacatcagcgccatcaccacctggctgaagaagaccgaggccgagctggagatgctgaagatggccaagccccccagcgacatccaggagatcgagctgagagtgaagagactgcaggagatcctgaaggccttcgacacctacaaggccctggtggtgagcgtgaacgtgagcagcaaggagttcctgcagaccgagagccccgagagcaccgagctgcagagcagactgagacagctgagcctgctgtgggaggccgcccagggcgccgtggacagctggagaggcggcctgagacagagcctgatgcagtgccaggacttccaccagctgagccagaacctgctgctgtggctggccagcgccaagaacagaagacagaaggcccacgtgaccgaccccaaggccgaccccagagccctgctggagtgcagaagagagctgatgcagctggagaaggagctggtggagagacagccccaggtggacatgctgcaggagatcagcaacagcctgctgatcaagggccacggcgaggactgcatcgaggccgaggagaaggtgcacgtgatcgagaagaagctgaagcagctgagagagcaggtgagccaggacctgatggccctgcagggcacccagaaccccgccagccccctgcccagcttcgacgaggtggacagcggcgaccagccccccgccaccagcgtgcccgcccccagagccaagcagttcagagccgtgagaaccaccgagggcgaggaggagaccgagagcagagtgcccggcagcaccagaccccagagaagcttcctgagcagagtggtgagagccgccctgcccctgcagctgctgctgctgctgctgctgctgctggcctgcctgctgcccagcagcgaggaggactacagctgcacccaggccaacaacttcgccagaagcttctaccccatgctgagatacaccaacggccccccccccacctag

SEQ ID NO: 185009 - DNA, 2292 bp, Artificial Sequence
  derived and/or modified sequence
atgagcatggagagaagaatgaagatcgaggagacctggagactgtggcagaagttcctggacgactacagcagattcgaggactggctgaagagcgccgagagaaccgccgcctgccccaacagcagcgaggtgctgtacaccagcgccaaggaggagctgaagagattcgaggccttccagagacagatccacgagagactgacccagctggagctgatcaacaagcagtacagaagactggccagagagaacagaaccgacaccgccagcagactgaagcagatggtgcacgagggcaaccagagatgggacaacctgcagagaagagtgaccgccgtgctgagaagactgagacacttcaccaaccagagagaggagttcgagggcaccagagagagcatcctggtgtggctgaccgagatggacctgcagctgaccaacgtggagcacttcagcgagagcgacgccgacgacaagatgagacagctgaacggcttccagcaggagatcaccctgaacaccaacaagatcgaccagctgatcgtgttcggcgagcagctgatccagaagagcgagcccctggacgccgtgctgatcgaggacgagctggaggagctgcacagatactgccaggaggtgttcggcagagtgagcagattccacagaagactgaccagctgcacccccggcctggaggacgagaaggaggccagcgagaacgagaccgacatggaggaccccagagagatccagaccgacagctggagaaagagaggcgagagcgaggagcccagcagcccccagagcctgtgccacctggtggcccccggccacgagagaagcggctgcgagacccccgtgagcgtggacagcatccccctggagtgggaccacaccggcgacgtgggcggcagcagcagccacgaggaggacgaggagggcccctactacagcgccctgagcggcaagagcatcagcgacggccacagctggcacgtgcccgacagccccagctgccccgagcaccactacaagcagatggagggcgacagaaacgtgccccccgtgccccccgccagcagcaccccctacaagcccccctacggcaagctgctgctgccccccggcaccgacggcggcaaggagggccccagagtgctgaacggcaacccccagcaggaggacggcggcctggccggcatcaccgagcagcagagcggcgccttcgacagatgggagatgatccaggcccaggagctgcacaacaagctgaagatcaagcagaacctgcagcagctgaacagcgacatcagcgccatcaccacctggctgaagaagaccgaggccgagctggagatgctgaagatggccaagccccccagcgacatccaggagatcgagctgagagtgaagagactgcaggagatcctgaaggccttcgacacctacaaggccctggtggtgagcgtgaacgtgagcagcaaggagttcctgcagaccgagagccccgagagcaccgagctgcagagcagactgagacagctgagcctgctgtgggaggccgcccagggcgccgtggacagctggagaggcggcctgagacagagcctgatgcagtgccaggacttccaccagctgagccagaacctgctgctgtggctggccagcgccaagaacagaagacagaaggcccacgtgaccgaccccaaggccgaccccagagccctgctggagtgcagaagagagctgatgcagctggagaaggagctggtggagagacagccccaggtggacatgctgcaggagatcagcaacagcctgctgatcaagggccacggcgaggactgcatcgaggccgaggagaaggtgcacgtgatcgagaagaagctgaagcagctgagagagcaggtgagccaggacctgatggccctgcagggcacccagaaccccgccagccccctgcccagcttcgacgaggtggacagcggcgaccagccccccgccaccagcgtgcccgcccccagagccaagcagttcagagccgtgagaaccaccgagggcgaggaggagaccgagagcagagtgcccggcagcaccagaccccagagaagcttcctgagcagagtggtgagagccgccctgcccctgcagctgctgctgctgctgctgctgctgctggcctgcctgctgcccagcagcgaggaggactacagctgcacccaggccaacaacttcgccagaagcttctaccccatgctgagatacaccaacggccccccccccacctag

SEQ ID NO: 185010 - DNA, 20658 bp, Artificial Sequence
  derived and/or modified sequence
atggcgtcttcccctgagctccctaccgaggacgagcaaggatcttggggtattgatgacctgcatattagcttacaagccgagcaggaggacacccagaagaaagcctttacatgctggattaacagtcagctcgctaggcatacttcccccagtgtgatctccgacctgtttacggatatcaaaaagggacacgttctcctcgatctgctcgaggtgttgagcggccagcaattgcctcgcgacaagggctctaataccttccagtgtcggattaatattgagcatgctctcacgtttcttcggaataggagtattaagctgattaacatacacgtgaccgatatcattgacggtaatcctagcatcatcttgggcctaatttggactatcatactacatttccacatagaaaaactcgcccaaacgcttagctgcaattataaccagcccagccttgacgatgtatcagtggtcgacagtagccccgcttcaagcccaccagctaagaagtgttccaaggtgcaggccagatggcaaatgtccgccaggaaggccctcctcctttgggcccaagaacagtgcgctacatacgaatcggtgaacgttacagatttcaagagctcatggcgaaacggtatggctttcctcgcaatcatacatgctctgcgccccgacttgattgatatgaagtcggtgaaacacagatccaacaaggataacctgagagaggcttttcggattgccgagcaggagctcaaaatccccagactcctcgaacctgaggacgttgatgttgtggaccccgatgagaagagtattatgacatacgtcgcacagtttctgcaatattcaaaggacgctcctggaacgggagaggaagctcagggcaaagtgaaggatgcaatggggtggcttaccctccagaaagaaaagctccaaaagttgctgaaagactccgaaaatgacacatacttcaagaagtacaactccctcttaagcttcatggagtcctttaatgaggaaaagaaaagttttctggatgttctgtccatcaagcgggacctcgatgagctggacaaggatcaccttcagctacgggaggcctgggatggactggatcaccagattaacgcctggaagattaagctcaattatgctttgcctccaccactgcaccagacagaggcctggcttcaggaggtggaggagcttatggacgaggacctgagcgcttcccaagaccactcacaggccgttactcttattcaggagaagatgactctgttcaagagcctcatggaccgatttgaacatcactccaatatcctgctgacctttgagaacaaggatgagaaccatctgcctttggtccctcccaacaagcttgaggaaatgaagcgcagaataaacaacatacttgagaaaaagtttattctgcttctcgaatttcactattataagtgtctcgtgcttgggctggtggacgaggtcaagtcgaagctcgatatatggaacataaagtacgggagccgtgagagcgtggagttgctcctggaagactggcacaagtttatcgaagagaaggagttcctagcacggctggacacaagttttcagaagtgtggggaaatatataagaatttagccggcgaatgccagaacataaacaaacaatatatgatggtcaagagtgatgtttgcatgtacagaaaaaacatctataatgttaaatctacccttcagaaggtactcgcttgctgggcaacttacgtcgagaacttacgattgctccgggcttgtttcgaggagacaaagaaagaggaaattaaggaagtgcccttcgaaacgctagcgcaatggaatctcgagcacgcaactttaaatgaggctgggaatttcctggtggaagtatccaacgatgtcgtaggctcatctatttccaaagagttgagacggctgaataaacggtggagaaaactggtatcaaagactcagctggagatgaatctccccctcatgatcaagaagcaagatcagcccaccttcgacaacagtggtaatatcctatccaaagaagaaaaagcaactgttgagttctctacagacatgagcgtggaactgcctgagaactataatcaaaatattaaagctggggagaagcacgagaaagaaaatgaggaattcacaggacagctcaaggtggcaaaagacgtcgagaagctcattggtcaggtggaaatatgggaagcagaggccaagtccgtgctagaccaagacgatgtggatacctcaatggaggagtctttaaagcatcttatcgccaaaggatctatgttcgacgagctcatggccaggtctgaggacatgctccagatggacattcagaacatcagcagtcaggagagctttcaacatgtgcttaccaccggccttcaggccaagattcaagaagcaaaagagaaggttcagattaacgtggtaaagctgatagcagctcttaaaaacctcacagatgtatctcctgatctggacatccgcctgaagatggaagagagccagaaggagcttgaatcttacatgatgcgtgcccagcagctcctcggccaaagggagagccccggagagctcatttccaagcacaaggaggctttgatcatctccaacacaaaaagtctggccaagtaccttaaagccgtggaagagctgaagaataacgtgaccgaggatattaagatgtcactggaggaaaagagtcgcgatgtttgtgctaaatgggagagcctccatcatgagttgtccctgtatgttcagcaactgaagattgatattgagaagggtaagctttctgataacattctgaagctcgagaagcagatcaataaagagaaaaagctcattaggcggggacggacgaaagggctgattaaggagcacgaggcctgtttcagtgaggaggggtgcctgtatcagttgaaccaccacatggaggtgctgagggaactgtgcgaagagttaccatcccagaagagccagcaagaagttaaacgcctcctgaaggattacgaacagaaaatagagcgccttctcaagtgcgccagcgagatccacatgacgttgcagcccactgcaggcggcacaagcaaaaacgagggaaccatcaccacatccgaaaaccgcgggggcgatccacactctgaggccccatttgctaagtcagacaaccagcctagtacggaaaaagcaatggaaccaactatgaagttcagcttggcctcagtcctgagacctttgcaggaagaatccataatggagaaggactactctgccagcattaacagtcttttggagcgttacgacacctatagagatatactggaacaccacctgcaaaacaataaatttcggatcacttctgacttctccagcgaagaggaccgatcatcaagctgtttgcaagccaagcttacagacctgcaggtaatcaagaacgaaacagacgcccgttggaaggagtttgagattatcagcctgaagctcgaaaaccacgtaaacgatataaagaagccgttcgtgattaaggaacgggatactctgaaggagcgagagcgtgaactgcagatgactcttaacacccggatggaaagcctggaaacggctttacggctggtgctgcccgtggaaaaagcatctctcctgctatgcggcagcgacctgcctctgcacaagatggctatccagggctttcaccttattgacgccgacaggatttatcagcatcttcgcaatatccaagactccattgccaagcagatagagatctgcaatagactggaggagccaggaaatttcgtgttgaaggaactgcatcccttcgacttgcacgcaatgcagaatatcatactgaagtacaaaacacagttcgagggcatgaaccatagagtgcagaggagcgaggacacacttaaggctctggaggatttccttgcctctttacggactgccaagcttagcgcagagcccgtgaccgacctgtctgcgagcgacactcaggtggcgcaggagaatacccttactgtgaaaaacaaagagggcgagattcacctgatgaaagacaaagccaaacacctagacaaatgcttaaaaatgcttgacatgtccttcaaggacgcagagagaggcgatgacacatcgtgtgagaacttacttgatgcttttagtataaagctcagtgagactcatgggtatggggtccaggaagaatttacagaggagaataaactgcttgaggcttgcatttttaaaaataatgaactgctgaagaacatccaggacgtccagtctcagatatccaagatcggtctgaaagacccaacagtcccagccgtgaaacatcggaaaaaaagtttgatacgccttgataaagtcctcgacgaatatgaggaagagaaacgacatctgcaggaaatggcaaactccctgcctcactttaaagacggccgcgagaagactgttaaccagcagtgccaaaataccgtggttctgtgggagaatacaaaggcattagtaacagagtgcctggagcagtgtggtcgagtgctcgagttgctgaagcagtatcaaaacttcaaatccatcctgaccaccctgatacagaaagaggaaagtgtgatttccttgcaggcctcatacatgggaaaggaaaacttaaagaaacggattgctgagatcgagatcgtcaaagaggaatttaacgagcacctcgaagtggtggataagatcaatcaggtgtgcaaaaacctccaattttatttaaacaaaatgaagacctttgaggagccccccttcgaaaaggaggcgaacatcatagtggaccgatggttggacatcaatgagaagacagaggattactacgaaaatctgggtagagctctggccctgtgggataagctgtttaaccttaaaaatgttatcgacgagtggactgaaaaagctcttcaaaagatggaactgcaccaactaaccgaggaagacagagaacgcctcaaagaagaattgcaggtgcacgagcaaaaaacttcagagttcagccgaagggttgcggaaatccagttcctgctccagagtagtgagatccccttggagctccaagttatggaatcatctattttaaacaaaatggagcacgttcagaagtgcctgactggagagtcgaactgtcacgcccttagcggcagtaccgcggagctgagagaggatctggaccaggccaagacacagatcgggatgactgagagcttgttgaaggcactgagtccatctgacagtctggaaatctttacaaagctggaagaaatacagcagcaaattctgcagcaaaagcactctatgatattgttggagaaccaaattggctgcctgacaccagaattgtcggagctgaagaagcagtacgagtcagtgagtgacctgttcaataccaaaaaatcagtgctgcaagatcacttctcaaagctcttgaatgaccaatgcaagaactttaacgactggttctccaatattaaggtgaacctaaaggaatgctttgaaagcagcgagactaagaagtcagtggagcagaagctgcagaaactcagcgacttcctgacactcgagggtcgcaactccaaaatcaagcaagtagattctgtgttgaagcatgtgaaaaaacacctgcctaaagcccatgtgaaagagcttatcagctggctcgttgggcaggagttcgagctggagaaaatggagtctatatgccaggcgcgagctaaggagctagaagactccttacagcagctgctaaggctccaggatgatcaccgaaatctgagaaagtggctgacgaatcaggaagaaaaatggaaggggatggaagaaccaggagagaagaccgagctgttctgccaggcattggctagaaagcgggagcagtttgaatccgtggctcaactgaataatagcctgaaggagtacggctttactgaggaagaggaaattatcatggaggcaacctgcttaatggatagataccagacactcctcaggcagctctccgaaattgaggaagaggataagctcttacctacggaggaccaatcctttaacgacttagcccatgatgtcatccattggataaaggagatcaaagaatcgctcatggtcctgaactcctcagaaggcaaaatgcccctcgaggagaggatacagaaaattaaggagattatcctgttgaaacctgagggggacgcccgtatcgagaccatcatgaagcaggctgaaagctccgaggcacccctggtccagaaaaccctgactgatatcagtaaccaatgggacaacacattacatttggcctcaacttatctgagtcaccaggaaaagttgctcttagagggagagaaatatcttcagtctaaagaagatctgcgcctgatgctgatcgaactgaaaaagaaacaagaagccggattcgctctgcaacatgggctccaagaaaaaaaagctcagctgaagatctacaagaagtttctgaagaaggcacaggacttgaccagcctattaaaggaacttaaaagccaaggtaattacctgctggagtgtactaagaatccctcttttagtgaagaaccatggcttgaaatcaaacacctgcatgagagcctgctgcaacagctgcaggattcggtgcagaacctggacggtcacgttagagaacacgactcttaccaggtttgcgttaccgacttgaatacgacactggacaacttttctaaagaattcgtcagcttctctgacaaaccggtagaccaaatagccgtggaagaaaaactccagaagttacaggagctggaaaataggctgtccctccaggacggcacactcaagaagattttagccctggccaaatcagtgaaacaaaacacatcgtcagtgggacaaaaaattataaaagatgacatcaagtcgttacagtgcaagcaaaaagatctggaaaacaggctggccagcgcaaagcaggaaatggagtgttgcctgaattccattcttaagagcaaaaggtcgactgaaaagaagggaaagtttactctgccaggaagagagaagcaggctacaagcgacgtacaggaatccacacaggagtctgcagccgtcgaaaaactcgaggaggactgggaaatcaacaaagattctgcagttgaaatggcaatgtctaagcaactgtctctgaacgctcaggaatccatgaaaaatacagaggatgaaaggaaggtcaacgaactgcaaaatcaacctctggagctggacacgatgctaagaaacgaacagctcgaggagatagagaaactttatacccagctagaggccaaaaaagctgcaataaaacctttagaacagactgagtgccttaataagactgagaccggcgcactcgttttacacaacatagggtacagcgcacagcacctggataatctgcttcaggcccttataaccttgaagaagaataaagagtctcagtactgtgttttacgtgacttccaagagtacttggcagccgtggaatcctccatgaaggcgcttctcactgataaagaatctctcaaggtcggccctctggattctgtgacatatttggataagatcaaaaaattcatagctagcatcgagaaggagaaggattcgctcgggaatctaaaaataaagtgggagaacctgagcaaccacgtgactgatatggacaaaaagctgctggaatcccagattaaacagctcgagcatgggtgggaacaggtggaacaacagattcagaaaaagtatagtcagcaggtggtcgaatatgacgagttcaccactctaatgaacaaggtgcaggacaccgagatttcactacagcagcagcagcaacacctacaacttaggttaaaatcccctgaggaacgtgctggaaatcagagtatgatagctttgacgactgacctacaggcgaccaagcatgggttctctgtgctaaagggacaggccgagctgcagatgaagaggatatggggcgagaaggagaagaagaacttagaagacgggatcaacaacttgaaaaagcaatgggagacactagagccgctgcacctggaggctgagaatcagatcaagaagtgcgacatccggaacaaaatgaaggagaccattctctgggctaaaaaccttctgggtgagctcaaccctagcattcccctgctgcccgatgacatactgagccagattagaaagtgcaaagttactcacgacggaatactggcaaggcagcagtcagtggaatctcttgcagaggaggtgaaagacaaagtgccttccctgacaacttatgaaggttccgaccttaacaataccctagaggacttacgcaatcagtaccaaatgttggtactgaaatctacccagcggtctcagcaattggaatttaagctcgaagaaaggtccaacttcttcgccataatcaggaagttccagctgatggtgcaggagtccgaaaccttgatcattcccagggtcgaaaccgccgcaactgaggccgagctgaagcaccatcacgttaccttggaagcaagtcagaaagaactgcaggaaattgatagcggcatcagtactcatcttcaggagcttaccaacatctatgaagaactgaatgtgttcgagcgactcttcctcgaggaccagctgaaaaatctgaagattcggacaaataggatccagagatttatccagaatacctgcaatgaggtggaacacaagataaagttttgtaggcagttccacgagaaaactagtgctttgcaggaggaagctgacagcattcaacgcaatgagctgcttcttaaccaggaggtcaacaaaggagtgaaggaggagatctataaccttaaagacaggctgaccgccatcaaatgttgcattcttcaagtcctgaagctaaagaaggttttcgattatataggattgaactgggatttctcacagctcgaccagctgcagacccaagtgtttgaaaaggaaaaagaattagaagaaaagataaagcagctcgatacatttgaggaggaacatggcaagtaccaggccctgctgagcaagatgcgggcaatcgacttgcaaattaagaagatgacagaagtcgtcctcaaagcgcctgactccagcccggagtcaaggcggcttaatgctcagatcctgagccaacggattgagaaggctaaatgcctgtgcgacgaaattatcaagaaactaaacgagaataagacctttgacgatagctttaaagaaaaagagatcctgcagatcaagttaaacgctgaggaaaacgacaagctttacaaagttctacagaacatggtactcgagctgagtcctaaggagctcgacgagaagaactgtcaggacaagctggagacgtctcttcacgttctaaatcaaatcaagtctcagctccagcagccccttctgataaacctggagatcaaacatattcagaatgaaaaagacaactgcgaggcgtttcaagaacaggtgtgggccgagatgtgcagcatcaaggccgtgacggcaattgagaagcagagagaggagaactcctctgaggcctccgacgttgagaccaagctaagggaattcgaagacctgcagatgcaacttaacacatccatcgacctcagaacgaacgtcctgaatgacgcctacgaaaatctgacaagatacaaagaggccgtcacaagggcagtggagtctatcacttctctagaggctattatcatcccctatcgcgtggatgtcggcaaccccgaagagagcctcgagatgccacttaggaagcaggaagagctggaatctacggtagcccacatccaggatctgaccgaaaaactgggtatgatatcttcacccgaagccaaactgcagctccaatacactctgcaggagctggtctccaagaactctgcaatgaaagaggccttcaaagcccaggaaaccgaggctgaaaggtatcttgagaattataaatgctatcgtaaaatggaagaggacatatatactaacttaagtaagatggagacagtgctcggccagagtatgtctagtttaccactgtcttaccgcgaagcgctcgaacgcctagagcaaagcaaagccctggtgtcgaaccttattagcactaaagaagaattgatgaagttacgtcagatcctaaggctgctgcgcctcagatgtaccgagaacgatggcatttgcctactgaagattgttagtgctctctgggagaaatggctcagcttgctggaggccgctaaagaatgggaaatgtggtgcgaagagctgaaacaggagtggaagtttgtaagcgaggagattgagcgcgaagcaatcatccttgacaatcttcaggaagaactgcctgagatctctaaaactaaagaggctgcaacaaccgaagaactgtccgagcttctcgattgcctgtgccagtacggcgaaaacgttgaaaagcaacagttgctgctcacattgttgctgcagcggattagaagcatacagaatgttcctgagtccagtggcgcggtagagactgtgcccgcctttcaggagattacgagtatgaaagagcgctgtaataaactactgcagaaggtgcagaagaacaaagagctggtccaaacagagattcaagaacggcattcattcaccaaggagataatagctctcaagaacttttttcagcagacaacaactagttttcagaatatggcttttcaggaccatccagagaagtctgaacagttcgaggagctgcagagcatccttaaaaagggcaagctcacttttgagaacatcatggaaaagcttcggatcaaatacagcgagatgtatacaatcgtgccagctgaaatcgagagtcaagtggaagaatgtaggaaagcacttgaagatattgacgaaaagatcagcaacgaggtgctgaagagtagcccttcgtacgccatgaggaggaagattgaggaaataaataatggcctgcataatgtggagaaaatgcttcagcagaagtccaagaatatcgaaaaggcacaggagatacaaaagaaaatgtgggacgagttggacttatggcactctaagctcaacgaactggattcggaggttcaggatattgtggaacaggaccctggacaagcccaggagtggatggataacctgatgatccccttccagcagtatcagcaggtgtcacagagagctgagtgtcggacaagtcaactcaacaaggccacagtcaaaatggaagagtacagcgatttactgaagtccacagaggcttggattgaaaatacaagccaccttctggctaatccagcagattatgacagcttaagaacgctctcccatcacgctagtaccgtccaaatggctcttgaggattccgaacagaagcacaacttgctgcattccatattcatggacctcgaagatctgagcattattttcgagacggacgagctcactcaatctatccaagaacttagtaaccaggtcaccgcactgcagcagaagatcatggaatcattacctcagatacaacggatggcggacgacgtcgtggcgatcgagtccgaagtaaagtctatggaaaaaagggtgtccaaaatcaaaacgatcctcctgtctaaagagatcttcgatttttcacccgaggaacacttgaagcatggcgaagtcatcctggaaaacatcaggcctatgaaaaaaactattgccgagatcgtgtcctaccaggttgagctccggctacctcagactggaatgaaacccctgcccgtcttccagagaaccaatcagctgctgcaggatattaagctgcttgagaacgttacgcaggagcagaatgagttactgaaggtggtgattaagcaaactaatgagtgggacgaggaaatcgagaacctgaagcaaatcctgaataactactccgcacagttctctctagaacacatgtcgcccgatcaggccgacaagttgccacagttgcagggcgaaatcgagagaatggaaaagcagatactttcccttaatcagagaaaggaggacctgctggtagaccttaaagccacagtgctcaacctccatcagcacctgaaacaagagcaggagggggtagaacgagacagactgcctgccgttacaagtgaggaggggggcgtcgccgagcgcgacgctagcgagaggaaactgaaccgcaggggttccatgagctatctggctgctgttgaggaggaagtggaggagtcctctgttaagagcgacaatggcgatgagaaggccgagccttctcctcagtcatggagcagtttgtggaagcacgataaagacatggaggaggaccgtgcgtcaagcagtagcgggactattgtccaggaggcttacggcaaaatcagcacaagcgataactctatggcgcagattctaacacccgattccctgaacaccgaacaggggccagagtgttcccttcgccccaatcagacggaggaaggcactacccctcccatagaggctgacaccctcgactcgagcgacgctcagggaggactggagccgagagtcgagaagacacggccagagcccacagaggtgctgcatgcatgtaagactcaggtcgcggagcttgaactgtggctgcagcaagctaacgtcgccgtagagcccgagacgctgaatgccgatatgcaacaagtgctggaacaacagttggtagggtgtcaggctatgttgacagaaatagagcacaaagttgcgttcctgcttgagacttgtaaagaccagggcctgggcgacaacggcgcgacccagcacgaagccgaggccctctctcttaaactgaagaccgtcaagtgtaacctggaaaaagttcaaatgatgctgcaggagaagcactccgaagatcagcatcctactatattaaaaaaatcctctgaacctgagcatcaggaagcactgcaaccagttaacctgtcagagcttgagagtattgtgacagagcgcccacagtttagccggcaaaaggatttccagcagcaacaggtattggagctgaaaccgatggaacagaaagactttatcaagttcatcgagtttaacgccaaaaagatgtggccacagtactgtcagcatgataacgatacaactcaggagtccagcgctagcaatcaggcttcgtcgcctgagaacgacgtgcccgactcaattttatcccctcagggacagaatggcgacaaatggcagtacttgcatcacgagttatcttcaaagatcaaactgccattgccacagttggtagagccacaggtgtccacaaacatgggtatccttcccagtgtaactatgtataactttcgataccccacgacagaggagttgaagacgtataccacccagctggaggacttgcggcaggaagctagcaacttgcaaactcaagaaaacatgaccgaagaggcctacatcaatctagacaagaagctgttcgaactatttctcacactgtctcaatgcctgtcatctgtggaggaaatgttagagatgcctagactctacagagaggatggctccggtcagcaggttcactacgagacactggctctggaactgaagaaactttatctggccctgtcagataagaaaggcgacctgctgaaagctatgacatggccgggcgagaatactaacctgctgctggaatgttttgacaacctgcaggtatgtttagaacatacgcaagcggcagccgtgtgccggtcaaagtcactgaaggcaggccttgactataaccggtcctatcagaacgaaatcaaaagactgtaccaccaactaattaagagcaagacctccctccagcagagcctcaatgaaatttccgggcagtccgtggctgagcaacttcaaaaggctgatgcttatacagtagaattggaaaacgctgaatctcgtgttgcgaaattgcgagacgagggggagaggctgcacctgccgtacgccctgctacaggaggtgtacaagctcgaggacgttctggacagcatgtggggtatgctccgggctcgatataccgagttatcttcgcccttcgtgacagagtctcagcaggacgcactgctgcagggcatggtggagctcgtgaaaattggcaaggaaaagcttgcgcatggtcatttgaaacaaacaaagagcaaggtggccctgcaggctcagatagagaaccacaaggtgttcttccagaaattagtcgcagacatgttgcttatacaggcttactcagccaaaatactgcccagtctgctgcagaatagggaaaccttctgggccgaacaagtgactgaggtcaagatcttagaagaaaagtcaagacagtgcggaatgaagctgcagagtcttctccaaaaatgggaggaatttgatgaaaactacgctagtctcgagaaggacctggaaatattaatatcaactctcccttccgtgtccctggtggaggagaccgaagaaagattggtcgaaagaatcagcttttaccagcagatcaaacggaatatcgggggcaagcacgctcgcctctaccagaccctgaatgaaggcaaacaacttgtggcttcagtttcatgcccagagctggaagggcagatcgctaaacttgaagagcagtggctcagtctcaataaaaagattgatcatgaactgcacaggttacaggcactgctgaaacatctgctttcatacaatcgtgactcagaccagctaaccaagtggttggaatccagccaacacacactcaactattggaaggaacagtcgctgaacgtgagccaagacctggatactataagatccaatattaacaatttcttcgagttctccaaggaggttgatgagaagtcaagcctgaagaccgccgtgatctcaatcgggaaccagctcttgcatctcaaggagaccgataccgccacgttgagggccagtttagcccagtttgagcagaagtggacgatgctgattactcagctgcccgatatccaggagaaattgcatcaactgcaaatggaaaaactgccttctaggaaggcgataacagagatgatcagctggatgaacaacgtggagcatcagacttcagacgaggactctgttcactcccccagttccgcaagtcaggtgaagcaccttctgcagaagcataaagaatttcgcatggagatggattacaagcagtggatcgttgactttgtgaatcaatctttgttgcagctcagcacttgtgacgtagaaagtaagagatacgagaggacagaattcgcagagcacctgggtgagatgaatcggcagtggcaccgggtgcacggaatgctgaacaggaaaattcagcatctggagcagctcttggagagcattacagagagcgagaacaaaatccagattctgaataattggctggaagctcaggaggaacgcctgaagactctgcagaaacccgaaagtgtgatcagcgttcaaaaactgcttttggattgtcaggatatagagaaccagctggctattaaatccaaagcacttgatgagcttaaacaatcctaccttacgctagaatcaggagctgtgccacttctcgaagacactgcctctcgaatcgacgagctgtttcaaaagcggtcaagcgtcctaacgcaagttaaccagctgaagacctcaatgcagtcggtgctgcaggagtggaagatttacgaccagctgtacgatgaggttaatatgatgacaatcagattctggtactgtatggaacattctaaaccagtagttctgtcgttggaaacccttcgctgccaggtggagaacctgcagtctctgcaggacgaggctgagtcatcagaggggtcctgggagaaactgcaggaagtgatcggtaagttgaagggactctgtccatctgtggccgaaattatagaggaaaagtgccagaacacacacaagcggtggactcaggtcaaccaagcaattgcagatcaactccagaaagcccagtctctgcttcaactgtggaaagcatattctaacgctcatggcgaagccgcagctagactgaagcaacaggaagccaagttccaacagcttgccaacattagtatgagcggtaacaacctagccgagatcctccctccggcattgcaggacataaaagagctgcagcacgatgtccagaaaactaaggaggccttccttcagaactcctctgtccttgaccgtttgccccagcctgccgagagcagtacgcacatgcttctccccggacctctacactcattgcagcgcgctgcttatctggaaaaaatgctccttgtgaaggccaacgagttcgaattcgttctgagtcagttcaaggacttcggcgttcggctggagagtctgaagggcttgatcatgcacgaggaagagaacttggaccggctccatcagcaggaaaaggaaaacccagactcttttctgaatcacgtgctggcgttgacagcccagtcgccggatattgagcacctgaatgaggtttccctcaagttgccccttagcgacgttgcagtgaagacattgcaaaatatgaaccggcaatggatcagagctaccgcaactgcactggaacgctgttcagaacttcagggtatcggcctgaatgaaaagtttctgtattgctgtgaaaagtggatacagctcctagagaagattgaggaggccctgaaggttgatgtagcaaattccttacccgagctcctcgagcagcagaagacgtacaagatgctggaagctgaagtgtctatcaatcagactattgctgatagctacgtcacacagagcttgcaactgcttgacaccactgagattgagaataggcccgagttcattacagagttctccaagctgactgatagatggcaaaatgcggtccagggagtgcggcaacgaaaaggagacgtcgacggcctggtgagacagtggcaggacttcacaaccagcgttgaaaatctgttccgctttttgaccgatacaagtcatctgcttagcgctgtcaagggccaggaacgcttctctctgtatcagactcggtctttgatacatgagctcaagaacaaggagattcacttccagcggagacgaaccacctgtgccttgacacttgaagctggcgagaagttgctcctgaccactgacttgaaaacaaaagaatcggtagggaggcggattagccagttgcaagactcgtggaaagacatggaaccccagttggccgagatgattaagcagttccagagtaccgtggaaacatgggatcaatgtgagaagaagatcaaagaactcaagtctaggctgcaggtgctcaaggcacaatctgaagatcctctgcccgagctgcatgaggacctgcacaacgagaaggaactcatcaaggagctcgagcagtccttggccagttggacccagaatttgaaagagctccagaccatgaaagcagatttgacccgccatgtcctagtggaagatgttatggtactcaaagaacagatcgaacatttacaccgacagtgggaggacctttgcctcagagtggcaatccggaagcaagagattgaggatcggctgaacacatgggtcgtgttcaacgagaaaaacaaggagctctgtgcctggctggttcaaatggaaaataaggttttacagaccgctgatatttccattgaggagatgatcgagaaattacaaaaagattgcatggaagagattaacctattttcagaaaacaaactgcaattgaaacaaatgggcgatcagctcatcaaggcaagtaataagtcacgcgctgcagagattgatgacaagctgaataagattaatgatagatggcagcatctgttcgacgtgatcggaagccgggttaagaaactcaaggaaacatttgctttcatacaacagcttgacaaaaatatgtcaaatctcagaacatggctggccagaatagagtcggagctcagtaagccagtggtgtacgacgtctgtgacgaccaggagattcaaaagagactcgccgaacagcaagatttgcaaagagacatcgaacagcattctgctggagtggagtcagtgttcaatatttgtgacgtcctgcttcacgatagcgacgcctgtgcaaatgaaacagagtgtgactctatccagcaaaccacccgctctctcgaccggaggtggcgtaatatctgtgccatgagcatggaacggcggatgaagatcgaggaaacatggaggctctggcaaaaatttcttgacgactattcccgctttgaggactggcttaaaagtgctgagcgaaccgccgcctgtcctaactcctccgaggtcctatacacttccgcgaaagaggagcttaagcgcttcgaagccttccagcgacaaatccacgagagactcacacagctcgaacttatcaacaaacagtaccgccgcttagccagggaaaacagaactgacaccgctagtagacttaaacagatggtgcatgagggtaaccagcgctgggataatctgcaacgtcgggtcacggctgtccttcggcggctaagacactttaccaaccaaagagaggagttcgaggggactcgggaaagcattctagtctggctgacggaaatggacctgcaacttaccaacgtggagcacttctctgaatccgatgcagatgataaaatgcgacagcttaatggatttcagcaggaaattacgctgaataccaacaaaatagatcaactcattgttttcggcgaacagctgatccagaagtcagaaccacttgatgccgtgcttatcgaagatgagttggaagagttgcataggtactgccaggaggttttcggcagagtgtccagatttcaccgaaggctcacctcatgtacacccggcctggaagacgaaaaagaagccagcgaaaacgagacagatatggaggaccctcgcgagatccaaactgactcatggagaaagaggggcgagtcggaagaaccttcctcaccccagtctctttgccacctggtagctcctggccacgagagaagtggttgtgagacacctgtgtcggtggactctatccctctggagtgggaccacacaggggacgtgggcggatcttcctcccacgaagaggacgaagagggtccatactatagtgctttgtcagggaaatccatcagcgatggacacagttggcacgtgccggatagtcccagctgtccagaacaccattacaaacaaatggaaggcgataggaacgtcccaccggttccaccggcttcatctaccccatataaaccgccctacgggaaattgctgctccctccaggaaccgatggcggcaaggagggacctcgcgtcctgaacgggaacccacagcaggaagacgggggtctggctggtattaccgaacagcagagcggggctttcgatcgatgggagatgatccaggcccaagaactccacaacaagctgaaaattaaacaaaatctgcagcagctgaattcagacatcagtgcaattactacgtggctgaagaagaccgaggccgaactggaaatgctgaaaatggcgaagcctccatcagatatccaggagattgaactcagagtcaaaagattacaggagattcttaaggccttcgacacttataaagcattagtagtgtccgtgaatgtaagttccaaagaatttttgcagacagagagcccggagagcaccgaactccagtcccgtctgaggcaattgagcctactgtgggaggccgcccagggagctgttgacagctggcgtggggggctcagacagagcctgatgcagtgccaggacttccaccaactctctcagaacctcctgctctggcttgcaagtgccaagaatcgccggcagaaagctcacgtgaccgatcccaaagctgatcctcgcgctctgcttgagtgcagaagagagctgatgcaattggagaaggagctggtcgagaggcagcctcaggtggacatgctgcaagagatatctaatagcctgttgattaagggacacggcgaggactgtattgaggctgaagagaaggttcatgtgatagaaaagaaactgaagcaactccgagaacaggtgtcacaggatctgatggccctccaggggacgcagaatcccgcctctccactcccatcctttgatgaggtggactcaggcgatcaaccgcccgccacctccgtgcccgctcccagggcgaaacagtttagagctgtgaggacaactgaaggggaagaagagaccgagagccgtgtcccaggtagtactagacctcagcgcagctttctttctagggtggtgagggctgcactgccacttcagctgctgctcctgctcctattactgctcgcttgcctcctgccctcttctgaagaagattattcatgtacccaagcgaataacttcgcgagatcattttatcccatgcttcgatatacaaacggccctccccccacctag

SEQ ID NO: 185011 - DNA, 9813 bp, Artificial Sequence
  derived and/or modified sequence
atggagaaactgaggatcaagtatagcgaaatgtatacgattgttccagccgagattgagtctcaagtagaggaatgtagaaaggctctggaggacatcgacgagaagatcagcaacgaagtcctgaagagcagccccagttacgctatgcggagaaagatcgaggagattaacaatggtttacataatgtggaaaagatgctccagcagaaatctaaaaatatagaaaaggcccaagagattcagaaaaaaatgtgggacgagttggacttatggcatagcaagctgaatgagctggactccgaagtccaagacatagttgagcaggacccaggacaggctcaggagtggatggacaatctgatgatcccctttcagcagtaccagcaagtatcgcagcgcgctgaatgtaggacatctcagctgaataaagcaaccgtgaagatggaggaatatagcgacctcctcaagtcaaccgaagcatggatcgaaaacactagccacctcctggccaacccagccgattatgactcccttagaactctatcacaccatgcatccactgttcaggattcaaaatgtttccgttcggggccgaggcctaacatatacgtgagctactatgtaactgtgatacagatggccctggaagacagcgaacaaaagcacaacctgctgcattcaatttttatggatctcgaagacctgtctattattttcgaaaccgatgaactgacacaaagtattcaggaattgtcaaatcaggtcacagcgctgcagcagaagataatggaatcactaccacagattcagagaatggctgacgacgtggtcgccatagagtccgaggtaaaatccatggaaaagcgcgttagcaaaataaagaccatactcctctctaaggaaatctttgacttttcgcccgaggaacaccttaaacatggggaggtgattttagagaacatccggcctatgaagaagaccatagccgagatcgtgtcctaccaggtggaactacgattaccacaaacggggatgaagcccttgcctgtcttccagcgaaccaatcaactgctgcaggatataaagctcctggagaatgtcacccaagagcagaacgaactgttgaaggtcgtgattaaacagacaaatgaatgggacgaggaaattgagaacctgaagcagatcctgaacaattattccgcacagttttctctcgaacacatgagccctgatcaagccgataagctgccgcagctgcagggcgagattgagcgcatggaaaagcaaattctgtctctgaatcagagaaaggaagacctgctggtagatttaaaagccactgtgttgaatttacatcaacatctgaaacaggaacaagagggcgtggaaagagatagattgcccgccgtgaccagcgaggaggggggcgttgcagagcgcgacgcaagtgaaaggaaactcaaccgacgcgggtcaatgtcatatcttgctgcagtggaggaggaggttgaagagagctccgtcaagtcagataatggcgacgagaaagcggaaccctctccacaaagttggtccagcctatggaagcatgacaaagacatggaggaggacagagcgtcaagctcctctggcacgatcgtgcaggaagcttatggtaaaatcagcacaagtgataactcaatggctcagattctcacccccgattctcttaacactgaacaagggccggagtgttccctgagacctaatcagacagaggagggtaccaccccccccatagaggctgataccctagactcctccgacgcccagggtggactggaacccagggtcgaaaagacgcggccagaacctaccgaagtactgcacgcgtgtaagacacaagtcgccgaattagaactgtggctgcagcaagcaaacgtcgctgtggagccagagacattaaatgctgacatgcagcaggtgttagagcaacagctggtgggatgccaagccatgttgaccgaaattgagcacaaagtggcattccttctggagacttgcaaagatcaggggctcggcgacaacggtgccactcagcacgaggctgaggcgctgtccctcaaactcaaaacggtgaagtgtaaccttgagaaggtacagatgatgctccaagaaaaacactctgaagatcagcatccaaccattctgaaaaaatcttccgagccagagcaccaagaagcactgcaacccgtgaacctgtccgaattggaatctatcgtcactgaaagaccacagttcagccggcagaaagattttcaacagcagcaggttctggaactcaagcccatggagcagaaagatttcattaagttcatcgaattcaacgcaaaaaagatgtggcctcagtactgtcagcacgataatgacactacacaggagtcaagtgcttccaaccaagcttcctcacccgaaaacgatgtaccggatagtatcctgtcaccccagggccagaacggagataaatggcagtacctccatcacgagttgtcaagcaaaattaagctgccgttgcctcagttagttgagccccaggtatctaccaatatgggcatcttgccatcagtgactatgtacaactttaggtaccctacaacagaagagctgaagacctataccactcaactggaagacctccgtcaagaagcatctaacttacagacccaggagaatatgacagaggaagcttatatcaaccttgataaaaaactctttgagctctttttgacgctcagccagtgtctgtcctcagtcgaggagatgctagaaatgccacggctgtacagggaggatggctctggccagcaagtccactacgagacactagccttggaactgaaaaaactgtatctcgccctgagcgacaaaaaaggggatctgctgaaagccatgacctggccaggcgaaaataccaacttgttgttagagtgttttgacaaccttcaggtgtgtctggaacacacccaggctgcggcggtatgcaggagcaaatcactcaaagcaggattggattataaccggtcataccagaacgaaataaagaggctgtatcatcaactaatcaaatctaagactagcctacagcagtcacttaatgagatttcagggcagagcgtcgcagagcagttacaaaaagccgatgcctatactgttgaactggagaacgcggagagcagagttgccaaactcagggatgagggagagcgacttcacctgccttatgcgttactgcaagaggtctacaagctggaagacgtgctggactctatgtgggggatgctgcgcgcacggtatacagaactttcaagcccttttgtcactgagtctcagcaggacgctcttctccagggaatggtggaactggtaaagattgggaaagaaaagttggctcacggccatttaaagcagacaaagtctaaggtggctctgcaggcacagatcgagaaccacaaagtgtttttccagaagctggtggcagacatgttgctaatccaagcgtattccgccaagatcctaccaagtctgctgcaaaatagggaaacattctgggccgagcaggttacagaggtcaaaattttggaagagaagagccgccaatgtgggatgaagttacaaagtctgctgcagaagtgggaggagtttgatgagaattatgcctccctggagaaggatctggagattctcatcagtactctccccagcgtctctctagtcgaggaaaccgaagagaggttagtggaaagaatctctttttaccagcagatcaaaaggaacataggaggcaaacacgcccggctgtatcagacactaaatgaagggaaacaattggtagccagcgtctcttgtccagagctggaaggtcagatcgccaagctggaggagcagtggttgagtctgaacaaaaagattgaccacgaacttcacaggctccaggccttgttaaagcacttgctgtcctacaacagggacagcgatcagctaactaagtggctggaatcctctcagcacaccctgaactattggaaggagcagtctctgaacgtcagtcaggacctggatacgattcgctctaacattaataactttttcgagttctccaaagaggtggatgagaagagctccctcaagaccgcagtgatctctatcggcaatcagttgctgcatctgaaggaaacggacacagccacgctgcgcgctagtcttgcccaatttgaacagaaatggactatgctaattactcagttgccggacatccaggaaaaactccatcaacttcagatggagaaattaccatccaggaaggccattaccgaaatgatatcctggatgaataatgtcgagcaccagacgtccgacgaagattcagtccactctccatcaagtgctagccaggtcaaacacctactgcaaaaacacaaggaatttagaatggaaatggactacaagcagtggatcgtcgacttcgtcaaccaatcactactccaactcagcacctgcgacgtggaatctaaacgctatgagagaaccgagtttgctgagcatctgggtgagatgaatagacagtggcatcgggtacacgggatgttgaatcggaagatccaacatctggaacagctgctagaatccattacagaaagtgagaacaagatacaaatcctgaataattggctggaggctcaggaagagagattgaagacacttcaaaaacctgagagcgtaatctccgtgcaaaaattgctgctggactgccaagatatcgaaaatcagttagcaatcaaatctaaagccctcgacgagctaaagcagtcttacctgacactcgagtctggcgcagtgcctctcctggaagataccgccagcagaattgacgagctgtttcagaaacgaagttctgtgctcactcaggtcaatcagctgaaaacctccatgcagtcagttcttcaggagtggaagatctatgatcagctttacgatgaggtcaacatgatgacaataaggttctggtactgcatggagcacagtaagccagtggttctatctttggaaacgctgcgctgtcaggtggaaaatcttcagtctctacaggacgaagcggagtcttcagagggctcttgggagaaactccaggaggtgatcggaaaactgaaaggtctgtgtcctagcgtagccgagatcattgaggaaaagtgccagaacactcataaacggtggactcaggtgaatcaagccatcgcggaccagctccagaaggcgcaatccctgttgcagctctggaaggcatacagcaacgctcacggcgaggccgccgcacgcctgaagcaacaggaagcaaagttccaacaactggcgaacatcagcatgagcggaaacaatctggcggaaatccttcctccagctctccaagatattaaagagttgcaacacgatgtacagaaaactaaggaggcatttctgcaaaactctagcgtgctagatagattgccccagcccgccgagagctcaacccacatgctcctgcctggcccactccatagtctccagcgcgccgcctaccttgagaaaatgttgcttgtgaaagctaacgagtttgagttcgttctgagccagtttaaggattttggagttcggctcgaatcccttaagggactgatcatgcatgaagaggaaaatctggacagattacaccaacaggagaaggaaaaccctgactcatttctcaatcatgttttggctcttaccgctcagtcaccggatattgagcatctgaacgaagtttctctgaagctcccattaagcgacgtggcagtcaagaccctccagaatatgaatcgccagtggatacgcgctactgcaactgccctcgagagatgctcagagctgcaggggattggactcaacgagaaattcctttattgctgcgagaagtggatccagctgctcgagaagattgaggaggccctgaaagtggatgtggccaattcattaccggaattactagagcaacagaaaacatacaagatgctcgaagctgaagtttccatcaatcagacaatcgctgattcatacgttacacagtctctccagttgttagataccacagagatcgaaaatcgtccagagtttatcaccgaatttagcaaactgacggaccgctggcaaaacgcagtccagggcgtgcgccagagaaagggagacgttgacgggctggtaaggcagtggcaagactttactacctccgtggaaaacctgtttcggttcctgaccgacacatcgcatctgctgagcgcagttaagggacaggagcgtttttcactgtatcagacccgatcattgattcatgaactaaaaaataaagaaatccacttccagcgacgtaggaccacctgtgccttgacactggaggccggggaaaaacttctcctaaccaccgacttgaaaactaaagaaagcgtggggcgacggatttcccagctacaggattcctggaaagatatggaacctcagctggccgagatgatcaaacagtttcagagtacagtggagacttgggaccaatgcgagaagaagatcaaggagctgaagtccagactgcaggtgcttaaagcccagagcgaagatcccctgccagagttgcacgaagacctccacaacgagaaggaactcattaaagaacttgagcagagcctcgcctcgtggactcagaatctcaaagagttgcaaacaatgaaggctgatctgacacggcacgtccttgtggaagatgtaatggtgctgaaggagcagattgagcatctccaccgacagtgggaggacctgtgcctcagggtggctataagaaagcaggagatcgaagacaggctgaacacctgggttgtgttcaatgagaagaataaggagctgtgtgcctggcttgttcaaatggagaacaaggttcttcagacggctgacatcagcatagaggaaatgatcgagaaactccagaaagattgtatggaggagatcaatctgtttagcgagaataaattgcagctgaaacaaatgggagaccaactgataaaggcatcaaataagtcacgtgctgccgagatcgatgacaagttgaataagattaacgacaggtggcagcacctgtttgacgtgatagggagcagggtgaagaagcttaaggagacatttgcgttcatccaacagttggataaaaacatgagcaacctgaggacttggctggcccggatcgagtccgagttgtctaaacctgtcgtgtatgatgtgtgtgatgatcaggaaattcagaagcggttagccgagcagcaagatctacagcgggacattgagcagcatagcgccggagttgaatccgtgttcaacatttgcgacgtgttactgcacgacagtgatgcttgcgcaaatgagacagaatgcgacagcattcaacagaccactagatccctcgacagaagatggaggaacatttgtgcgatgagtatggagaggcgaatgaagatcgaggagacatggcggctctggcagaagttcctggatgactatagtcgtttcgaggactggctgaagtcggcagagaggaccgccgcctgcccaaattcctcagaagtgctttatacctcagccaaggaagagctcaaacgctttgaagcctttcagcggcagatccatgagagactgacccaactggagcttatcaataagcagtacagacgccttgccagggaaaatcgaactgacacagcttcccgccttaagcagatggtacacgagggaaatcaacggtgggataatttgcaacgaagggtaaccgctgttctgagaagactccgtcacttcactaaccagcgcgaagagttcgagggcacccgcgagagtatactggtatggttaaccgaaatggatttgcagctgactaacgtggagcattttagcgagtccgacgccgacgacaagatgcggcagctcaacggtttccagcaggaaatcaccctgaataccaacaaaatcgatcagctgatcgtgtttggggagcagctcatccaaaaatcggagccccttgacgccgtgcttattgaagatgagctggaagagctgcacaggtattgccaggaggtattcggccgggtgtcaagattccaccgcagattgaccagttgtacccctggccttgaagatgagaaagaggccagtgaaaacgagacagacatggaggacccccgagagatccagactgattcctggcgaaaacggggtgagtcagaagagccctcatcacctcagtccctgtgccacctggtggcccctgggcacgaaaggtccggatgcgaaaccccggtttctgttgactccattcccttggagtgggaccacacaggggacgtggggggcagttcaagccacgaggaagacgaagagggaccttattatagcgcactgtctggtaaaagtatctcggatggacactcatggcacgttccagactcaccctcttgcccagagcatcactacaaacagatggaaggcgatcgtaacgttccccccgttccccccgcttcttccaccccctataaaccgccttacggtaagctcctcctcccgccaggcaccgacggaggaaaagaaggtccgcgcgtactaaacgggaatccgcagcaggaagatgggggcctagctgggataaccgagcaacagtccggggcctttgatcggtgggagatgatacaggcccaagaactgcataacaagctgaagatcaagcaaaacctgcagcagctgaattctgacatcagcgccattacaacttggcttaagaagacagaggcagagcttgaaatgctgaagatggctaaacctccatctgatattcaggagattgaactgcgggtgaagcgactccaagagattctgaaggcctttgatacttacaaagctttagtagtgtctgtcaatgtctcgtccaaagagttccttcagaccgagtcacccgagagcaccgagttacaaagtagactgcggcagctgagtctcctttgggaagcagcccagggcgccgtcgatagctggaggggcgggctgcggcaaagtctcatgcagtgccaggattttcatcagctgagccagaatttactgctttggctggcttcagctaaaaacaggaggcagaaagctcacgtgactgatccaaaggccgacccacgagccctcctcgagtgccgtagggagttgatgcagcttgaaaaggagctcgtagagcggcagccccaggtggatatgcttcaggagattagtaattccttgctgatcaaaggccacggagaggactgtattgaagcagaagagaaagtgcacgttattgagaaaaaactgaaacagctgcgagagcaggtgtctcaggatctaatggcgctgcagggaacacagaatcctgcatctcccctgccatccttcgatgaagtggacagcggagaccagccaccggccacatctgtgccagcaccgcgtgccaaacaattcagggccgtccgaaccactgagggcgaggaggagacagaaagtagagttccaggatccactcgcccacagcgttcctttctctccagggtcgtccgggccgcactcccactgcaactgctgttactcctgctgctgcttttagcatgtcttctgccatcatcagaagaagattactcttgtactcaagccaacaacttcgcccgtagcttctaccctatgctgaggtacactaatgggcctccgcctacctag

SEQ ID NO: 185012 - DNA, 9813 bp, Artificial Sequence
  derived and/or modified sequence
atggaaaagttaaggattaagtatagtgaaatgtataccattgttccagccgagattgaatcccaggtggaggagtgtcggaaggctttggaggatatcgatgaaaagatttccaatgaggttttaaagtcctccccatcttatgctatgcgcaggaaaattgaggagattaataacggtctacacaatgtggaaaagatgttacagcagaaaagtaagaacattgaaaaggcccaggagatccagaagaaaatgtgggacgagttggacctctggcattctaagctcaacgaattggacagcgaggtgcaagatatagtggagcaggatccaggacaggcacaggagtggatggataatctaatgatccctttccagcagtaccaacaagtatcccagcgcgcggaatgtcggacgtcacagctgaacaaagctacagtaaaaatggaagaatattccgacctcctgaagagcacagaggcttggatcgagaacacatcccacctcctcgctaaccccgcagactatgatagtcttcgcactctcagccatcatgcctcaacagtgcaggactctaagtgttttcgatccgggccaagaccgaatatttatgtgagttactatgtgaccgtgattcagatggcattggaggattccgagcagaaacataatttgctgcattcgatttttatggatctcgaggacctatctatcatcttcgaaactgacgaacttacccagtccattcaagagctgtctaaccaggtgacggctctccaacagaagatcatggagtccctgccacagatacagcgaatggccgacgacgtcgtggctatcgaatcggaggtaaaaagcatggagaagagagtgtcaaaaatcaaaacaatactcctgagcaaagagatcttcgactttagtccagaagagcacctcaagcacggggaggttatactcgagaacataagacccatgaaaaagacaattgctgaaatcgtgagttatcaagtcgaactgcgtctcccccagacaggtatgaaaccccttcccgttttccagcgcaccaatcaattgttgcaggatataaagctactggagaacgtcacacaggagcagaatgaactgttgaaagttgtgattaagcagaccaatgaatgggatgaggagattgagaacctgaaacagatacttaataattacagcgcacagttctcgttagagcacatgagtcccgaccaggcggacaagctgccacaactgcaaggagaaatcgagagaatggagaagcagatcctgagcctaaaccagcgaaaggaggaccttttggtggacttgaaggcgaccgtacttaacctacatcagcacctcaagcaggagcaggagggtgtagagagggaccgtctacccgctgtcacctctgaagaaggcggtgtggccgaaagagatgcgagcgagcggaaactgaaccgtaggggttctatgtcttatctggctgccgtcgaagaggaggtggaggaatcctccgtaaagagcgataatggcgatgaaaaagccgaaccctctcctcaaagttggtctagtctgtggaagcacgataaagatatggaggaggatcgggcctcctcgtcatctgggacaatcgtccaggaggcttacggcaaaatttctacttctgataacagcatggcccagatcctgactccagactcactgaacacagaacagggaccagagtgttctctgaggccaaatcagactgaagagggaaccacccccccaatcgaagctgatactcttgactccagtgacgcccagggtggcctggagcccagggtcgagaaaactcggcccgagcccactgaagtgctccatgcttgtaagacccaggttgcagagcttgagctgtggcttcagcaggccaacgtcgcagtggagccggagacgctaaacgccgatatgcagcaggtgctggaacagcagctagtgggatgtcaagccatgttgaccgaaatcgagcacaaggtggcctttctgttggagacatgcaaagatcaggggctcggagacaacggcgccacccaacacgaggccgaggctttatcgttgaaacttaaaacagtgaagtgcaatctcgagaaggtgcagatgatgcttcaagagaagcacagcgaagatcagcatcccaccattctgaaaaaatcgagcgaacctgaacatcaggaggcactgcagccagtaaatttgagcgagcttgaaagtatcgtgacagaaaggccacagttttccaggcagaaagactttcaacagcagcaggtgctggaattgaaaccaatggaacaaaaggacttcattaagttcatcgaattcaatgcaaaaaagatgtggccccagtattgtcaacacgacaacgacaccacgcaggagagcagcgcttccaaccaggcgtcatctcctgaaaacgacgttcccgacagcatcctgagccctcagggccagaatggagataagtggcagtacctacaccacgaactttctagtaaaattaaactgccactacctcagctggtcgagccgcaggtgtccaccaatatgggtatcttgcccagcgtgaccatgtataacttccggtaccccactacagaggagttgaagacttatacaacacaactcgaagatcttagacaggaggcatccaatctccagacacaggagaatatgaccgaagaagcctacatcaacttagacaaaaaactgtttgagctgttcctaacactgtctcagtgcctgtcctctgttgaggaaatgctggaaatgccccggttgtaccgagaggacgggtctggtcagcaagtccattatgagacgttagccctcgagctcaaaaagttgtacttagcgttgagcgataagaagggtgatcttcttaaagccatgacatggcccggggagaacacgaatctcctccttgagtgttttgataacctccaggtctgtttagagcatactcaggccgctgctgtctgcaggtccaagtctctaaaggctggcctggattacaaccgcagctaccagaacgagattaagcgcttgtatcatcagctgattaagagtaagacctctctgcagcagtcactaaacgaaatctctggacagtctgtagctgaacagcttcagaaggcagatgcatatacggtggagctggaaaatgccgagagtcgggtcgcaaagctgcgggatgagggtgaacgcctacaccttccttatgccttgcttcaggaagtgtacaaactcgaagacgttctggattcaatgtgggggatgctaagagccagatatacagaattgtcatcaccgtttgtcactgagagtcagcaggatgctttactgcagggaatggtggagttggtgaagatcggcaaggaaaagttagcccacggccacctcaagcagacgaagtccaaggtggccttgcaagcgcagatcgagaatcacaaggtcttcttccagaaattggtagccgacatgctgcttattcaggcctactccgctaagatcctgccatcattgctgcaaaatagagaaaccttctgggccgagcaggtcacagaggtaaaaatcctggaggagaagagcagacagtgcggcatgaagctgcagagcttgctgcagaaatgggaagaattcgatgagaactacgcaagcttagagaaagatctagagatcctcatctcgaccctgccaagcgtctctttagtcgaggaaaccgaggaacggcttgtagagagaatctctttttaccagcagattaagcgaaacattggtggcaagcacgcccgcctgtaccagaccctgaatgaggggaagcagctcgttgcatcggtgtcctgtccagaactggagggccaaatcgcgaagctcgaggagcagtggctcagtttaaataagaagatcgatcacgaactgcaccggctccaggccctgctgaagcatctgctgtcttacaatcgcgattctgaccagctaaccaaatggctagaatcttcccagcatacactgaattactggaaggagcagtcactgaacgtcagccaggatttggatacaatccggtcaaacattaacaatttctttgaattcagcaaggaagtcgacgagaagtcctccctgaagaccgccgttatcagcatcggcaatcagttattacatctcaaggagactgacacagcaaccctgagagccagcctggcccagtttgaacagaaatggactatgctcattacccagttaccagacatccaggaaaagctgcatcagctccagatggaaaaacttccctcacgcaaggcaattacggagatgatctcatggatgaataatgtggagcaccagacatcagacgaagattctgtgcattcgccttctagtgcatctcaggtgaagcacctgctccagaaacataaggaattccgtatggaaatggactacaaacagtggatcgtcgacttcgtcaaccagagccttctgcaactgtcaacctgtgacgtagagtctaagaggtatgagcggactgagtttgcagagcatctgggcgaaatgaacaggcaatggcacagagttcatggcatgctgaataggaagatccagcatttggagcagcttttagaatcgattacagaaagcgaaaacaagatccagatcctgaacaattggctggaggcacaagaggaaagactcaaaacgctgcagaaacccgagagcgtcattagcgtacaaaaactacttcttgattgccaggatatcgagaaccagctggccataaaatctaaagcactcgacgagttaaaacagtcctatttgaccttggagtccggcgcggttcctctgttagaggacactgccagtcgcatagacgaactgttccaaaaaaggtcttcagtgctgacccaagtgaatcaattaaagacttctatgcagtccgttttgcaggagtggaaaatatacgatcaactgtacgatgaggtcaatatgatgacaattagattttggtattgtatggagcatagcaagccagttgtgttgtccctcgagacactcagatgtcaggtggagaacctgcagtcactgcaggacgaggctgagagtagcgaaggttcttgggaaaagttgcaagaagtgatcggcaagttgaaaggactgtgtccatccgttgcagagataatcgaggagaaatgccagaacactcacaagagatggacccaggtaaaccaagctatagcggaccaactacaaaaggcccaatctctactgcagctgtggaaggcatattctaatgctcacggcgaggctgccgcaaggctgaagcagcaggaagccaaattccaacagcttgccaatatcagtatgagcggcaacaatctcgccgagatcctgccgcctgcactccaagacatcaaagagctgcaacacgacgtgcagaagaccaaagaggcttttttgcagaattcatcggtcttagacaggttacctcagcccgccgaatcctcaacacacatgctcctgccaggccctttacactccctccagagagccgcgtatcttgagaagatgctgctagtaaaggcgaacgaatttgaatttgtgctttcacagttcaaagacttcggggtgcgattagagagtctgaaggggctgataatgcacgaagaagaaaacctggatcgactgcatcagcaggaaaaagaaaatcccgatagctttctaaaccacgtgctggccttgacagcccaatctcctgacattgagcacctcaatgaggtcagccttaaactgcccctgtctgatgtggccgtgaaaacgctgcagaatatgaatcggcagtggatccgcgctacagccacagctctggaacggtgttcagaactgcagggcatcggcctgaatgagaagtttctctattgttgcgagaagtggatccagctcctggagaagatcgaagaggccctgaaggttgacgtggcaaatagtttgcctgagctgcttgaacagcaaaaaacctataagatgctggaggcggaggtgagtattaaccagaccatcgctgacagctacgtgacccagagtttgcaactgttggacacgaccgaaatcgaaaatagacctgagtttataacagagttcagtaaactgactgatcgctggcagaatgccgtccaaggagttcggcaaagaaagggcgatgtagacggccttgtgcggcagtggcaggacttcacaacgagcgtggaaaacctattcaggttcctgactgataccagccatctgcttagcgccgttaaaggacaggaaaggtttagcctgtaccagactagatcattgatccatgagctcaagaataaggagattcattttcagcgtcggcgcaccacttgcgccttgactctcgaggccggtgaaaaactgttgctgactactgacctgaagacaaaagaatctgttggtcggcggatttctcagctgcaagactcatggaaggacatggagccacagctggcagaaatgataaaacagttccagagtaccgtagagacctgggaccaatgcgagaagaaaattaaggagctgaaaagtagattgcaagtgctgaaagcacagagcgaggaccccctacccgaactgcacgaggaccttcacaacgaaaaggaactgatcaaagaactcgaacagtcattagcttcttggacgcagaatctgaaagaactgcagaccatgaaagccgacctgacccgacacgtgttggttgaggatgtgatggtactaaaggagcagattgaacatctgcatcggcagtgggaggacctctgtcttcgcgttgcaatccgaaagcaggagattgaggacagattgaatacctgggtcgtgttcaatgagaagaataaagagctgtgtgcatggctcgtgcagatggagaacaaagtcttgcagaccgctgatatctccatcgaagaaatgatcgaaaaactgcaaaaggattgcatggaggagattaacttattttcagaaaataaactgcagctgaagcagatgggcgaccaactaattaaagcatctaataagagccgtgccgccgagatcgacgataagttaaataagataaatgaccgctggcagcatctcttcgatgtgatcggtagcagagtcaagaaactgaaagaaacatttgcatttattcaacagttggacaaaaacatgtcaaacctccggacctggctggcgcgaatcgagtcagagctctccaagcctgtggtttacgatgtctgtgatgaccaggagattcaaaagaggctcgccgagcaacaggacctccagcgcgacatcgagcagcacagtgctggtgtggaatcggtctttaacatatgcgacgtgctgcttcacgatagcgatgcctgcgctaacgagactgaatgcgactcaatccagcagacaaccagaagtctggatcgcagatggcggaacatatgcgctatgtcgatggaacgcagaatgaaaatagaagagacatggcgactgtggcagaagtttttagatgactattccagatttgaggattggctaaaatcagcggagaggactgccgcttgtccaaactcttctgaagttctgtataccagcgcgaaggaggagctcaaaagattcgaggcatttcagcggcagatccatgaacggctgacccagctggagttgatcaataagcagtatcggagactcgcccgagagaacagaaccgacacagcctcgcgacttaagcagatggtccatgagggcaatcagcgatgggacaaccttcagcggagagtgaccgctgttctgaggaggttacggcactttacaaatcaacgtgaggagttcgagggcactcgggaatctattctcgtctggctcaccgagatggatttacagctgacaaacgtggagcacttttccgaaagtgacgccgacgacaaaatgagacagctgaacgggttccagcaggagattaccctgaacaccaacaaaatagatcagctgatagtctttggagagcaattgattcagaaaagcgaaccattggacgccgtgcttatcgaagacgaactggaggagttgcaccgatactgccaggaggtctttggccgtgtctctaggttccaccgaagactcacgtcttgcacacctggattggaggacgaaaaggaagcctctgaaaacgagaccgatatggaagatcctagggagatccagactgattcttggcgtaagaggggcgagtccgaggagcctagttctccacaatctctgtgccacctggtagctcctggacacgaaaggagtggatgtgaaactcctgtatccgtggactcaatcccgctggagtgggatcataccggcgatgtgggaggcagcagttctcacgaagaggacgaggagggcccttactacagcgcgctgagtgggaaatctatatctgacggccactcttggcacgtgccagactcacccagctgtcccgaacaccactataaacaaatggaaggcgaccgtaacgtaccaccagtccctcccgcttcctccacaccttacaaacctccatacggtaagctgctgctgccgcccggcacagacggaggtaaggagggacctagagtgcttaacggaaatcctcagcaggaggacggcgggttggccgggatcactgaacagcaatctggcgctttcgatcggtgggagatgattcaggctcaggagttgcacaataaacttaaaattaagcaaaaccttcagcaactgaactccgatatatccgccatcaccacatggctcaagaaaactgaggccgagctggagatgcttaagatggccaagcctccatcagacatccaggagattgaactgcgggtgaaacgcctgcaggagatcttgaaggctttcgacacctacaaagccctggttgtgtctgttaatgtctctagcaaagaatttctgcagaccgagtctcccgagtctaccgagttacagtctagattgagacagctctcgctactctgggaggctgctcagggagctgtcgacagctggagagggggtctacggcagtctttgatgcagtgccaggactttcatcagctcagccagaatctcttactgtggttggcttcagccaagaacagacgccagaaggcacatgtcactgacccaaaagctgatccccgggcactgcttgaatgccgccgagagctgatgcagctggagaaagagttagtggaacgccagccgcaggtcgacatgctccaggagatttctaactcactgttaatcaagggccatggggaagactgcatcgaggctgaagagaaggtgcacgtgattgaaaaaaaactgaaacaactgagggagcaggtttcacaggatctaatggcattgcagggaacacaaaacccagcaagccctctgccttctttcgacgaggttgactccggagaccaaccccccgccacatcagttcctgcaccacgggcaaagcaatttagagccgtgcggacgaccgaaggagaagaagaaacagaatccagagtcccgggttcaacaagaccacaacgcagtttcctgtcacgcgtggtgcgggcagcactacctttgcagctcctgctgctcctgttgctgctgctggcctgcctgctgccgagctctgaggaggattactcatgtacccaggcaaataacttcgcacggtccttttaccccatgttgaggtacacaaacggacccccgcccacatag

SEQ ID NO: 185013 - DNA, 2007 bp, Artificial Sequence
  derived and/or modified sequence
atggtccatgaaggcaatcagaggtgggataatctacagcgtagggttactgctgttttaagacggctccggcatttcaccaaccaaagggaagagttcgagggcacacgcgaatcaatcctggtgtggctcacagaaatggaccttcagcttacaaatgtagagcacttctccgaatccgacgccgacgacaagatgcgccagttaaatgggttccaacaagagattactctcaacactaacaaaattgatcagcttatcgtgtttggagagcaactgatccagaaatctgagccattagacgcagtcctcatagaggatgaactggaggagctccaccgctactgccaagaggtattcggaagagtgagtagattccatcgcaggctcaccagctgcaccccaggcctcgaggacgagaaggaggcttccgagaacgaaacggacatggaagacccacgcgagatccagactgattcatggaggaaacgaggggagtcagaggaaccttctagcccccagagcctttgtcatctggtggcacccggccatgaaaggtcaggatgtgagactcccgtgtcagtagacagtataccccttgagtgggatcatactggggacgtgggaggtagcagtagtcacgaagaagatgaggaaggcccatactactccgcacttagcggcaagagcatttccgacggacactcgtggcatgtgccggactctccatcatgcccagagcaccactacaaacaaatggagggcgaccgaaacgtccctccggtgccacctgctagctccaccccctacaagccaccgtacgggaaactgcttctgccaccgggcacagacggcggtaaagaagggccacgcgtgcttaacggcaacccccagcaggaggacgggggtctcgccggcattaccgagcaacagagcggcgccttcgacaggtgggaaatgattcaggcgcaggagctgcacaataagcttaagattaagcagaatcttcagcagctgaatagtgacatttcagccattacaacctggctgaagaagactgaggcagaattagaaatgttgaaaatggctaaaccgccgtcagacatccaggagatcgagcttagggttaagcgccttcaggagatcctgaaggcctttgacacatataaggccctagtagtgagcgtaaacgtgtcctccaaagagttcctccagaccgagtctcccgagtccaccgagttgcagagcaggcttaggcaactgagcctactgtgggaggcagctcagggagcagtggattcatggaggggagggctgcgtcagtcgctcatgcaatgccaggattttcatcagctgtcccaaaacctccttctgtggctcgcatccgccaagaaccgcagacagaaggctcatgtaacagaccctaaagccgatccccgcgccctattggagtgtcgacgggagctaatgcagctggaaaaggaattagtcgagcgccagccacaggttgatatgctgcaggaaatatcaaacagcctactgataaaaggccacggcgaggattgcattgaagctgaagagaaagttcacgttatcgagaagaagcttaagcagctccgcgagcaagtatctcaagatctgatggctctgcagggcacccagaatccagccagccccttaccttcattcgatgaagttgacagcggcgaccaaccgcccgcgacgtccgttccagcaccaagggcgaaacagtttcgagctgttagaacaacagaaggcgaggaggagacagagagccgcgtgcctggctctacacggccacagaggagctttctctcccgcgtagtgagagccgccttacccctccagctcctcctgctgctgttgctactcctggcttgtctgcttccatcttctgaggaggactatagctgtacgcaggcaaacaacttcgcaaggtctttctacccgatgctgcgttatactaacgggccccccccaacatag

SEQ ID NO: 185014 - DNA, 2292 bp, Artificial Sequence
  derived and/or modified sequence
atgtccatggagagaaggatgaaaatcgaggagacttggcggctgtggcagaagttcctggatgactatagtaggtttgaagattggcttaagtctgccgagcgaaccgccgcatgccctaattcatcggaggtgttatacaccagcgcgaaggaggaactgaaacgcttcgaagccttccaaaggcagatccatgaacggttgacacagttagagcttattaataaacaatatcgtcggcttgcaagggaaaaccggacagacaccgccagtcgtctgaagcagatggtccatgaaggaaaccagagatgggataacttacagcgcagggtcactgctgtcctccgacgactgcgacattttactaaccaaagggaagaatttgaggggacaagggagtctattcttgtgtggctgacagagatggatcttcagttaacaaatgtcgaacacttttccgagtccgacgcggacgataagatgaggcagctaaacggatttcagcaggagatcaccctgaataccaataagatcgatcagctgatcgtgtttggcgagcagctcattcagaagagtgagcctctggacgcggtactgatagaggatgaactcgaagaattgcaccggtactgccaggaggtctttggacgagtttctcgattccatcgcaggctgacatcttgcactccaggtctggaggatgagaaggaagctagtgagaatgaaacagatatggaggaccctcgggaaatccagaccgactcgtggcggaaaaggggagagagcgaagagccttcctccccgcagtccctgtgccacctggttgcgccgggccatgaaaggagtgggtgcgaaactccagtcagtgtagatagcatccccctggaatgggaccacaccggcgatgtcgggggcagttctagccatgaagaggacgaggagggcccctactattccgccttgagtggcaagagtatatcagatgggcatagctggcacgtgccggactccccatcttgccccgagcaccactacaagcagatggagggggatcgcaatgtgccgccggttccccctgcgtctagcacaccctataaacctccttatgggaagctcctgctcccgcccggtactgacggaggaaaggagggtccaagggtgcttaatgggaatcctcagcaggaagacggaggtctggcgggcattacggagcagcagtccggcgcgtttgaccggtgggaaatgattcaggcacaagagctccataacaagctaaaaattaaacagaatttgcaacagttgaacagcgatatctccgctattaccacatggctgaaaaaaaccgaggcagagcttgagatgctgaagatggctaagccccccagcgatattcaggagatcgagctgagggtgaaacgtctgcaagagattttgaaggctttcgacacctacaaagcgctagttgttagcgtgaacgtgtcttcaaaggaattcctgcagactgaatcaccagaatcaacagaattacaatcaagattgcgacagctgtctctgttatgggaagccgcccagggggccgtggattcttggaggggcgggctgcggcagtctctgatgcagtgccaggactttcaccagctgagtcagaacttgctgctttggctggcatctgccaaaaacaggaggcagaaagcacacgtgaccgatcctaaagcagatccgagagccttgctggaatgcagacgtgagttgatgcagttagaaaaagagctggtggaacgtcagccgcaggtggatatgctgcaggaaatcagcaattccctcctgattaaggggcatggtgaagattgcatcgaagccgaggaaaaagttcatgtgatcgagaaaaaattgaaacagttaagggagcaggtgagtcaggacctcatggccctccagggaactcaaaacccggcaagcccactcccatccttcgatgaagttgattcgggtgatcaaccccctgcaacttccgtgcctgctccaagggcaaagcaattcagggctgtccggactacagagggagaagaagagacggagagcagagtccctggctccacccggccccagaggtcctttctaagcagagttgtaagagctgccctccccctccagttgctgttgctgctgctccttctgctggcgtgcttgctgcccagctccgaggaggattatagttgcacccaggctaataattttgcccggagcttttaccccatgctgaggtatactaacgggcctccgccaacatag

SEQ ID NO: 185015 - DNA, 20658 bp, Artificial Sequence
  derived and/or modified sequence
atggccagcagccctgagctgcccacagaagatgagcagggctcctggggcattgatgacctgcacatcagcctgcaggccgagcaggaggacacccagaagaaggccttcacctgctggatcaacagccagctggcccggcacaccagccccagcgtcatcagtgacctcttcacagacatcaagaagggccacgtgctgctggacctgctggaggtgctgagcggccagcagctgccccgggacaagggcagcaacaccttccagtgccgcatcaacatcgagcacgccctgaccttcctgaggaacagaagcatcaagctgatcaacatccacgtgacagacatcattgatggcaaccccagcatcatcctgggcctcatctggaccatcatcctgcacttccacatcgagaagctggcccagaccctgagctgcaactacaaccagcccagcctggatgatgtgtctgtggtggacagcagccctgccagcagccccccagccaagaagtgcagcaaggtgcaggcccgctggcagatgtctgccaggaaggccctgctgctgtgggcccaggagcagtgtgccacctatgagagcgtgaatgtgacagacttcaagagctcctggagaaatggcatggccttcctggccatcatccacgccctgcggccagacctgattgacatgaagtctgtgaagcacaggagcaacaaggacaacctgcgggaggccttcagaattgctgagcaggagctgaagatcccccggctgctggagccagaagatgtggatgtggtggaccctgatgagaagagcatcatgacctacgtggcccagttcctgcagtacagcaaggatgcccctggcactggagaggaggcccagggcaaggtgaaggatgccatgggctggctgaccctgcagaaggagaagctgcagaagctgctgaaggacagtgaaaatgacacctacttcaagaagtacaacagcctgctgtccttcatggagagcttcaatgaggagaagaagagcttcctggatgtgctgagcatcaagagggacctggatgagctggacaaggaccacctgcagctgcgggaggcctgggatggcctggaccaccagatcaatgcctggaagatcaagctgaactatgccctgcccccacccctgcaccagacagaggcctggctgcaggaggtggaggagctgatggatgaggacctgagcgccagccaggaccacagccaggccgtgaccctcatccaggagaagatgaccctcttcaagagcctgatggacagatttgagcaccacagcaacatcctgctgacctttgagaacaaggatgagaaccacctgcccctggtgccccccaacaagctggaggagatgaagaggcgcatcaacaacatcctggagaagaagttcatcctgctgctggagttccactactacaagtgcctggtgctgggcctggtggatgaggtgaagagcaagctggacatctggaacatcaagtatggcagccgggagagcgtggagctgctgctggaggactggcacaagttcatcgaggagaaggagttcctggcccggctggacaccagcttccagaagtgtggggagatctacaagaacctggccggggagtgccagaacatcaacaagcagtacatgatggtgaagagtgatgtgtgcatgtacaggaagaacatctacaacgtgaagagcaccctgcagaaggtgctggcctgctgggccacctacgtggagaacctgcggctgctgcgggcctgctttgaggagaccaagaaggaggagatcaaggaggtgccctttgagaccctggcccagtggaacctggagcacgccaccctgaatgaagctggcaacttcctggtggaggtgtccaatgatgtggtgggcagcagcatcagcaaggagctgcggcggctgaacaagcgctggaggaagctggtgtccaagacccagctggagatgaacctgcccctgatgatcaagaagcaggaccagcccacctttgacaacagcggcaacatcctgagcaaggaggagaaggccaccgtggagttcagcacagacatgtctgtggagctgcctgagaactacaaccagaacatcaaggccggggagaagcatgagaaggaaaatgaggagttcaccggccagctgaaggtggccaaggatgtggagaagctgattggccaggtggagatctgggaggccgaggccaagtctgtgctggaccaggatgatgtggacacctccatggaggagagcctgaagcacctgattgccaagggctccatgtttgatgagctgatggcccggtctgaggacatgctgcagatggacatccagaacatcagcagccaggagagcttccagcacgtgctgaccaccggcctgcaggccaagatccaggaggccaaggagaaggtgcagatcaacgtggtgaagctgattgctgccctgaagaacctgacagatgtgtccccagacctggacatccggctgaagatggaggagagccagaaggagctggagagctacatgatgagggcccagcagctgctgggccagcgggagagccctggagagctgatcagcaagcacaaggaggccctgatcatcagcaacaccaagagcctggccaagtacctgaaggctgtggaggagctgaagaacaacgtgacagaggacatcaagatgagcctggaggagaagagcagagatgtgtgtgccaagtgggagagcctgcaccacgagctgagcctgtatgtgcagcagctgaagattgacatcgagaagggcaagctgagtgacaacatcctgaagctggagaagcagatcaacaaggagaagaagctgatccggcggggccgcaccaagggcctcatcaaggagcacgaggcctgcttcagcgaggagggctgcctgtaccagctgaaccaccacatggaggtgctgcgggagctgtgtgaggagctgcccagccagaagagccagcaggaggtgaagaggctgctgaaggactatgagcagaagattgaaaggctgctgaagtgtgccagcgagatccacatgaccctgcagcccacagctgggggcaccagcaagaatgaaggcaccatcaccaccagcgagaacagaggaggagacccccacagcgaggccccctttgccaagagtgacaaccagcccagcacagagaaggccatggagcccaccatgaagttcagcctggcctctgtgctgcggcccctgcaggaggagagcatcatggagaaggactacagcgccagcatcaacagcctgctggagagatatgacacctacagagacatcctggagcaccacctgcagaacaacaagttccgcatcaccagtgacttcagcagtgaagaagatagaagcagcagctgcctgcaggccaagctgacagacctgcaggtgatcaagaatgaaacagatgcccgctggaaggagtttgagatcatcagcctgaagctggagaaccacgtgaatgacatcaagaagccctttgtgatcaaggagcgggacaccctgaaggagcgggagcgggagctgcagatgaccctgaacaccaggatggagagcctggagacagccctgcggctggtgctgcctgtggagaaggccagcctgctgctgtgtggcagtgacctgcccctgcacaagatggccatccagggcttccacctgattgatgctgaccgcatctaccagcacctgaggaacatccaggacagcatcgccaagcagatcgagatctgcaaccggctggaggagcccggcaactttgtgctgaaggagctgcacccctttgacctgcacgccatgcagaacatcatcctgaagtacaagacccagtttgagggcatgaaccaccgggtgcagaggtctgaggacaccctgaaggccctggaggacttcctggccagcctgaggacagccaagctgtctgctgagcctgtgacagacctgagcgccagtgacacccaggtggcccaggagaacaccctgactgtgaagaacaaggagggggagatccacctgatgaaggacaaggccaagcacctggacaagtgcctgaagatgctggacatgtccttcaaggatgctgagagaggagatgacaccagctgtgagaacctgctggatgccttcagcatcaagctgtctgagacccacggctacggcgtgcaggaggagttcacagaggagaacaagctgctggaggcctgcatcttcaagaacaatgagctgctgaagaacatccaggatgtgcagagccagatcagcaagattggcctgaaggaccccaccgtgcctgctgtgaagcacaggaagaagagcctcatccggctggacaaggtgctggatgaatatgaggaggagaagaggcacctgcaggagatggccaacagcctgccccacttcaaggatggccgggagaagacagtgaaccagcagtgccagaacacagtggtgctgtgggagaacaccaaggccctggtgacagaatgtctggagcagtgtggccgggtgctggagctgctgaagcagtaccagaacttcaagagcatcctgaccaccctcatccagaaggaggagagcgtcatcagcctgcaggccagctacatgggcaaggagaacctgaagaagagaattgctgagattgaaattgtgaaggaggagttcaatgagcacctggaggtggtggacaagatcaaccaggtgtgcaagaacctgcagttctacctgaacaagatgaagacctttgaggagcccccatttgagaaggaggccaacatcatcgtggaccgctggctggacatcaatgagaagacagaggactactatgagaacctgggccgggccctggccctgtgggacaagctgttcaacctgaagaatgtgattgatgagtggacagagaaggccctgcagaagatggagctgcaccagctgacagaagaagatcgggagcggctgaaggaggagctgcaggtgcatgagcagaagaccagcgagttcagccggcgggtggccgagatccagttcctgctgcagagcagcgagatccccctggagctgcaggtgatggagagcagcatcctgaacaagatggagcacgtgcagaagtgcctgactggagagagcaactgccacgccctgagcggcagcacagctgagctgcgggaggacctggaccaggccaagacccagatcggcatgacagagagcctgctgaaggccctgagccccagcgacagcctggagatcttcaccaagctggaggagatccagcagcagatcctgcagcagaagcacagcatgatcctgctggagaaccagatcggctgcctgaccccagagctgtctgagctgaagaagcagtatgagagcgtgtctgacctcttcaacaccaagaagtctgtgctgcaggaccacttcagcaagctgctgaatgaccagtgcaagaacttcaatgactggttcagcaacatcaaggtgaacctgaaggagtgctttgagagcagcgagaccaagaagtctgtggagcagaagctgcagaagctgagtgacttcctgaccctggagggcaggaacagcaagatcaagcaggtggacagcgtgctgaagcacgtgaagaagcacctgcccaaggcccacgtgaaggagctgatctcctggctggtgggccaggagtttgagctggagaagatggagagcatctgccaggcccgggccaaggagctggaggacagcctgcagcagctgctgcggctgcaggatgaccacaggaacctgaggaagtggctgaccaaccaggaggagaagtggaagggcatggaggagcccggggagaagacagagctgttctgccaggccctggccaggaagcgggagcagtttgagagcgtggcccagctgaacaacagcctgaaggagtatggcttcacagaggaggaggagatcatcatggaggccacctgcctgatggaccgctaccagaccctgctgcggcagctgtctgaaattgaggaggaggacaagctgctgcccacagaggaccagagcttcaatgacctggcccatgatgtgatccactggatcaaggagatcaaggagagcctgatggtgctgaacagcagcgagggcaagatgcccctggaggagcgcatccagaagatcaaggagatcatcctgctgaagccagaaggagatgccagaattgagaccatcatgaagcaggccgagagcagcgaggcccccctggtgcagaagaccctgacagacatcagcaaccagtgggacaacaccctgcacctggccagcacctacctgagccaccaggagaagctgctgctggagggggagaagtacctgcagagcaaggaggacctgcggctgatgctgattgagctgaagaagaagcaggaggccggctttgccctgcagcacggcctgcaggagaagaaggcccagctgaagatctacaagaagttcctgaagaaggcccaggacctgaccagcctgctgaaggagctgaagagccagggcaactacctgctggagtgcaccaagaaccccagcttcagcgaggagccctggctggagatcaagcacctgcacgagagcctgctgcagcagctgcaggacagcgtgcagaacctggatggccacgtgcgggagcatgacagctaccaggtgtgtgtgacagacctgaacaccaccctggacaacttcagcaaggagtttgtgtccttcagtgacaagcctgtggaccagattgctgtggaggagaagctgcagaagctgcaggagctggagaaccggctgagcctgcaggacggcaccctgaagaagatcctggccctggccaagtctgtgaagcagaacaccagctctgtgggccagaagatcatcaaggatgacatcaagagcctgcagtgcaagcagaaggacctggagaaccggctggccagcgccaagcaggagatggagtgctgcctgaacagcatcctgaagagcaagaggagcacagagaagaagggcaagttcaccctgcccggccgggagaagcaggccaccagtgatgtgcaggagagcacccaggagagcgctgctgtggagaagctggaggaggactgggagatcaacaaggacagcgctgtggagatggccatgagcaagcagctgagcctgaatgcccaggagagcatgaagaacacagaagatgagaggaaggtgaatgagctgcagaaccagcccctggagctggacaccatgctgagaaatgagcagctggaggagattgagaagctgtacacccagctggaggccaagaaggccgccatcaagcccctggagcagacagaatgtctgaacaagacagagaccggggccctggtgctgcacaacatcggctacagcgcccagcacctggacaacctgctgcaggccctgatcaccctgaagaagaacaaggagagccagtactgtgtgctgcgggacttccaggagtacctggccgctgtggagagctccatgaaggccctgctgacagacaaggagagcctgaaggtgggccccctggacagcgtgacctacctggacaagatcaagaagttcatcgccagcattgagaaggagaaggacagcctgggcaacctgaagatcaagtgggagaacctgagcaaccacgtgacagacatggacaagaagctgctggagagccagatcaagcagctggagcacggctgggagcaggtggagcagcagatccagaagaagtacagccagcaggtggtggagtatgatgagttcaccaccctgatgaacaaggtgcaggacacagagatcagcctgcagcagcagcagcagcacctgcagctgcggctgaagagccctgaggagcgggccggcaaccagagcatgattgccctgaccacagacctgcaggccaccaagcacggcttctctgtgctgaagggccaggccgagctgcagatgaagaggatctggggcgagaaggagaagaagaacctggaggatggcatcaacaacctgaagaagcagtgggagaccctggagcccctgcacctggaggccgagaaccagatcaagaagtgtgacatccggaacaagatgaaggagaccatcctgtgggccaagaacctgctgggggagctgaaccccagcatccccctgctgcctgatgacatcctgagccagatcaggaagtgcaaggtgacccatgatggcatcctggcccggcagcagagcgtggagagcctggccgaggaggtgaaggacaaggtgcccagcctgaccacctatgagggcagtgacctgaacaacaccctggaggacctgaggaaccagtaccagatgctggtgctgaagagcacccagaggagccagcagctggagttcaagctggaggagaggagcaacttctttgccatcatcaggaagttccagctgatggtgcaggagagcgagaccctcatcatcccccgggtggagacagctgccacagaggccgagctgaagcaccaccacgtgaccctggaggccagccagaaggagctgcaggagattgattctggcatcagcacccacctgcaggagctgaccaacatctatgaggagctgaatgtgtttgagcggctcttcctggaggaccagctgaagaacctgaagatccgcaccaaccgcatccagcgcttcatccagaacacctgcaatgaggtggagcacaagatcaagttctgccggcagttccacgagaagaccagcgccctgcaggaggaggccgacagcatccagagaaatgagctgctgctgaaccaggaggtgaacaagggcgtgaaggaggagatctacaacctgaaggaccggctgacagccatcaagtgctgcatcctgcaggtgctgaagctgaagaaggtgtttgactacatcggcctgaactgggacttcagccagctggaccagctgcagacccaggtgtttgagaaggagaaggagctggaggagaagatcaagcagctggacacctttgaggaggagcacggcaagtaccaggccctgctgagcaagatgagggccatcgacctgcagatcaagaagatgacagaggtggtgctgaaggccccagacagcagccctgagagccggcggctgaatgcccagatcctgagccagagaattgagaaggccaagtgcctgtgtgatgagatcatcaagaagctgaatgaaaacaagacctttgatgacagcttcaaggagaaggagatcctgcagatcaagctgaatgcagaagaaaatgacaagctgtacaaggtgctgcagaacatggtgctggagctgagccccaaggagctggatgagaagaactgccaggacaagctggagaccagcctgcacgtgctgaaccagatcaagagccagctgcagcagcccctgctgatcaacctggagatcaagcacatccagaatgagaaggacaactgtgaggccttccaggagcaggtgtgggccgagatgtgcagcatcaaggctgtgacagccatcgagaagcagcgggaggagaacagcagcgaggccagtgatgtggagaccaagctgcgggagtttgaggacctgcagatgcagctgaacaccagcattgacctgcggaccaacgtgctgaatgatgcctatgagaacctgacccgctacaaggaggccgtgaccagggctgtggagagcatcaccagcctggaggccatcatcatcccctacagagtggatgtgggcaaccctgaggagagcctggagatgcccctgaggaagcaggaggagctggagagcacagtggcccacatccaggacctgacagagaagctgggcatgatcagcagccctgaggccaagctgcagctgcagtacaccctgcaggagctggtgtccaagaacagcgccatgaaggaggccttcaaggcccaggagacagaggccgagcgctacctggagaactacaagtgctacaggaagatggaggaggacatctacaccaacctgagcaagatggagaccgtgctgggccagagcatgagcagcctgcccctgagctaccgggaggccctggagcggctggagcagagcaaggccctggtgagcaacctgatcagcaccaaggaggagctgatgaagctgcggcagatcctgcggctgctgcggctgcgctgcacagaaaatgatggcatctgcctgctgaagatcgtgtctgccctgtgggagaagtggctgagcctgctggaggccgccaaggagtgggagatgtggtgtgaggagctgaagcaggagtggaagtttgtgtctgaggagattgaaagagaggccatcatcctggacaacctgcaggaggagctgcctgagatcagcaagaccaaggaggccgccaccacagaggagctgtctgagctgctggactgcctgtgccagtatggagaaaatgtggagaagcagcagctgctgctgaccctgctgctgcagaggatccgcagcatccagaatgtgcctgagagcagtggagctgtggagaccgtgcctgccttccaggagatcacctccatgaaggagcgctgcaacaagctgctgcagaaggtgcagaagaacaaggagctggtgcagacagagatccaggagcggcacagcttcaccaaggagatcatcgccctgaagaacttcttccagcagaccaccaccagcttccagaacatggccttccaggaccaccctgagaagtctgagcagtttgaggagctgcagagcatcctgaagaagggcaagctgacctttgagaacatcatggagaagctgcgcatcaagtacagcgagatgtacaccatcgtgcctgctgagattgagagccaggtggaggagtgcaggaaggccctggaggacattgatgagaagatcagcaatgaggtgctgaagagcagccccagctatgccatgaggaggaagattgaggagatcaacaacggcctgcacaacgtggagaagatgctgcagcagaagagcaagaacatcgagaaggcccaggagatccagaagaagatgtgggatgagctggacctgtggcacagcaagctgaatgagctggacagcgaggtgcaggacatcgtggagcaggaccccggccaggcccaggagtggatggacaacctgatgatccccttccagcagtaccagcaggtgtcccagagagctgagtgcaggaccagccagctgaacaaggccaccgtgaagatggaggagtacagcgacctgctgaagagcacagaggcctggattgagaacaccagccacctgctggccaacccagctgactatgacagcctgcggaccctgagccaccacgccagcacagtgcagatggccctggaggacagcgagcagaagcacaacctgctgcacagcatcttcatggacctggaggacctgagcatcatctttgaaacagatgagctgacccagagcatccaggagctgagcaaccaggtgacagccctgcagcagaagatcatggagagcctgccccagatccagaggatggctgatgatgtggtggccattgaaagtgaggtgaagtccatggagaagagggtgtccaagatcaagaccatcctgctgagcaaggagatctttgacttcagccctgaggagcacctgaagcatggagaggtgatcctggagaacatccggcccatgaagaagaccatcgccgagatcgtgtcctaccaggtggagctgcggctgccccagacaggcatgaagcccctgcctgtgttccagaggaccaaccagctgctgcaggacatcaagctgctggagaatgtgacccaggagcagaatgagctgctgaaggtggtgatcaagcagaccaatgagtgggatgaggagattgagaacctgaagcagatcctgaacaactacagcgcccagttcagcctggagcacatgagcccagaccaggccgacaagctgccccagctgcagggcgagattgaaagaatggagaagcagatcctgagcctgaaccagaggaaggaggacctgctggtggacctgaaggccaccgtgctgaacctgcaccagcacctgaagcaggagcaggagggcgtggagcgggaccggctgcctgctgtgaccagcgaggagggcggcgtggccgagagagatgccagcgagaggaagctgaacagaagaggctccatgagctacctggccgctgtggaggaggaggtggaggagagctctgtgaagagtgacaatggagatgagaaggccgagcccagcccccagagctggagcagcctgtggaagcatgacaaggacatggaggaggaccgggccagcagcagcagcggcaccatcgtgcaggaggcctacggcaagatcagcaccagtgacaacagcatggcccagatcctgaccccagacagcctgaacacagagcagggcccagaatgttccctgcggcccaaccagacagaggagggcaccaccccacccattgaagctgacaccctggacagcagtgatgcccagggcggcctggagccccgggtggagaagaccaggcctgagcccacagaggtgctgcacgcctgcaagacccaggtggccgagctggagctgtggctgcagcaggccaacgtggccgtggagcctgagaccctgaatgctgacatgcagcaggtgctggagcagcagctggtgggctgccaggccatgctgacagaaattgagcacaaggtggccttcctgctggagacctgcaaggaccagggcctgggggacaatggagccacccagcacgaggccgaggccctgagcctgaagctgaagacagtgaagtgcaacctggagaaggtgcagatgatgctgcaggagaagcacagcgaggaccagcaccccaccatcctgaagaagagcagcgagcctgagcaccaggaggccctgcagcctgtgaacctgtctgagctggagagcatcgtgacagagcggccccagttcagccggcagaaggacttccagcagcagcaggtgctggagctgaagcccatggagcagaaggacttcatcaagttcatcgagttcaatgccaagaagatgtggccccagtactgccagcacgacaatgacaccacccaggagagcagcgccagcaaccaggccagcagcccagaaaatgatgtgcctgacagcatcctgagcccccagggccagaatggagacaagtggcagtacctgcaccacgagctgagcagcaagatcaagctgcccctgccccagctggtggagccccaggtgtccaccaacatgggcatcctgcccagcgtgaccatgtacaacttccgctaccccaccacagaggagctgaagacctacaccacccagctggaggacctgcggcaggaggccagcaacctgcagacccaggagaacatgacagaggaggcctacatcaacctggacaagaagctgtttgagctgttcctgaccctgagccagtgcctgagctctgtggaggagatgctggagatgccccggctgtacagagaagatggcagcggccagcaggtgcactatgagaccctggccctggagctgaagaagctgtacctggccctgagtgacaagaagggggacctgctgaaggccatgacctggccaggagagaacaccaacctgctgctggagtgctttgacaacctgcaggtgtgcctggagcacacccaggccgctgctgtgtgccgcagcaagagcctgaaggccggcctggactacaacagaagctaccagaatgagatcaagaggctgtaccaccagctgatcaagagcaagaccagcctgcagcagagcctgaatgagatcagcggccagagcgtggccgagcagctgcagaaggcagatgcctacacagtggagctggagaatgctgagagccgggtggccaagctgagagatgaaggagagcggctgcacctgccctatgccctgctgcaggaggtgtacaagctggaggatgtgctggacagcatgtggggcatgctgcgggcccgctacacagagctgagcagcccctttgtgacagagagccagcaggatgccctgctgcagggcatggtggagctggtgaagattggcaaggagaagctggcccacggccacctgaagcagaccaagagcaaggtggccctgcaggcccagatcgagaaccacaaggtgttcttccagaagctggtggccgacatgctgctgatccaggcctacagcgccaagatcctgcccagcctgctgcagaaccgggagaccttctgggccgagcaggtgacagaggtgaagatcctggaggagaagagccggcagtgtggcatgaagctgcagagcctgctgcagaagtgggaggagtttgatgaaaattatgccagcctggagaaggacctggagatcctgatcagcaccctgcccagcgtgtccctggtggaggagacagaggagcggctggtggagcgcatctccttctaccagcagatcaagaggaacatcggcggcaagcacgcccggctgtaccagaccctgaatgaaggcaagcagctggtggcctctgtgtcctgcccagagctggagggccagatcgccaagctggaggagcagtggctgagcctgaacaagaagattgaccacgagctgcaccggctgcaggccctgctgaagcacctgctgagctacaacagagacagcgaccagctgaccaagtggctggagagcagccagcacaccctgaactactggaaggagcagagcctgaatgtgtcccaggacctggacaccatccgcagcaacatcaacaacttctttgagttcagcaaggaggtggatgagaagagcagcctgaagacagctgtgatcagcatcggcaaccagctgctgcacctgaaggagacagacacagccaccctgcgggccagcctggcccagtttgagcagaagtggaccatgctgatcacccagctgcctgacatccaggagaagctgcaccagctgcagatggagaagctgcccagcaggaaggccatcacagagatgatctcctggatgaacaacgtggagcaccagaccagtgatgaggacagcgtgcacagccccagcagcgccagccaggtgaagcacctgctgcagaagcacaaggagttcaggatggagatggactacaagcagtggatcgtggactttgtgaaccagagcctgctgcagctgagcacctgtgatgtggagagcaagagatatgaaagaacagaatttgctgagcacctgggggagatgaaccggcagtggcaccgggtgcacggcatgctgaacaggaagatccagcacctggagcagctgctggagagcatcacagaaagtgagaacaagatccagatcctgaacaactggctggaggcccaggaggagcggctgaagaccctgcagaagccagagagcgtcatctctgtgcagaagctgctgctggactgccaggacatcgagaaccagctggccatcaagagcaaggccctggatgagctgaagcagagctacctgaccctggagagcggggctgtgcccctgctggaggacacagccagcagaattgatgagctgttccagaagaggagctctgtgctgacccaggtgaaccagctgaagacctccatgcagagcgtgctgcaggagtggaagatctatgaccagctgtatgatgaggtgaacatgatgaccatccgcttctggtactgcatggagcacagcaagcctgtggtgctgagcctggagaccctgcgctgccaggtggagaacctgcagagcctgcaggatgaagctgagagcagcgagggctcctgggagaagctgcaggaggtgattggcaagctgaagggcctgtgccccagcgtggccgagatcatcgaggagaagtgccagaacacccacaagcgctggacccaggtgaaccaggccatcgctgaccagctgcagaaggcccagagcctgctgcagctgtggaaggcctacagcaatgcccacggggaggccgccgcccggctgaagcagcaggaggccaagttccagcagctggccaacatctccatgagcggcaacaacctggccgagatcctgcccccagccctgcaggacatcaaggagctgcagcatgatgtgcagaagaccaaggaggccttcctgcagaacagctctgtgctggaccggctgccccagcctgctgagagcagcacccacatgctgctgcccggccccctgcacagcctgcagagagctgcctacctggagaagatgctgctggtgaaggccaatgaatttgaatttgtgctgagccagttcaaggactttggagtgcggctggagagcctgaagggcctcatcatgcatgaggaggagaacctggaccggctgcaccagcaggagaaggaaaatccagacagcttcctgaaccacgtgctggccctgacagcccagagcccagacatcgagcacctgaatgaggtgtccctgaagctgcccctgagtgatgtggccgtgaagaccctgcagaacatgaaccggcagtggatccgggccacagccacagccctggagcgctgcagcgagctgcagggcatcggcctgaatgagaagttcctgtactgctgtgagaagtggatccagctgctggagaagattgaggaggccctgaaggtggatgtggccaacagcctgcctgagctgctggagcagcagaagacctacaagatgctggaggccgaggtgtccatcaaccagaccatcgctgacagctatgtgacccagagcctgcagctgctggacaccacagaaattgaaaatagacctgagttcatcacagagttcagcaagctgacagaccgctggcagaatgctgtgcagggcgtgcggcagaggaaaggagatgtggatggcctggtgcggcagtggcaggacttcaccacctctgtggagaacctcttccgcttcctgacagacaccagccacctgctgtctgctgtgaagggccaggagcgcttcagcctgtaccagaccaggagcctcatccacgagctgaagaacaaggagatccacttccagaggaggaggaccacctgtgccctgaccctggaggccggggagaagctgctgctgaccacagacctgaagaccaaggagagcgtgggccgccgcatcagccagctgcaggacagctggaaggacatggagccccagctggccgagatgatcaagcagttccagagcacagtggagacctgggaccagtgtgagaagaagatcaaggagctgaagagccggctgcaggtgctgaaggcccagagcgaggaccccctgcctgagctgcacgaggacctgcacaatgagaaggagctgatcaaggagctggagcagagcctggcctcctggacccagaacctgaaggagctgcagaccatgaaggctgacctgaccaggcatgtgctggtggaggatgtgatggtgctgaaggagcagatcgagcacctgcaccggcagtgggaggacctgtgcctgcgggtggccatcaggaagcaggagattgaagatcggctgaacacctgggtggtgttcaatgagaagaacaaggagctgtgtgcctggctggtgcagatggagaacaaggtgctgcagacagctgacatcagcattgaggagatgattgagaagctgcagaaggactgcatggaggagatcaacctcttcagcgagaacaagctgcagctgaagcagatgggagaccagctgatcaaggccagcaacaagagcagagctgctgagattgatgacaagctgaacaagatcaatgaccgctggcagcacctgtttgatgtgattggcagccgggtgaagaagctgaaggagacctttgccttcatccagcagctggacaagaacatgagcaacctgcggacctggctggccagaattgaaagtgagctgagcaagcctgtggtgtatgatgtgtgtgatgaccaggagatccagaagaggctggccgagcagcaggacctgcagagggacatcgagcagcacagcgctggggtggagagcgtcttcaacatctgtgatgtgctgctgcatgacagtgatgcctgtgccaatgaaacagaatgtgacagcatccagcagaccaccaggagcctggaccggcgctggaggaacatctgtgccatgtccatggagaggaggatgaagattgaggagacctggaggctgtggcagaagttcctggatgactacagcagatttgaggactggctgaagtctgctgagaggacagctgcctgccccaacagcagcgaggtgctgtacaccagcgccaaggaggagctgaagagatttgaggccttccagaggcagatccacgagcggctgacccagctggagctgatcaacaagcagtacagaaggctggcccgggagaacagaacagacacagccagccggctgaagcagatggtgcatgagggcaaccagcgctgggacaacctgcagaggagagtgacagctgtgctgcggcggctgcggcacttcaccaaccagcgggaggagtttgagggcacccgggagagcatcctggtgtggctgacagagatggacctgcagctgaccaacgtggagcacttcagcgagagtgatgctgatgacaagatgaggcagctgaatggcttccagcaggagatcaccctgaacaccaacaagattgaccagctgattgtgtttggagagcagctgatccagaagtctgagcccctggatgctgtgctgattgaagatgagctggaggagctgcaccgctactgccaggaggtgtttggccgggtgagccgcttccaccggcggctgaccagctgcaccccaggcctggaggatgagaaggaggcctctgaaaatgaaacagacatggaggacccccgggagatccagacagacagctggaggaagagaggagagagcgaggagcccagcagcccccagagcctgtgccacctggtggcccctggccacgagaggagcggctgtgagacccctgtgtctgtggacagcatccccctggagtgggaccacactggagatgtgggcggcagcagcagccatgaagaagatgaggagggcccctactacagcgccctgagcggcaagagcatcagtgatggccacagctggcacgtgcctgacagccccagctgcccagagcaccactacaagcagatggagggggacagaaatgtgccccctgtgcccccagccagcagcaccccctacaagccaccctacggcaagctgctgctgcccccaggcacagatggcggcaaggagggcccccgggtgctgaatggaaacccccagcaggaggatggcggcctggccggcatcacagagcagcagagcggggcctttgaccgctgggagatgatccaggcccaggagctgcacaacaagctgaagatcaagcagaacctgcagcagctgaacagcgacatcagcgccatcaccacctggctgaagaagacagaggccgagctggagatgctgaagatggccaagccacccagcgacatccaggagattgagctgcgggtgaagaggctgcaggagatcctgaaggcctttgacacctacaaggccctggtggtgtctgtgaatgtgagcagcaaggagttcctgcagacagagagccctgagagcacagagctgcagagccggctgcggcagctgagcctgctgtgggaggccgcccagggcgctgtggacagctggaggggcggcctgcggcagagcctgatgcagtgccaggacttccaccagctgagccagaacctgctgctgtggctggccagcgccaagaacagacggcagaaggcccacgtgacagaccccaaggctgacccccgggccctgctggagtgcagaagagagctgatgcagctggagaaggagctggtggagcggcagccccaggtggacatgctgcaggagatcagcaacagcctgctgatcaagggccatggagaggactgcatcgaggccgaggagaaggtgcacgtgattgagaagaagctgaagcagctgcgggagcaggtgtcccaggacctgatggccctgcagggcacccagaacccagccagccccctgcccagctttgatgaggtggacagcggggaccagcccccagccacctctgtgcctgccccccgggccaagcagttccgggctgtgaggaccacagaaggagaggaggagacagagagccgggtgcccggcagcacccggccccagaggagcttcctgagccgggtggtgcgggccgccctgcccctgcagctgctgctgctgctgctgctgctgctggcctgcctgctgcccagcagcgaggaggactacagctgcacccaggccaacaactttgcccgctccttctaccccatgctgcgctacaccaacggccccccacccacctag

SEQ ID NO: 185016 - DNA, 9813 bp, Artificial Sequence
  derived and/or modified sequence
atggagaagctgcgcatcaagtacagcgagatgtacaccatcgtgcctgctgagattgagagccaggtggaggagtgcaggaaggccctggaggacattgatgagaagatcagcaatgaggtgctgaagagcagccccagctatgccatgaggaggaagattgaggagatcaacaacggcctgcacaacgtggagaagatgctgcagcagaagagcaagaacatcgagaaggcccaggagatccagaagaagatgtgggatgagctggacctgtggcacagcaagctgaatgagctggacagcgaggtgcaggacatcgtggagcaggaccccggccaggcccaggagtggatggacaacctgatgatccccttccagcagtaccagcaggtgtcccagagagctgagtgcaggaccagccagctgaacaaggccaccgtgaagatggaggagtacagcgacctgctgaagagcacagaggcctggattgagaacaccagccacctgctggccaacccagctgactatgacagcctgcggaccctgagccaccacgccagcacagtgcaggacagcaagtgcttccgcagcggcccccggcccaacatctacgtgtcctactacgtgaccgtcatccagatggccctggaggacagcgagcagaagcacaacctgctgcacagcatcttcatggacctggaggacctgagcatcatctttgaaacagatgagctgacccagagcatccaggagctgagcaaccaggtgacagccctgcagcagaagatcatggagagcctgccccagatccagaggatggctgatgatgtggtggccatcgagagcgaggtgaagtccatggagaagagggtgtccaagatcaagaccatcctgctgagcaaggagatctttgacttcagccctgaggagcacctgaagcacggggaggtgatcctggagaacatccggcccatgaagaagaccatcgccgagatcgtgtcctaccaggtggagctgcggctgccccagacaggcatgaagcccctgcccgtcttccagaggaccaaccagctgctgcaggacatcaagctgctggagaatgtgacccaggagcagaatgagctgctgaaggtggtgatcaagcagaccaatgagtgggatgaggagattgagaacctgaagcagatcctgaacaactacagcgcccagttcagcctggagcacatgagcccagaccaggccgacaagctgccccagctgcagggcgagattgaaagaatggagaagcagatcctgagcctgaaccagaggaaagaagacctgctggtggacctgaaggccaccgtgctgaacctgcaccagcacctgaagcaggagcaggagggcgtggagcgggaccggctgcctgctgtgaccagcgaggagggcggcgtggccgagagagatgccagcgagaggaagctgaacagaagaggctccatgagctacctggccgctgtggaggaggaggtggaggagagctctgtgaagagtgacaatggagatgagaaggccgagcccagcccccagagctggagcagcctgtggaagcatgacaaggacatggaggaggaccgggccagcagcagcagcggcaccatcgtgcaggaggcctacggcaagatcagcaccagtgacaacagcatggcccagatcctgaccccagacagcctgaacacagagcagggccctgagtgcagcctgcggcccaaccagacagaggagggcaccaccccacccatcgaggccgacaccctggacagcagtgatgcccagggcggcctggagccccgggtggagaagaccaggcctgagcccacagaggtgctgcacgcctgcaagacccaggtggccgagctggagctgtggctgcagcaggccaacgtggccgtggagcctgagaccctgaatgctgacatgcagcaggtgctggagcagcagctggtgggctgccaggccatgctgacagaaattgagcacaaggtggccttcctgctggagacctgcaaggaccagggcctgggggacaacggggccacccagcatgaagctgaggccctgagcctgaagctgaagacagtgaagtgcaacctggagaaggtgcagatgatgctgcaggagaagcacagcgaggaccagcaccccaccatcctgaagaagagcagcgagcctgagcaccaggaggccctgcagcctgtgaacctgtctgagctggagagcatcgtgacagagcggccccagttcagccggcagaaggacttccagcagcagcaggtgctggagctgaagcccatggagcagaaggacttcatcaagttcatcgagttcaatgccaagaagatgtggccccagtactgccagcacgacaatgacaccacccaggagagcagcgccagcaaccaggccagcagcccagaaaatgatgtgcctgacagcatcctgagcccccagggccagaatggagacaagtggcagtacctgcaccacgagctgagcagcaagatcaagctgcccctgccccagctggtggagccccaggtgtccaccaacatgggcatcctgcccagcgtgaccatgtacaacttccgctaccccaccacagaggagctgaagacctacaccacccagctggaggacctgcggcaggaggccagcaacctgcagacccaggagaacatgacagaggaggcctacatcaacctggacaagaagctgtttgagctgttcctgaccctgagccagtgcctgagctctgtggaggagatgctggagatgccccggctgtaccgggaggatggcagcggccagcaggtgcactatgagaccctggccctggagctgaagaagctgtacctggccctgagtgacaagaagggggacctgctgaaggccatgacctggccaggagagaacaccaacctgctgctggagtgctttgacaacctgcaggtgtgcctggagcacacccaggccgctgctgtgtgccgcagcaagagcctgaaggccggcctggactacaacagaagctaccagaatgagatcaagaggctgtaccaccagctgatcaagagcaagaccagcctgcagcagagcctgaatgagatcagcggccagagcgtggccgagcagctgcagaaggcagatgcctacacagtggagctggagaatgctgagagccgggtggccaagctgagagatgaaggagagcggctgcacctgccctatgccctgctgcaggaggtgtacaagctggaggatgtgctggacagcatgtggggcatgctgcgggcccgctacacagagctgagcagcccctttgtgacagagagccagcaggatgccctgctgcagggcatggtggagctggtgaagattggcaaggagaagctggcccacggccacctgaagcagaccaagagcaaggtggccctgcaggcccagatcgagaaccacaaggtgttcttccagaagctggtggccgacatgctgctgatccaggcctacagcgccaagatcctgcccagcctgctgcagaaccgggagaccttctgggccgagcaggtgacagaggtgaagatcctggaggagaagagccggcagtgtggcatgaagctgcagagcctgctgcagaagtgggaggagtttgatgagaactatgccagcctggagaaggacctggagatcctgatcagcaccctgcccagcgtgtccctggtggaggagacagaggagcggctggtggagcgcatctccttctaccagcagatcaagagaaatattggaggcaagcacgcccggctgtaccagaccctgaatgaaggcaagcagctggtggcctctgtgtcctgcccagagctggagggccagatcgccaagctggaggagcagtggctgagcctgaacaagaagattgaccacgagctgcaccggctgcaggccctgctgaagcacctgctgagctacaacagagacagcgaccagctgaccaagtggctggagagcagccagcacaccctgaactactggaaggagcagagcctgaatgtgtcccaggacctggacaccatccgcagcaacatcaacaacttctttgagttcagcaaggaggtggatgagaagagcagcctgaagacagctgtgatcagcatcggcaaccagctgctgcacctgaaggagacagacacagccaccctgcgggccagcctggcccagtttgagcagaagtggaccatgctgatcacccagctgcctgacatccaggagaagctgcaccagctgcagatggagaagctgcccagcaggaaggccatcacagagatgatctcctggatgaacaacgtggagcaccagaccagtgatgaagattctgtgcacagccccagcagcgccagccaggtgaagcacctgctgcagaagcacaaggagttcaggatggagatggactacaagcagtggatcgtggactttgtgaaccagagcctgctgcagctgagcacctgtgatgtggagagcaagagatatgaaagaacagaatttgctgagcacctgggggagatgaaccggcagtggcaccgggtgcacggcatgctgaacaggaagatccagcacctggagcagctgctggagagcatcacagaaagtgagaacaagatccagatcctgaacaactggctggaggcccaggaggagcggctgaagaccctgcagaagccagagagcgtcatctctgtgcagaagctgctgctggactgccaggacatcgagaaccagctggccatcaagagcaaggccctggatgagctgaagcagagctacctgaccctggagagcggggctgtgcccctgctggaggacacagccagcagaattgatgagctgttccagaagaggagctctgtgctgacccaggtgaaccagctgaagacctccatgcagagcgtgctgcaggagtggaagatctatgaccagctgtatgatgaggtgaacatgatgaccatccgcttctggtactgcatggagcacagcaagcctgtggtgctgagcctggagaccctgcgctgccaggtggagaacctgcagagcctgcaggatgaggccgagagcagcgagggctcctgggagaagctgcaggaggtgattggcaagctgaagggcctgtgccccagcgtggccgagatcatcgaggagaagtgccagaacacccacaagcgctggacccaggtgaaccaggccatcgctgaccagctgcagaaggcccagagcctgctgcagctgtggaaggcctacagcaatgcccatggagaggccgccgcccggctgaagcagcaggaggccaagttccagcagctggccaacatctccatgagcggcaacaacctggccgagatcctgcccccagccctgcaggacatcaaggagctgcagcatgatgtgcagaagaccaaggaggccttcctgcagaacagctctgtgctggaccggctgccccagcctgctgagagcagcacccacatgctgctgcccggccccctgcacagcctgcagagagctgcctacctggagaagatgctgctggtgaaggccaatgaatttgaatttgtgctgagccagttcaaggactttggagtgcggctggagagcctgaagggcctcatcatgcatgaggaggagaacctggaccggctgcaccagcaggagaaggagaacccagacagcttcctgaaccacgtgctggccctgacagcccagagcccagacatcgagcacctgaatgaggtgtccctgaagctgcccctgagtgatgtggccgtgaagaccctgcagaacatgaaccggcagtggatccgggccacagccacagccctggagcgctgcagcgagctgcagggcatcggcctgaatgagaagttcctgtactgctgtgagaagtggatccagctgctggagaagattgaggaggccctgaaggtggatgtggccaacagcctgcctgagctgctggagcagcagaagacctacaagatgctggaggccgaggtgtccatcaaccagaccatcgctgacagctatgtgacccagagcctgcagctgctggacaccacagaaattgagaacagacctgagttcatcacagagttcagcaagctgacagaccgctggcagaatgctgtgcagggcgtgcggcagaggaaaggagatgtggatggcctggtgcggcagtggcaggacttcaccacctctgtggagaacctcttccgcttcctgacagacaccagccacctgctgtctgctgtgaagggccaggagcgcttcagcctgtaccagaccaggagcctcatccacgagctgaagaacaaggagatccacttccagaggaggaggaccacctgtgccctgaccctggaggccggggagaagctgctgctgaccacagacctgaagaccaaggagagcgtgggccgccgcatcagccagctgcaggacagctggaaggacatggagccccagctggccgagatgatcaagcagttccagagcacagtggagacctgggaccagtgtgagaagaagatcaaggagctgaagagccggctgcaggtgctgaaggcccagagcgaggaccccctgcctgagctgcacgaggacctgcacaatgagaaggagctgatcaaggagctggagcagagcctggcctcctggacccagaacctgaaggagctgcagaccatgaaggctgacctgaccaggcatgtgctggtggaggatgtgatggtgctgaaggagcagatcgagcacctgcaccggcagtgggaggacctgtgcctgcgggtggccatcaggaagcaggagattgaggaccggctgaacacctgggtggtgttcaatgagaagaacaaggagctgtgtgcctggctggtgcagatggagaacaaggtgctgcagacagctgacatcagcattgaggagatgattgagaagctgcagaaggactgcatggaggagatcaacctcttcagcgagaacaagctgcagctgaagcagatgggagaccagctgatcaaggccagcaacaagagcagagctgctgagattgatgacaagctgaacaagatcaatgaccgctggcagcacctgtttgatgtgattggcagccgggtgaagaagctgaaggagacctttgccttcatccagcagctggacaagaacatgagcaacctgcggacctggctggcccgcatcgagagcgagctgagcaagcctgtggtgtatgatgtgtgtgatgaccaggagatccagaagaggctggccgagcagcaggacctgcagagggacatcgagcagcacagcgctggggtggagagcgtcttcaacatctgtgatgtgctgctgcatgacagtgatgcctgtgccaatgaaacagaatgtgacagcatccagcagaccaccaggagcctggaccggcgctggaggaacatctgtgccatgtccatggagaggaggatgaagattgaggagacctggaggctgtggcagaagttcctggatgactacagcagatttgaggactggctgaagtctgctgagaggacagctgcctgccccaacagcagcgaggtgctgtacaccagcgccaaggaggagctgaagagatttgaggccttccagaggcagatccacgagcggctgacccagctggagctgatcaacaagcagtaccgccgcctggccagagaaaatagaacagacacagccagccggctgaagcagatggtgcatgagggcaaccagcgctgggacaacctgcagaggagagtgacagctgtgctgcggcggctgcggcacttcaccaaccagcgggaggagtttgagggcacccgggagagcatcctggtgtggctgacagagatggacctgcagctgaccaacgtggagcacttcagcgagagtgatgctgatgacaagatgaggcagctgaatggcttccagcaggagatcaccctgaacaccaacaagattgaccagctgattgtgtttggagagcagctgatccagaagtctgagcccctggatgctgtgctgattgaagatgagctggaggagctgcaccgctactgccaggaggtgtttggccgggtgagccgcttccaccggcggctgaccagctgcaccccaggcctggaggatgagaaggaggcctctgaaaatgaaacagacatggaggacccccgggagatccagacagacagctggaggaagagaggagagagcgaggagcccagcagcccccagagcctgtgccacctggtggcccctggccacgagaggagcggctgtgagacccctgtgtctgtggacagcatccccctggagtgggaccacactggagatgtgggcggcagcagcagccatgaggaggatgaggagggcccctactacagcgccctgagcggcaagagcatcagtgatggccacagctggcacgtgcctgacagccccagctgcccagagcaccactacaagcagatggagggggacagaaatgtgccccctgtgcccccagccagcagcaccccctacaagccaccctacggcaagctgctgctgcccccaggcacagatggcggcaaggagggcccccgggtgctgaatggaaacccccagcaggaggatggcggcctggccggcatcacagagcagcagagcggggcctttgaccgctgggagatgatccaggcccaggagctgcacaacaagctgaagatcaagcagaacctgcagcagctgaacagcgacatcagcgccatcaccacctggctgaagaagacagaagctgagctggagatgctgaagatggccaagcccccaagtgacatccaggagattgagctgcgggtgaagaggctgcaggagatcctgaaggcctttgacacctacaaggccctggtggtgtctgtgaatgtgagcagcaaggagttcctgcagacagagagccctgagagcacagagctgcagagccggctgcggcagctgagcctgctgtgggaggccgcccagggcgctgtggacagctggaggggcggcctgcggcagagcctgatgcagtgccaggacttccaccagctgagccagaacctgctgctgtggctggccagcgccaagaacagacggcagaaggcccacgtgacagaccccaaggctgacccccgggccctgctggagtgccggcgggagctgatgcagctggagaaggagctggtggagcggcagccccaggtggacatgctgcaggagatcagcaacagcctgctgatcaagggccacggggaggactgcattgaagctgaggagaaggtgcacgtgattgagaagaagctgaagcagctgcgggagcaggtgtcccaggacctgatggccctgcagggcacccagaacccagccagccccctgcccagctttgatgaggtggacagcggggaccagcccccagccacctctgtgcctgccccccgggccaagcagttccgggctgtgaggaccacagaaggagaggaggagacagagagccgggtgcccggcagcacccggccccagaggagcttcctgagccgggtggtgcgggccgccctgcccctgcagctgctgctgctgctgctgctgctgctggcctgcctgctgcccagcagcgaggaggactacagctgcacccaggccaacaactttgcccggagcttctaccccatgctgcgctacaccaatggacctccacccacctag

SEQ ID NO: 185017 - DNA, 2007 bp, Artificial Sequence
  derived and/or modified sequence
atggtgcatgagggcaaccagcgctgggacaacctgcagaggagagtgacagctgtgctgcggcggctgcggcacttcaccaaccagcgggaggagtttgagggcacccgggagagcatcctggtgtggctgacagagatggacctgcagctgaccaacgtggagcacttcagcgagagtgatgctgatgacaagatgaggcagctgaatggcttccagcaggagatcaccctgaacaccaacaagattgaccagctgattgtgtttggagagcagctgatccagaagtctgagcccctggatgctgtgctgattgaagatgagctggaggagctgcaccgctactgccaggaggtgtttggccgggtgagccgcttccaccggcggctgaccagctgcaccccaggcctggaggatgagaaggaggcctctgaaaatgaaacagacatggaggacccccgggagatccagacagacagctggaggaagagaggagagagcgaggagcccagcagcccccagagcctgtgccacctggtggcccctggccacgagaggagcggctgtgagacccctgtgtctgtggacagcatccccctggagtgggaccacactggagatgtgggcggcagcagcagccatgaggaggatgaggagggcccctactacagcgccctgagcggcaagagcatcagtgatggccacagctggcacgtgcctgacagccccagctgcccagagcaccactacaagcagatggagggggacagaaatgtgccccctgtgcccccagccagcagcaccccctacaagccaccctacggcaagctgctgctgcccccaggcacagatggcggcaaggagggcccccgggtgctgaatggaaacccccagcaggaggatggcggcctggccggcatcacagagcagcagagcggggcctttgaccgctgggagatgatccaggcccaggagctgcacaacaagctgaagatcaagcagaacctgcagcagctgaacagcgacatcagcgccatcaccacctggctgaagaagacagaagctgagctggagatgctgaagatggccaagcccccaagtgacatccaggagattgagctgcgggtgaagaggctgcaggagatcctgaaggcctttgacacctacaaggccctggtggtgtctgtgaatgtgagcagcaaggagttcctgcagacagagagccctgagagcacagagctgcagagccggctgcggcagctgagcctgctgtgggaggccgcccagggcgctgtggacagctggaggggcggcctgcggcagagcctgatgcagtgccaggacttccaccagctgagccagaacctgctgctgtggctggccagcgccaagaacagacggcagaaggcccacgtgacagaccccaaggctgacccccgggccctgctggagtgccggcgggagctgatgcagctggagaaggagctggtggagcggcagccccaggtggacatgctgcaggagatcagcaacagcctgctgatcaagggccacggggaggactgcattgaagctgaggagaaggtgcacgtgattgagaagaagctgaagcagctgcgggagcaggtgtcccaggacctgatggccctgcagggcacccagaacccagccagccccctgcccagctttgatgaggtggacagcggggaccagcccccagccacctctgtgcctgccccccgggccaagcagttccgggctgtgaggaccacagaaggagaggaggagacagagagccgggtgcccggcagcacccggccccagaggagcttcctgagccgggtggtgcgggccgccctgcccctgcagctgctgctgctgctgctgctgctgctggcctgcctgctgcccagcagcgaggaggactacagctgcacccaggccaacaactttgcccggagcttctaccccatgctgcgctacaccaatggacctccacccacctag

SEQ ID NO: 185018 - DNA, 2292 bp, Artificial Sequence
  derived and/or modified sequence
atgtccatggagaggaggatgaagattgaggagacctggaggctgtggcagaagttcctggatgactacagcagatttgaggactggctgaagtctgctgagaggacagctgcctgccccaacagcagcgaggtgctgtacaccagcgccaaggaggagctgaagagatttgaggccttccagaggcagatccacgagcggctgacccagctggagctgatcaacaagcagtacagaaggctggcccgggagaacagaacagacacagccagccggctgaagcagatggtgcatgagggcaaccagcgctgggacaacctgcagaggagagtgacagctgtgctgcggcggctgcggcacttcaccaaccagcgggaggagtttgagggcacccgggagagcatcctggtgtggctgacagagatggacctgcagctgaccaacgtggagcacttcagcgagagtgatgctgatgacaagatgaggcagctgaatggcttccagcaggagatcaccctgaacaccaacaagattgaccagctgattgtgtttggagagcagctgatccagaagtctgagcccctggatgctgtgctgattgaagatgagctggaggagctgcaccgctactgccaggaggtgtttggccgggtgagccgcttccaccggcggctgaccagctgcaccccaggcctggaggatgagaaggaggcctctgaaaatgaaacagacatggaggacccccgggagatccagacagacagctggaggaagagaggagagagcgaggagcccagcagcccccagagcctgtgccacctggtggcccctggccacgagaggagcggctgtgagacccctgtgtctgtggacagcatccccctggagtgggaccacactggagatgtgggcggcagcagcagccatgaagaagatgaggagggcccctactacagcgccctgagcggcaagagcatcagtgatggccacagctggcacgtgcctgacagccccagctgcccagagcaccactacaagcagatggagggggacagaaatgtgccccctgtgcccccagccagcagcaccccctacaagccaccctacggcaagctgctgctgcccccaggcacagatggcggcaaggagggcccccgggtgctgaatggaaacccccagcaggaggatggcggcctggccggcatcacagagcagcagagcggggcctttgaccgctgggagatgatccaggcccaggagctgcacaacaagctgaagatcaagcagaacctgcagcagctgaacagcgacatcagcgccatcaccacctggctgaagaagacagaggccgagctggagatgctgaagatggccaagccacccagcgacatccaggagattgagctgcgggtgaagaggctgcaggagatcctgaaggcctttgacacctacaaggccctggtggtgtctgtgaatgtgagcagcaaggagttcctgcagacagagagccctgagagcacagagctgcagagccggctgcggcagctgagcctgctgtgggaggccgcccagggcgctgtggacagctggaggggcggcctgcggcagagcctgatgcagtgccaggacttccaccagctgagccagaacctgctgctgtggctggccagcgccaagaacagacggcagaaggcccacgtgacagaccccaaggctgacccccgggccctgctggagtgcagaagagagctgatgcagctggagaaggagctggtggagcggcagccccaggtggacatgctgcaggagatcagcaacagcctgctgatcaagggccatggagaggactgcatcgaggccgaggagaaggtgcacgtgattgagaagaagctgaagcagctgcgggagcaggtgtcccaggacctgatggccctgcagggcacccagaacccagccagccccctgcccagctttgatgaggtggacagcggggaccagcccccagccacctctgtgcctgccccccgggccaagcagttccgggctgtgaggaccacagaaggagaggaggagacagagagccgggtgcccggcagcacccggccccagaggagcttcctgagccgggtggtgcgggccgccctgcccctgcagctgctgctgctgctgctgctgctgctggcctgcctgctgcccagcagcgaggaggactacagctgcacccaggccaacaactttgcccgctccttctaccccatgctgcgctacaccaacggccccccacccacctag

SEQ ID NO: 185019 - DNA, 20658 bp, Artificial Sequence
  derived and/or modified sequence
atggccagcagccccgagctgcccaccgaggacgagcagggcagctgggggattgacgacctacacattagtctacaggccgaacaggaggacactcagaaaaaggccttcacttgttggattaacagccagctcgcaagacacacttccccatccgtgatctcagatctctttactgacatcaaaaagggacacgttctactggacttgctagaagtattgagcggccagcaactgcctagagacaaagggtctaatacgtttcagtgtcgcattaacattgagcacgccctcacgttcctccgaaaccggtctattaagcttatcaatatccacgtgactgacataattgatggaaatccttccattattttagggctgatctggaccatcattcttcacttccacatcgagaagctcgcgcagacactgtcttgcaattacaaccagccttcccttgatgatgtttccgtggtagacagctcgccagcctcgtccccgccagctaagaaatgtagcaaagtccaggcgagatggcagatgagtgcgcgcaaagccctcctcctttgggcgcaggaacagtgtgcaacttacgagtctgtgaacgtaactgatttcaagtcttcttggagaaatggcatggcgtttctggccatcattcatgctctgagacccgatctcattgacatgaagtcagtgaagcaccggagcaataaggacaacctcagggaagcgtttagaatcgccgagcaggagctcaagatccccagactgcttgaaccagaagacgtagatgtggtggatcctgacgagaagtctatcatgacctatgtggcccagtttctacaatattcaaaggacgccccagggacaggtgaagaggcacaggggaaggtcaaggacgcaatgggctggcttactctacagaaggagaagctgcagaagctgctcaaggatagtgaaaatgacacctactttaagaagtataactccttgctgtctttcatggaatctttcaacgaagagaagaagagtttccttgatgttctgtcgattaagcgggaccttgacgagctggataaagaccacctccagttgagggaggcgtgggatggcctggatcaccaaattaatgcctggaaaattaagcttaattacgcattacctcctcctctccaccagaccgaagcatggcttcaggaggtcgaggagttaatggatgaggatctatccgcttctcaggaccattcccaggcagtgaccctgatccaggaaaagatgacactgttcaagtcattgatggatagatttgagcaccatagtaacattctcctgaccttcgagaacaaggacgagaatcacctgcccctggtgccacccaataaactagaggagatgaagagacgaataaataacatcctcgaaaagaaattcatacttttgttggaattccactactacaagtgtctggtcctcggattggttgacgaggtcaaatcgaaactggacatctggaatatcaagtatggatcacgggaaagcgtggagctgctcctagaagactggcacaaatttatcgaggagaaggaattccttgcaaggctggacactagttttcaaaagtgcggcgagatttataagaacttggcgggcgagtgccagaacattaataaacaatacatgatggtgaagtctgacgtgtgtatgtaccgtaaaaatatatataatgtgaaatccaccctgcaaaaggttttggcttgctgggcaacatacgtggagaatctgaggctgttgcgggcctgctttgaagagactaagaaggaggagattaaggaagtgccctttgagacactcgcccagtggaatctggagcatgccacacttaacgaggccggaaacttcctagttgaagtgtccaatgatgtggtggggtcgtccatctccaaagagctgcggcgattgaataagaggtggaggaagctggtaagcaagacccaactcgagatgaacctgcccctaatgatcaagaaacaggatcaacccacattcgataatagcgggaacattctcagtaaagaggaaaaggcaacggtggagttttccaccgacatgagcgtggagctgcccgagaattataatcaaaatattaaagccggggaaaaacacgaaaaggaaaacgaagaatttacaggccagttaaaagtggcaaaagatgtcgaaaagttgattgggcaggttgagatttgggaagctgaggctaaaagcgtgttggaccaagacgacgtggacacatcgatggaagaatccctgaagcaccttatcgccaagggctcaatgtttgatgagctcatggcccggagcgaggacatgctgcagatggacattcagaatatctcatcccaagagtctttccagcacgtgctcacgacgggtctgcaggccaagattcaggaggccaaggaaaaggttcagattaatgtggtcaaattgattgcagctctgaagaacttgacagatgtgtctccagatttggatattagattgaaaatggaagagtctcaaaaggagcttgagtcctacatgatgcgggctcaacagctgctgggtcagcgggaatcgcccggcgagcttatcagtaaacacaaagaagctctgattatatccaacaccaagagcctggcgaagtacttaaaggccgtggaagagctgaagaataatgtgacagaagatattaagatgtcactggaagaaaagagtcgcgatgtgtgcgcaaagtgggagtccttacatcacgagctcagtttgtacgtgcaacagcttaaaatcgatattgagaagggaaagctcagtgataatatcctcaaactggaaaagcaaatcaacaaggaaaagaagctgatcagacgcggccgcacaaagggcctgatcaaggaacacgaagcctgtttttcagaagagggctgcctttatcagcttaatcatcatatggaggtccttagggaactgtgtgaggaactgcctagccagaaaagccaacaggaggtcaagaggctcctcaaggactacgagcagaagatagaaaggttactgaagtgcgcatctgagatccacatgacgttacaacctactgcagggggaacatccaaaaatgaaggtacaatcacaacaagcgaaaatcggggaggagatccccattctgaggctccctttgctaagtccgacaatcagcccagcacggaaaaggccatggagccaacaatgaagttttctctggcttccgtgctgagacccttgcaggaggagagcatcatggagaaggattatagcgcatcaatcaacagcttgctcgaacggtacgatacgtatcgggacattctggaacaccatctgcagaataacaagttcaggataacaagcgactttagctccgaagaggataggtcgagctcctgtctgcaagcgaagcttaccgatttgcaggtgatcaaaaatgagacagacgccagatggaaagaatttgaaattatctcactaaagctcgagaaccacgtgaatgatattaagaagccattcgtcatcaaagagagagacaccctcaaggagcgcgagagagagctacaaatgacccttaacacccgcatggagtcactggaaacggccctccggctcgtccttccagtcgagaaagccagcttgttactgtgtggaagcgacctcccgctgcataaaatggcaattcaaggctttcatctaattgatgcagatagaatatatcagcacctgcgcaacatccaagactctatcgccaagcagatagaaatatgcaatcgcttagaagaaccaggcaacttcgtgctgaaagagctgcacccattcgatctccacgcaatgcaaaacatcatcctcaagtataagacccagtttgaggggatgaaccatagagtccaaaggtccgaggacacattaaaggcactggaagatttcctggcatctctgaggacagctaaactcagcgctgagcctgtgaccgatctaagtgctagcgatacacaggtggcccaggaaaacaccctgaccgtcaagaataaggagggcgagatccacctcatgaaggacaaggccaaacatctggataagtgcctcaaaatgctagatatgagctttaaggacgctgagcggggcgatgatactagctgtgaaaatttgctcgatgccttttcgattaagctatctgaaacgcatggatacggggtacaggaagaattcactgaagaaaacaaactgctagaagcttgcattttcaagaataacgagctgcttaaaaatatccaggatgttcagtcccagatctcaaagatcggcctgaaagaccccaccgtgcccgcagtcaagcaccgcaaaaaatccttgatcaggctagacaaagtgcttgatgaatatgaagaagagaagaggcatctgcaggaaatggccaattccttaccacactttaaggacgggagggagaaaactgtaaaccagcagtgtcagaatactgtggtactttgggaaaacaccaaggctctggtgaccgagtgtctggaacagtgcggtcgggtgttagaactcctgaagcagtaccaaaactttaaatctattctcactacgctgatccagaaagaagagagtgtcatcagtctccaggcctcgtacatgggtaaggaaaatctgaagaaaagaatcgcagaaatagaaatcgtcaaagaagagtttaatgagcacctggaagttgtagataagataaaccaggtttgcaagaacctgcaattctacctgaataaaatgaaaaccttcgaagagcctccattcgagaaagaggctaatatcattgtggatcgatggttggacattaatgagaaaacagaggattactatgagaatctcggcagagccctcgcactgtgggataagctgtttaatctgaagaacgttatcgacgagtggaccgaaaaagcgctacaaaaaatggagttacatcagttgacagaagaggatcgcgagaggctaaaggaggagcttcaggtgcatgaacagaaaactagcgaattctcccgcagggtggctgaaatacagttcttgctccagtcctccgagatcccccttgaactgcaggtgatggaatccagtatcctgaacaagatggaacacgtacaaaaatgtctaactggcgagagcaactgccatgccttatccggctctactgcagagctgcgcgaggatcttgaccaggctaagacccagatcggaatgaccgagtcacttctcaaagccttatcaccaagcgatagtttggagatcttcactaagttggaggaaatccagcaacaaattctgcagcagaaacacagcatgatactgctggagaaccaaatcgggtgcctgactcctgaactctctgaattgaaaaagcagtatgagtccgtgtcagacctcttcaatactaaaaaatcggtactacaagatcactttagcaagcttctgaatgatcaatgcaagaatttcaatgactggttcagcaacattaaagttaatctcaaagagtgcttcgaatcctctgagactaaaaagtctgtagaacaaaagctgcagaaactttcagattttctgactcttgagggaaggaactcaaaaattaaacaggttgatagcgttttaaaacacgtgaaaaagcacctccctaaagcccacgtcaaggagttgatcagctggctcgtcgggcaagaatttgaactggaaaaaatggaaagtatctgccaagcgagggctaaggagttggaagacagtctccagcaattgcttagactccaggacgatcaccgcaatctgcgaaaatggctcaccaaccaagaggagaaatggaaaggcatggaggaaccgggcgaaaagacagaactcttttgccaggcacttgcacgcaaacgagaacaatttgagagtgtggctcagctgaacaactctttaaaagagtatggtttcaccgaggaggaagagattatcatggaggcaacttgcctaatggatagataccagacactactgcgccaactcagcgaaatagaggaagaggataagctcctcccaacagaagatcaatccttcaacgacttggcacatgacgttatacactggatcaaggaaatcaaagagtctctgatggtgttaaactctagtgagggcaagatgcccctggaagaaaggatccaaaagattaaggagattatcctgcttaaacccgagggggacgcccgcatcgaaacaatcatgaaacaggccgagtccagcgaagctccacttgtgcaaaaaaccctgacagacattagtaatcagtgggacaatactttgcatctggcgtccacctatctgagccatcaggagaaactgctgctggaaggagaaaagtatctccagtcaaaagaggatctgagacttatgttgattgagctgaaaaaaaagcaggaagccgggtttgcccttcaacatggattacaggaaaagaaagctcagctgaaaatatataaaaaattcctgaagaaagcccaggaccttactagcctattgaaggaattaaaaagtcagggcaattatctattggaatgcaccaaaaacccaagctttagtgaggaaccttggctcgagatcaaacacttgcatgaatctctcctccagcagctgcaggatagtgtccaaaacctagatgggcacgtgcgcgaacacgatagttatcaggtctgcgtgacagatctaaatactactctggataatttttcgaaagagtttgtgtccttttcagacaagccagtggaccagattgctgtggaggagaagctacagaagcttcaggaactcgaaaaccgcctatccctgcaggatgggacgctcaagaagatcctcgcactagctaaatcagtcaagcaaaacacttctagcgtagggcagaagatcatcaaggatgacataaaatccctacagtgcaagcagaaggacttggaaaatcgactcgcatcggccaaacaggaaatggaatgttgtctcaattctatcttgaagagcaaaaggtccacagaaaagaagggcaagtttaccttgccaggccgtgagaagcaggctaccagcgacgtccaggaatcaactcaagagtccgcagcagtcgagaagctcgaggaggattgggaaatcaacaaagattccgctgtagagatggcaatgtcaaaacagctgtctctgaacgcacaggaatctatgaaaaatacagaagatgagagaaaggtgaacgaattacagaaccagcccctggagctcgacaccatgttaagaaatgaacaactggaagagatcgagaagctgtatacccagctggaggcaaagaaagctgctatcaagcctcttgagcaaactgaatgtctcaacaaaacagaaactggggcccttgtccttcataatattggatactccgcacagcacctcgataatttactgcaagcactcattaccctgaagaagaataaagagagccagtattgtgtgttgagggactttcaggagtacctggccgctgtcgaatctagcatgaaagctcttctcaccgacaaagaatcacttaaagtggggcccttagattccgtgacctacctggataaaatcaaaaaatttatagcgtcgattgaaaaggaaaaagattctcttggaaatctcaagatcaagtgggagaatcttagtaaccatgttacggacatggataagaaattgctggagtcccaaattaagcaattagagcacggttgggaacaagtggagcagcaaatacagaaaaagtactcccagcaggtggttgagtacgatgaatttaccacactgatgaacaaggtgcaggatactgagataagcctccagcagcaacagcagcatctgcagctcagattaaaatctccagaagagagagctggtaaccaaagtatgattgcccttacaacagatcttcaggcaacgaagcacggattttcggtgttgaaggggcaggcggagctacaaatgaaaaggatctggggcgagaaggaaaagaagaatctggaggacggtattaataacctcaaaaaacagtgggaaaccttagaaccgcttcacctcgaggcagagaaccagatcaagaagtgtgatatccgtaataagatgaaagagacaatcctgtgggccaagaatcttctgggtgagttaaatccctcgatccccctactccctgacgacatactgtcccagattcgcaagtgtaaagttacccatgacggaattttggctcgacagcaatcagtagagtcgctggcagaagaagtgaaggataaagtgcctagtctcacaacctatgaaggaagtgacttgaataataccctggaggacctccgtaatcaataccaaatgctcgtgttgaaatccactcagcgttcccagcagttagagtttaagctagaggaaagatccaacttttttgctattattaggaagttccagctcatggtccaggaaagtgagaccctcatcattcctcgagtggagaccgcggccacagaggcagagcttaagcatcatcacgtaaccctcgaagcgtcccaaaaagaactgcaggagattgactctggcatctcaacccatctgcaggaacttacgaacatctacgaggagctcaatgtcttcgagagactcttccttgaagatcagctaaaaaacttaaaaattcggaccaatcgaatacagagattcatccagaatacttgtaacgaggtagagcacaagatcaaattctgcagacagtttcacgagaagacttccgcccttcaggaggaggcagatagtatccaacgaaatgagttgctactcaatcaggaggtgaacaagggagtcaaagaggagatctataaccttaaggaccgcctgacggcaatcaagtgttgcattcttcaagtgctgaagctgaagaaagtgttcgattacataggactaaattgggacttctctcagctggatcagctgcagacacaagtgttcgagaaagaaaaggagctggaagagaaaattaaacagctcgatacatttgaggaagaacacggcaaatatcaggccctactgagcaagatgagggctatcgatctgcaaattaagaaaatgacggaggttgtgctgaaagctcctgattctagccctgaatctaggcgcttaaatgcccagattcttagccaacggatcgaaaaagcaaagtgtctgtgcgacgagattatcaagaagctgaacgagaacaagactttcgatgatagctttaaggagaaggagatcctccaaatcaagctcaatgccgaggagaatgataaattgtataaagttctccagaatatggtgctggagctgagcccaaaagaactggatgaaaagaactgtcaagataaattggaaacatcactccacgttctgaatcagattaaatctcagctccagcagccactgctcattaatctggaaatcaaacacattcagaacgagaaggacaattgtgaagcattccaggaacaggtgtgggctgagatgtgcagtatcaaggccgtcacggctattgaaaaacagcgggaggaaaattctagcgaagccagtgacgtggaaaccaagctgagagagtttgaggacctccagatgcagctgaacacaagcatcgatctaaggaccaatgtcctgaatgatgcgtacgagaatctcacacgctacaaggaggccgttacgagggcagtcgagtcgatcacttctctggaggccattatcatcccctatcgggttgacgtggggaatccggaggaaagcctggaaatgcctctcaggaaacaagaggaactggagagcacagttgctcatatccaggacttaaccgagaagctcggaatgatctcatcacctgaagcaaagctccagctgcaatacacacttcaggagcttgttagtaaaaatagcgcaatgaaagaagcttttaaagcgcaagaaactgaagcggagcgatacctcgagaactataagtgctataggaagatggaggaggacatatacacaaacctatccaagatggagacagtcttgggtcagtcaatgagctcgctccctctcagttaccgtgaagcactggagaggctcgagcagtctaaggcactggtatctaatctcatcagtacaaaggaagagctcatgaaactgaggcaaatcttgcgcttactacgtcttagatgcacggagaatgacggaatctgcttgcttaagatagtgagcgcactgtgggagaagtggctctccttgctcgaagcagctaaggagtgggagatgtggtgcgaagaactcaagcaggaatggaaattcgtgtccgaggaaatagagcgcgaggcaatcatcctggataacctacaggaagagcttcctgaaatcagcaagacgaaggaggctgccactaccgaggagctttctgagttgctcgactgcctgtgccagtatggtgagaacgtcgagaaacagcagttgctgctcactctattattgcagagaatcaggagcattcagaatgtgcctgaaagtagcggagcagtggaaaccgtgcccgcctttcaagagattacaagcatgaaggaacggtgtaataaactgcttcagaaagtgcaaaagaacaaagaacttgttcaaactgagatccaagagcgtcactcattcaccaaagaaataattgctctaaaaaactttttccagcagacaacaaccagcttccagaatatggcgttccaggatcacccagagaaatcggaacagttcgaagagcttcagagtatccttaagaaaggcaaactgacattcgagaatatcatggagaagctgcgaatcaaatatagtgaaatgtacaccatcgtgcctgcagagattgagagccaggtggaagagtgccgtaaggctttagaggacatcgacgagaaaattagtaacgaagtgctcaaatcctcaccatcttacgccatgcgccgtaagattgaggaaataaataatggcctgcataatgtggagaagatgctgcagcagaagtcaaagaatattgaaaaagctcaagagattcagaaaaagatgtgggacgagctggatctgtggcactcaaaactaaacgagctcgactctgaggtccaggacatcgtcgagcaagatccagggcaagctcaggaatggatggacaacttgatgattccatttcagcagtatcagcaggtaagtcagcgggccgagtgtcgcacctcgcagttgaataaggcaactgtaaagatggaagaatacagcgatctcctgaagtctacagaagcgtggatcgaaaacacaagtcatcttctcgcgaaccctgctgactacgactccctgaggacattgtcacatcacgcctccaccgtccaaatggcgcttgaagactccgagcagaagcataatctcctccattctatcttcatggatctagaagacctttccatcattttcgaaactgacgaacttacccaaagcattcaggagctgtcaaaccaagtgacagccctccagcagaaaattatggagtcactgccccagatccagagaatggccgacgacgtggtggccatagagagtgaagtcaagtctatggaaaagcgcgtgagtaaaatcaaaaccatcctgctgtccaaggaaatcttcgacttttcacctgaggaacacctgaaacatggcgaggtgattctggagaatatccggcctatgaagaaaacaatcgccgaaatcgtaagttaccaggtggaactgaggctgccacagacgggcatgaaaccgttacctgtctttcagcggaccaatcaactgttgcaggatatcaaactcctggaaaatgtgactcaagagcagaacgagttgctcaaggtggtaataaagcagacaaatgaatgggacgaggaaatcgagaatctcaagcagatcctgaacaattatagtgctcagttctcactcgagcacatgagtccagatcaggcggataagctaccccagttgcagggcgagatcgaaagaatggaaaagcaaatcctcagtctcaatcagcggaaggaggatctgttggtggatcttaaagcaaccgtcctcaacctgcatcagcacctgaagcaggaacaggaaggggttgagagagacaggcttcctgctgtgacaagcgaggagggaggagttgcggaacgcgacgcctccgagagaaagctgaaccggcgtggcagcatgagctatctggctgctgtggaagaggaagttgaggagtctagcgtgaaatccgacaacggggacgagaaggcggaaccaagccctcagtcctggagctctttatggaagcacgataaggacatggaggaggatcgagcatcttctagctccggtaccatagttcaggaagcgtacggtaaaatcagcacctcagataattccatggcacagattctcacacccgactctctgaatactgagcagggcccggaatgctcattaagacctaaccagacagaagaggggacaaccccgcctattgaggctgacacgctggactcttctgatgcacaggggggactcgagcctcgggtggaaaagaccagaccggaacctacggaagtgctgcacgcttgtaaaacacaggtggcagagctagaactgtggttgcagcaggccaatgtggctgtggagcctgaaaccttgaacgcggatatgcagcaggtgctagagcagcaactggtgggatgccaagctatgctgaccgagatcgagcataaggttgcattcctgctcgaaacatgcaaggaccaggggctgggagacaacggagccacccagcatgaggccgaagctctttccctgaaactgaaaacggtgaagtgcaatctggaaaaagtacagatgatgctgcaggagaagcatagcgaagatcagcatcccacaattttgaaaaaaagttcggagcccgagcaccaggaagcccttcagccggtcaacctcagcgaactggaaagcatcgttacagagcggccacaatttagccggcagaaagatttccaacaacagcaggtcttagaactgaaaccaatggaacaaaaggacttcatcaagttcattgaattcaatgccaagaagatgtggccccaatattgccagcacgataacgacacgactcaagaatcatccgctagtaatcaggctagcagtccggaaaacgatgtccccgattcaattctgagcccacagggccagaatggagataagtggcagtacctgcatcatgagctgtcatctaaaattaaattacctctgccccagctcgtggaaccgcaggtcagtaccaatatggggattttacccagtgtgaccatgtataactttcggtatcctaccactgaagagctcaagacctacaccactcagcttgaagacctaaggcaagaggcttccaacctgcagacacaggaaaacatgaccgaggaagcctatatcaatctcgacaaaaaattattcgagctgttcctgacgctgagtcagtgtttgtcatcagttgaggagatgcttgagatgccacggctataccgagaagacggcagcggacagcaggtgcactacgaaaccctcgccctcgagctgaaaaaactgtatcttgctctctccgacaagaagggggacctgctgaaagcaatgacctggccaggggagaacactaacctgttgctggaatgctttgacaatcttcaggtgtgtttggagcatacacaggctgcagcggtctgtagaagtaaatcccttaaagccggccttgattacaacaggtcttaccagaacgaaatcaagcgactctaccaccaactgatcaagagtaaaacgagtctgcaacaatctctgaatgagatatccggccagtctgtggctgaacagttgcagaaagctgacgcatacaccgtggaattagaaaatgcagagagccgcgttgcgaagctgagggacgagggcgaacggttgcacctgccctatgcactactgcaggaagtctacaaattggaagatgtgctggattcgatgtggggaatgctgcgcgctcgatataccgagctgagtagtccctttgtcaccgaaagtcagcaagatgcactcctgcaaggcatggtggagcttgtgaaaattggtaaggaaaaactcgcccacggacatctgaaacaaacaaaatccaaggttgccttacaggctcagattgaaaatcacaaagtatttttccagaaactggttgctgatatgttactaattcaggcctactctgctaagatcctgccaagcctgttgcagaacagagagacattttgggctgagcaagtgaccgaggttaagattctggaagaaaagtcacgccaatgtggcatgaaactgcagtctttgttgcagaagtgggaagagttcgatgagaattatgcctctctcgaaaaggatctcgagatattaatctctacccttccttcagtgtcactcgtggaggaaactgaagagaggcttgttgaacgcattagcttttatcaacagataaagagaaatattggcggaaagcatgcccgcttataccaaactctgaacgaaggcaaacaactggtcgctagtgttagctgccccgaattggaaggccaaatagctaagctggaggaacagtggctttcactaaacaaaaagatcgaccacgaactgcaccgactgcaggcacttctgaaacatttgctttcctacaatagggatagcgatcagctgactaagtggttggaatcaagccaacacactctcaactattggaaagagcagtctctaaatgtcagtcaggatctcgatacaatacgcagtaacatcaataactttttcgaattcagtaaggaagtcgatgagaagtctagtctcaaaaccgctgtcattagcataggcaatcagctcttgcacctgaaggagactgatacagccactcttagagcctcattggctcaatttgagcagaagtggactatgctgataacccagttgcccgacatacaggaaaagctccatcagctccaaatggagaaactgccttctaggaaagccataaccgagatgatcagctggatgaataatgtcgagcatcagacaagtgatgaggattcagtccactctccttcgagcgctagtcaagtgaaacatttgctgcagaagcataaagagtttcgaatggagatggattacaaacagtggatagtggattttgtcaaccagtcactcctgcagctgagcacgtgcgacgtcgagtccaagcgttacgagagaaccgaattcgccgagcatctcggggaaatgaaccggcagtggcatagagtccacgggatgctaaatcgcaaaattcagcacctggagcagctgctcgagtccatcacggaaagcgaaaacaaaatccaaattctgaataactggttggaggcccaggaggaaaggctcaagacactccagaagccagagagtgtcatttctgtccagaaactgctactggactgccaagatatcgagaaccagctggcaatcaagtcgaaggccctggacgaattgaagcaatcttatctcacactggaatccggagctgtccctctactggaggataccgcctcccgaatcgatgaactgttccagaaacgcagctccgtacttacccaggtgaatcagctgaaaacctctatgcaaagtgtgctgcaggagtggaagatctacgatcagctgtatgacgaggttaatatgatgactatcaggttctggtactgtatggaacattccaaacctgtggtcttgtctctcgagacactaagatgccaggtggagaacctgcaaagccttcaggacgaagcagagagctcagagggaagctgggagaagctgcaggaggtcatcggtaaactcaagggcttgtgtccctccgtggccgaaatcatcgaagagaaatgccaaaacacacataaacgctggacacaggtgaatcaagcaattgctgaccaacttcagaaggctcagagtctgcttcagctgtggaaggcatacagtaacgctcatggcgaagccgcagccaggctaaagcagcaggaagccaagtttcaacagctggcgaatatcagcatgagcggtaataacctcgccgaaatccttccccctgctctgcaggacattaaagaactccagcacgacgttcaaaagaccaaagaggcattcctccagaattcttccgtccttgaccggctaccccagcctgccgagtcctctactcacatgctcctgcccggaccgctacacagtctgcagcgagccgcatacctggagaaaatgctgctcgtgaaggccaacgagtttgaattcgtgctctctcaatttaaagacttcggggttaggctcgagtctctaaaaggactaatcatgcatgaggaagagaacctcgaccgactgcatcagcaggagaaagagaatccggacagcttcctgaaccatgtcctggccttgaccgcgcagtcccctgacatcgagcacctgaacgaggtttctttaaagctgcccctgagcgacgtggccgttaagaccctacaaaacatgaaccgccagtggattcgagccacagcgactgcacttgaaaggtgttcggaactacagggtattggcttgaatgagaaattcctgtactgttgcgagaagtggatacagcttttagaaaagatcgaggaggcgctgaaggtagatgtggcaaattctttaccagagctgctggaacagcagaagacatataagatgttggaagctgaagtgtccatcaatcagactatcgctgattcctacgtgacccagtcactgcagctactggacaccaccgagatcgaaaacaggccggaattcataaccgagttctcgaagctaactgaccggtggcagaacgctgtgcagggggtacgccagcggaaaggggatgtggacggcttggtccgtcagtggcaagacttcactacaagtgtagagaatctgtttaggttccttaccgataccagtcaccttctgtccgccgtcaagggtcaagaaagattttctctttaccagaccaggagtctgattcatgaactcaaaaacaaagaaatccactttcagaggaggcgcactacatgcgcactgacgctcgaggctggtgaaaagctgcttctgacaacggacctgaagacaaaagagagcgttggcaggagaatcagtcagctgcaggattcgtggaaagatatggagcctcagctggccgagatgattaaacaattccagtccaccgtggaaacttgggaccagtgcgaaaaaaagataaaggagctgaaaagccggcttcaggtgttgaaagcccagtccgaagaccccctccccgagcttcacgaagacctgcacaacgagaaagaactaattaaagaacttgagcaatccctcgcatcctggacgcaaaacctgaaagagctgcagactatgaaggccgatctcaccagacacgtgcttgtcgaggacgttatggttcttaaggaacagattgaacatctccatcgccagtgggaagacttgtgccttagggtggcaattagaaagcaggaaatcgaagatagactgaacacctgggtggtgttcaacgaaaagaacaaggaactatgtgcctggctagtgcagatggaaaataaagtacttcagacagctgatatctcaatcgaagagatgatagagaagttgcagaaagattgcatggaggagattaacctcttcagcgagaacaagctgcagttgaaacagatgggcgaccagcttattaaagccagtaataaatctagggctgcggagatagacgacaagctgaacaagatcaatgaccggtggcaacacctctttgatgtgatcgggagtcgcgtgaaaaaactcaaggagacatttgcattcatacagcagctggataagaacatgtcaaatcttcgcacatggttagccaggattgagtcagaactcagtaaacccgtggtttacgacgtgtgcgacgaccaagagatacagaaacgcttggccgagcagcaggacctccaacgtgacattgagcagcacagtgctggcgtcgaatctgtctttaatatttgtgacgtcttgcttcacgacagcgacgcttgcgcaaatgagaccgaatgtgattctatccagcagacgaccagatcccttgataggaggtggagaaatatttgcgctatgagtatggagcggagaatgaaaatcgaagagacgtggagactatggcaaaagtttttggacgattattctaggttcgaggactggctcaagtcggccgagcgaacagcagcatgtccgaactcgagtgaggtcctctacacttcagcaaaagaggaattgaaacggttcgaagcatttcaaaggcaaatccatgaacggctgactcagctggagctgattaataagcagtatcgcagactcgcgagggaaaatcgaactgatacagcttccagactcaagcagatggttcatgaagggaatcagaggtgggacaatttgcaacggcgtgtcaccgcagtgctgcgtcgtttacgccattttaccaatcagcgtgaggaatttgagggtaccagagaaagcattttggtgtggttaactgaaatggacctgcaactgacgaacgtggagcatttctctgaatcagacgcggatgataaaatgcgtcaacttaacggttttcagcaggaaattacactaaataccaataaaatagaccagttgattgtctttggagaacagctcatacagaagtctgaacctcttgacgccgtcctcattgaagacgagctggaagaactgcaccggtactgccaggaagtcttcggaagagtgtcccgatttcatcgacggctgacaagctgtaccccgggattggaggatgaaaaagaggcctccgagaacgagaccgacatggaggatccccgggagatccagactgactcttggcggaaaaggggggagtccgaagagcccagcagtccacagtctttgtgtcatctcgttgcaccaggacatgaacgttctggctgtgaaacaccggttagtgtggattctattccgctcgagtgggatcataccggggatgtgggcggcagttcctcccatgaggaagatgaagagggaccgtactattcggctctttctggcaagagcatctcagatggccatagctggcacgtgccagatagtcctagctgtccagagcaccactataaacagatggagggtgaccgaaacgttcctcctgtgcctcctgctagcagcaccccttataagcctccttacggaaagctgttgctgccgccagggaccgacgggggtaaggaaggcccaagagtgctgaatggaaatccacagcaggaggacgggggactggcaggcataacagagcagcagtcaggggcttttgatcgctgggagatgatccaggctcaagagctgcataataaactcaaaatcaaacagaacctgcagcaactgaacagcgacatcagtgctattacaacttggctgaaaaagaccgaagccgagctggaaatgctgaagatggccaagccgccgagtgacatccaagagattgaattgagagtgaagcgcctccaggaaattctgaaggcctttgatacctataaagcgctggtggtgagcgtcaatgtgagttccaaagagttccttcagaccgagagtcctgaaagtaccgaactgcagagccggctgaggcagcttagtctcctttgggaggcggcccagggcgctgtggattcctggagaggcggcttgcggcagtctcttatgcagtgtcaggacttccaccagctgtctcaaaatctgctgttgtggcttgcctcggccaaaaaccggagacagaaggctcatgtgaccgacccaaaggccgacccacgggctctgctggagtgcaggagggaattgatgcagttagaaaaagaactggttgaaagacagccacaggtggacatgctgcaagagatttctaactccctgctgataaaaggccacggagaggattgcatcgaagcggaggaaaaggtacacgtgatcgagaagaagctgaaacagctgcgcgagcaggtctctcaggacctcatggccctccaagggacccagaaccccgctagcccacttccgtcattcgacgaagtcgacagcggggatcaacccccagcaacttccgtccctgccccacgggctaaacagtttcgcgcggtgaggacaacagaaggggaagaagagacggagagcagggtgcctggtagcacacgcccccagcgttctttcctgtcccgcgtggtgcgcgccgcgctgcctctgcagctgctgctcctgctattattgctgctggcctgcctgctgccatctagcgaagaagattattcctgcacccaggcaaataacttcgccaggagcttttatcctatgcttagatataccaacgggcctcctcccacatag

SEQ ID NO: 185020 - DNA, 9813 bp, Artificial Sequence
  derived and/or modified sequence
atggagaagctgcggatcaagtacagcgagatgtacaccatcgtgcctgcggagattgagtcccaggttgaagagtgcagaaaggcgctggaagacatcgatgagaagatctcgaacgaggtgctgaaaagtagcccttcatacgcaatgagaaggaaaatagaggagattaacaatggcctgcacaatgtggagaaaatgctgcagcagaagagcaagaacattgaaaaggctcaagaaatacagaaaaagatgtgggatgagctcgacctctggcactccaagttgaacgagcttgatagcgaagtgcaagatattgtcgaacaggaccctggacaggctcaggagtggatggataatctgatgattcctttccagcagtatcagcaggtttcccagcgtgctgaatgcaggacgagccagctgaacaaggctacggttaaaatggaggagtacagcgatttactgaaatccaccgaggcatggatcgaaaatacctcacatttattagccaaccctgccgactatgactccctgcggaccttgagccaccacgcgtccaccgtgcaggacagtaaatgcttcaggagcggaccacggccaaacatttatgtatcctactacgtgaccgtcatccagatggcactggaggacagtgagcaaaagcataatcttttgcactccatctttatggacttggaggacctttcaatcatcttcgagaccgacgaacttacccagagcatccaggaactgagcaatcaggtgacggcactgcaacaaaaaatcatggaatcgctcccccagattcagcggatggcagatgacgtggtggctattgagtctgaggttaaaagcatggagaaacgcgtgtcgaagattaagaccatcctcctctccaaggaaatcttcgacttttcccctgaggaacacctgaagcacggcgaggtgatccttgaaaacattagaccgatgaaaaaaacgatcgccgaaattgttagctaccaagtggagctgaggctcccgcagaccggcatgaagccacttcccgtctttcaaagaactaaccagctgctacaggacattaaacttttggagaatgtgacccaggaacagaacgaactcctgaaagtcgtgataaagcagacaaatgaatgggatgaggagattgaaaacctgaagcagatcctaaacaactacagcgcccagttcagcctggagcacatgtccccagaccaggctgacaaactgccccagctgcagggcgaaattgaaagaatggagaagcagatcttatctttaaaccagcgaaaggaggacctgctggtcgacctgaaagccaccgtgttaaacctgcaccagcatctgaagcaggagcaggagggtgtagagcgggatcgcctgcctgctgtcacgagcgaggaaggtggagtagccgaaagggacgccagcgagaggaagctgaatcgccggggaagtatgtcttatcttgcggccgtggaagaggaggttgaagaaagtagtgtgaagagtgacaacggtgacgagaaggcagaacctagcccccaaagctggtcttcattatggaaacatgacaaggatatggaagaagacagagcttccagctcgtcaggaaccatcgtgcaggaagcttacgggaagatttccacctcagacaactctatggcccagatcctgacccctgactccttgaatactgagcagggaccagagtgcagtctacggcccaatcagacagaggaaggcaccacgccacctatagaggcagacaccttggactcttccgatgcacagggaggtctggaacctcgagtcgaaaagactaggcctgagcccaccgaggttctgcatgcatgcaaaacccaagttgcagagctggaactgtggctccaacaggctaacgtcgctgtagagccggaaaccttgaacgccgatatgcagcaggtactggagcagcagctcgtaggctgtcaggccatgctgaccgaaattgaacacaaagtagcattcttgctggaaacctgtaaagaccaggggctgggtgacaatggagcgacgcagcacgaggccgaggccttatctctcaagctcaaaactgtgaaatgtaacttagagaaggtgcaaatgatgctgcaggaaaagcacagtgaggatcagcatccaaccattctcaaaaaaagctctgaacccgagcatcaggaagctctccaaccagtgaacctgtcagagcttgagagcatcgtcacggagcgtccccaattcagcaggcagaaggacttccagcagcagcaagtgctagagttgaaacctatggagcagaaggacttcatcaaatttatcgagtttaacgcaaagaagatgtggccccagtactgccagcacgataacgacacaacgcaggagagtagcgcgagtaatcaggcctcctctccagagaatgacgttcccgactccatcctctcacctcaaggccagaatggcgacaagtggcagtatctccatcacgagctatcaagtaagataaagctccccctgccgcagcttgtcgagccccaagtgagtaccaatatggggatcttgccttcagtcacgatgtataactttcggtatcccaccacagaggaactgaagacatacactacccaactggaggatttaagacaagaagcctctaaccttcagacccaggaaaacatgaccgaagaagcttacattaatctggataagaaactgttcgagctctttctaaccctttctcagtgcctttcatctgtggaggaaatgcttgagatgccacggctttaccgggaagacggaagcggacaacaggtgcattatgaaaccctcgccctcgagctcaagaagctatatctggctttgagcgataagaagggcgatctgcttaaggcaatgacctggccaggcgagaacacaaatcttcttctggagtgttttgataatctgcaggtatgtctggaacacacccaggctgctgctgtgtgccggtccaagagccttaaggcagggctcgactacaacaggagctaccagaatgagattaagcgcctataccatcagctaatcaagagtaagacgagcctgcagcagtctctgaatgagatatccggtcagtctgtggccgaacagctgcagaaggccgacgcctataccgtggagttagaaaacgcagaaagcagagtcgctaaactgcgtgacgagggggaaagactgcacctcccttacgctctgctgcaggaagtctataagttggaagacgtcctggacagcatgtgggggatgctccgggcgcggtacacagagctctcctctccctttgtgaccgagtcccagcaggatgcgttgctgcagggaatggtagagctagtcaagatcggaaaggagaaactggcacatggacacttgaagcaaaccaaaagcaaggtagcactacaagcacaaattgagaatcataaggtattcttccagaaattggtggccgacatgcttcttattcaggcatattctgcgaaaatccttccttcgctccttcagaatcgcgagaccttttgggcagagcaggtgacagaggtgaaaattctcgaggagaaaagtcgccaatgtgggatgaaacttcagagtctcctgcagaagtgggaagaattcgacgagaactacgcctccctggagaaggatttggagattcttataagtacactgccatctgtgagtcttgtggaggagaccgaggagagactcgtggaacgcatctccttttatcaacaaatcaagaggaacatcggagggaaacatgcccggctgtatcagacacttaacgaaggcaagcagttagtggcatcagtgtcatgtcctgagctggaaggccagatcgcgaaactggaggagcaatggttgagtctgaacaaaaaaatcgaccacgagctacataggttgcaggctctgttaaaacacttactgagttacaatcgcgattctgatcagctgacgaaatggctagagagctctcagcacacgctgaactactggaaagagcagtcactcaacgttagtcaagatctggatacaataaggtccaacattaacaactttttcgaatttagcaaagaggttgatgagaagtcatcgctcaagacggccgtgataagtatcggaaaccaacttttacacctgaaggaaaccgatactgcaacgttacgagcaagtctggcccagtttgaacaaaagtggacaatgctcattacacagctcccagacatacaggaaaagctgcaccagctgcagatggaaaagctaccttctcgaaaggctatcactgaaatgatttcctggatgaataacgtggagcatcaaacaagcgacgaagactctgtgcattctccttcaagtgcaagtcaggtcaagcacctgttacagaaacacaaagaatttcgtatggagatggactataagcagtggatagtcgatttcgtgaaccagtctctcctgcaactctcaacttgtgacgttgagtcaaagaggtacgagaggaccgagttcgctgaacatctgggtgaaatgaatagacagtggcatcgggtccacgggatgcttaaccggaagatccagcatctagaacagctgttagagagtatcactgagtcagagaacaagattcagattctgaataactggctcgaggcccaggaggagcgtctaaagactctgcaaaagccagaaagcgtgatcagcgtacagaagctgcttttggattgccaggacatcgagaaccagctcgctatcaagtcgaaggcactagacgaactcaagcagagctacctaacccttgaatccggcgccgtccccctcctggaggataccgcaagcaggattgacgagcttttccagaaaagatcttccgtgttgactcaagtaaatcaactcaagacatccatgcagtctgtcctccaggaatggaagatatacgaccagctgtacgacgaggtcaatatgatgaccattcgcttttggtactgcatggaacattccaaacccgtcgttttatctctggagacattgcgttgtcaggttgagaacctgcaaagcctccaggatgaggctgaatcgagcgaggggagctgggagaagctccaggaggttattggcaagcttaagggcttatgtccctctgtggcagagattattgaggagaagtgtcagaacacgcacaagcgttggacgcaagtaaaccaagctatagccgatcagttgcagaaggcccagtccctcctccaactgtggaaggcctattcaaacgcccacggagaggctgccgcaagattaaaacagcaagaagccaagttccagcagcttgctaacatcagcatgagtggaaacaacttggcagagatacttccccctgccctgcaagacattaaggagttgcaacatgatgttcagaagaccaaagaggcgttccttcagaacagcagcgtgctggatcggctgccccagcctgccgaatctagtactcacatgctgttgcctggtcctctgcactctctgcagcgcgccgcctatctggaaaaaatgctgctggtaaaggctaacgagtttgaatttgtgctaagccagtttaaagatttcggcgtccgcttagagagcctcaaaggcctcatcatgcatgaggaggagaacctagaccggctccaccagcaagaaaaagagaaccctgactctttcttgaatcatgtgctggcactcaccgcccagagcccagacatcgagcacctcaatgaagtgtccctgaagctgccacttagcgatgtagcagtgaagactctgcaaaacatgaatcgtcagtggatccgagccaccgctacagccctggagagatgttcagaactgcagggcatcggtctgaacgaaaagtttttatattgctgtgagaaatggatccagttgctggagaaaattgaagaggccctcaaggttgatgttgccaacagtttgcctgaactgctcgaacagcagaaaacatataaaatgctggaggcagaagtgagcattaatcaaacaattgctgattcttacgttacgcagtcactgcagttgctggacacaactgagattgaaaacagacctgagtttatcacagaatttagcaaactgacagaccgctggcagaatgcggtacaaggcgtcagacagcggaagggcgacgtcgacggcctggttaggcagtggcaagacttcaccacatccgtggagaaccttttcaggtttctaactgatacaagtcatctgttgagcgccgttaagggccaagaacggttttcattgtatcagacccggtctttaatacatgaactgaagaacaaggagatccatttccagagacgcagaaccacatgtgccttgaccctggaagcaggagagaagctgctgttgacaactgatttgaagactaaagagtccgtgggtaggcgcatctcccagcttcaagactcgtggaaggacatggagccccagctggctgagatgataaaacagtttcagagtaccgtcgaaacgtgggaccagtgcgaaaagaagattaaggaactcaagtcacggttgcaggtcctaaaggcgcagtctgaggaccctctgccagaattgcatgaagatctacataatgagaaagagctgatcaaggagctggaacagagtctcgcaagctggacgcaaaacctgaaagaattgcagactatgaaagccgatcttactcggcacgtcctggtggaggatgtgatggtgttgaaagagcagattgagcacttgcacaggcagtgggaagacctctgtttgcgggtggccatccgaaagcaggaaatcgaagataggctgaacacgtgggtggttttcaacgagaagaacaaggaactctgtgcttggttggtgcagatggagaacaaagtgctccagactgcagacatctccatcgaggaaatgatagaaaagcttcagaaagattgcatggaagagatcaatctattttccgagaacaagttacagctgaagcagatgggggatcagcttattaaggcctccaacaaatccagggccgccgagattgatgataaactgaataaaattaacgatcgttggcagcatcttttcgacgtgattggctcacgtgtgaagaagctgaaggagacgtttgccttcatccagcaactggataagaacatgtctaaccttaggacatggttagcccgcatcgaaagcgaactctccaaacccgtggtgtatgatgtatgcgacgaccaggaaattcaaaaacgcctggccgaacaacaggatctgcagagagacatcgagcagcattcagccggggtagaaagtgtgttcaatatatgtgatgtcctgctccatgactccgatgcctgcgccaatgagaccgaatgcgattccatacagcagacaacccgctccttggatagaaggtggcgaaatatctgcgcgatgtctatggaacgcagaatgaagatcgaagaaacatggagactgtggcagaagtttctagatgattattctcggttcgaggactggttgaagtcagcggaacggaccgccgcctgtccgaactccagtgaagtgctctatacttctgccaaggaagagctgaagcgcttcgaggcctttcagaggcagattcacgagagattgacacagctggagctgattaataaacagtaccgtagacttgccagggagaaccgcacagataccgcctctaggctcaagcagatggtgcatgaaggaaaccagagatgggataacctgcaacgacgggtgactgccgtgctgcgccgattgcgccactttactaatcagcgggaggaatttgaggggactagagagagtattctggtctggctcacggagatggatctccaattgaccaacgttgagcatttcagcgagtccgatgctgacgacaagatgcggcaactgaatggatttcagcaggaaattacccttaacactaataagatagaccagctcatagtgtttggagagcagttgatccaaaagtctgagccattggatgccgttctgattgaggatgaattggaagagctgcacagatattgccaagaggtgtttggccgggttagtaggttccaccgcaggctcaccagctgtacacccggtctggaagacgagaaggaggcctccgagaacgagactgacatggaggatccgagggagattcaaaccgatagttggaggaaaagaggggaaagcgaggaaccttcatccccacagtctctgtgccaccttgtcgcacccggccacgagcggtccgggtgcgagacgccagtgagcgtcgattccataccactggagtgggatcataccggagatgtcggcggcagtagcagccatgaagaggacgaagaggggccctattattctgccctgtctggaaagagtattagcgatggccatagctggcacgtgccggactctccatcctgtcctgagcaccactacaaacagatggaaggagatcgcaatgtgcctcccgtcccaccagcaagcagtaccccatataagccgccttatgggaaactactgttgccacctggaacggatggggggaaggaaggtccacgcgtactaaacggtaacccgcaacaagaagacggtgggctcgcggggatcacagagcagcagtctggcgcattcgatcggtgggagatgattcaggcgcaggaactgcacaataaactgaaaatcaaacagaacctgcagcagctgaattcagatatcagcgccatcacaacctggctgaaaaaaaccgaggccgagttggaaatgctcaaaatggccaaaccaccatcagacatacaagagattgagctgcgagtcaaaagactacaggaaattctgaaggcgttcgacacttacaaagcactggtggttagcgtaaatgtgagcagcaaagagttcctgcagacagagtcccctgagagcacagagctgcagtcaagacttcggcagctaagtctcctgtgggaagccgctcagggcgcagtcgattcttggcgggggggactgcggcaaagtctgatgcaatgccaagatttccaccagctttcacagaatcttctgctgtggttggccagcgccaagaaccggagacagaaagcccacgtcaccgacccgaaagcggatccgcgagctctcctagaatgccggcgcgaattgatgcagctggagaaggagttggtcgagcggcagccccaggttgatatgttgcaggagatctccaactctctgctgatcaaaggacacggagaggattgcattgaagcagaagaaaaggtgcacgttattgaaaaaaagctgaaacagctgcgggagcaagttagccaggacctcatggctttacaagggacccaaaatcctgccagtcctctgccctcattcgatgaagtggatagtggggatcagcctccggcaacctccgtcccggcaccccgcgctaaacagtttcgggcagtcagaacgaccgagggagaggaagaaactgaatcgcgggtccctggttctacaaggccacagcgttccttcctcagccgggtggtccgcgctgcgctgcctctgcagctcctgctgctgctgctgttgttgctcgcctgtctgttaccaagctcagaggaggattattcatgtacccaggctaataactttgcccgcagcttctatcccatgcttcgttacacaaacggtccaccccctacctag

SEQ ID NO: 185021 - DNA, 9813 bp, Artificial Sequence
  derived and/or modified sequence
atggagaagctgcggatcaagtacagcgagatgtacaccatcgtgcccgccgagatcgagtcgcaggtggaagagtgtcggaaggccctggaggatattgacgaaaagatatccaacgaggtgctgaaaagttctccttcttacgccatgcggcggaaaattgaagagatcaacaacggactgcataatgtggaaaaaatgctgcagcagaagagcaagaatattgagaaggctcaggagatccagaagaagatgtgggacgagctggacctgtggcattccaaactgaatgaactggatagcgaggttcaagacatagtggaacaggaccctgggcaagcgcaggaatggatggacaatttaatgatcccttttcagcaataccagcaggtttctcaacgggccgagtgtagaacctcccagctcaataaggccactgtcaaaatggaagagtactctgatctccttaaatctactgaagcttggattgagaataccagtcatctgctggcaaatccagccgattacgactcactgagaacactatctcaccacgcgtcgacggtgcaggattccaagtgtttcaggagtggcccccggcccaacatctatgtgtcatattatgtcaccgtcattcagatggcacttgaagactccgaacagaagcacaatctcttgcattctatcttcatggacctcgaagatttgtccataatcttcgagacagatgagctgacccagtccattcaggagctgtccaatcaggtcacagccctgcagcagaaaattatggagtcccttcctcagatccagaggatggcagacgacgtggtcgcgatcgaaagcgaagtcaagagtatggagaagcgcgtgtctaaaataaagaccatcttgttatccaaagagatcttcgatttctcacccgaagaacatcttaagcacggcgaggtcatcttggagaatattaggcctatgaagaagactatagctgagattgtgtcttatcaagtagagttgaggctcccacaaaccgggatgaaacctttaccggtattccagcggaccaaccagctcttacaagatattaagttactagagaacgtcactcaggagcaaaacgagctgcttaaggtagtgatcaagcagaccaacgaatgggacgaggaaatagaaaacctcaagcagattctgaataactacagcgcccagttttccctggagcatatgtctccagaccaagccgataaactgccccagctccagggggagattgagcgaatggaaaagcagatcctttccttaaaccaacggaaggaagacctcctggtggacctcaaagctaccgtactgaacctgcaccagcacctgaaacaggaacaggaaggcgtggaacgcgacaggttgccagctgtgacctctgaagaaggtggggtcgcggaaagggacgcctcagagaggaaactgaatagacgcgggagtatgagctatctggcagcagttgaggaagaagtggaggaaagcagcgtgaagtcagataatggagacgaaaaggccgagccctccccacagagctggagttccttatggaagcacgataaggacatggaggaagaccgagcgtcctctagctctggcacgatagtccaggaggcctatggcaaaatttctacaagtgataactcaatggcccaaattctcactcctgatagcctgaacacggagcagggaccggaatgtagcctgcgccctaatcagaccgaggagggaactactccccccattgaggctgatacccttgactcctctgatgcccagggtggacttgaacctcgggtcgagaaaacaagacccgagcccactgaagtgcttcatgcatgtaagactcaagtcgccgagttggaactttggctccagcaggccaatgtcgctgtcgagcctgaaacactgaacgcagacatgcaacaagttctagaacaacagttggtcgggtgtcaggccatgctaacagaaatcgagcataaagtggccttcctactggagacttgtaaggatcagggattaggagacaacggcgcgacccaacacgaggcagaagcactctcacttaaactcaagactgtaaagtgtaatctggagaaagttcagatgatgttacaggaaaaacatagcgaggaccaacaccctacaatcctgaaaaaatccagtgaacccgagcaccaggaggcactgcagcctgtgaatctcagtgaactggagtccatcgtgactgagaggccccagttcagtagacagaaagattttcagcagcagcaggtgctggaactgaagccaatggagcagaaggatttcattaagtttatcgagttcaacgcgaagaagatgtggcctcagtattgccaacacgataatgacacaactcaagagtctagcgcttccaaccaagcgtcttccccggaaaacgacgttccagactccatactatcacctcagggccagaacggtgacaaatggcagtacttgcaccacgaactgagttctaaaattaagctgccccttccacaattggtcgaaccccaagttagtaccaatatgggaatccttccctcagtgactatgtataacttccggtatcccactacggaggagctcaaaacttatacaactcagctcgaggatctgcgccaggaagcatcgaaccttcagacgcaggagaatatgactgaggaagcttatatcaatcttgataaaaaactgttcgagttattcttaactctgtcccagtgcttgtcctccgtcgaggaaatgctagaaatgccaagactttacagggaagacggtagcggccagcaggtgcactacgaaacactggccctcgaattaaaaaagctgtacctggcccttagcgacaagaaaggagacctgctcaaagcgatgacatggcctggagagaatacaaatctgctgctggaatgtttcgataatctgcaagtttgcctcgagcacacccaggcagccgccgtatgtcgttcgaaatccctgaaagcaggcttagattacaatagaagctaccagaatgaaataaagcgcctgtatcatcaactgataaagtctaaaacttcgctgcaacaaagtctgaatgaaatctcaggtcaatctgtcgctgagcaactccaaaaggcagatgcctacaccgtagaacttgagaacgcagaaagcagggtggctaaactgcgggacgagggggaacggcttcacctgccatacgcgttattgcaagaagtctacaaactcgaggatgtcctcgactcgatgtggggcatgttgagagcccgctatactgaactgtccagccctttcgtgaccgagagccagcaagatgctttacttcaggggatggtcgagttggtcaaaattggaaaagaaaaactcgcacatggacacctgaagcaaacaaagtcaaaggtggccctgcaggcgcagatcgaaaatcataaagtgttcttccagaaactggtggccgatatgctcctgatccaggcatacagcgccaaaattttgccgtccctgttgcagaacagggaaacgttttgggccgaacaggttactgaagtcaaaatccttgaggaaaagagccggcaatgcggaatgaagttgcagtcactgctgcagaaatgggaggagttcgatgaaaactacgcctctctggaaaaagacctggaaattttaattagtactttaccaagcgtcagcctggtggaggagactgaggagcggttggtcgagaggatcagcttctatcaacagattaagcggaacattggtggaaagcatgctcggctataccagacactgaacgagggtaaacagctggtcgcatcagtcagctgtcctgaactcgaaggtcagatcgccaaactggaggagcagtggctctcactgaataagaaaatcgaccacgagcttcataggctgcaggcattactgaaacatctcctcagttacaatcgggatagtgatcagctgacaaagtggctcgaaagcagccaacacactctgaattactggaaagagcagtcactgaacgtgtcccaggatctggacacaatacggagcaatatcaataacttctttgagttctctaaggaggttgacgaaaagtcttcattgaaaacagcggtaatttctatcggaaaccagctgctgcacctgaaggagaccgacacagcaacgctacgagcctctctcgcccagttcgagcagaagtggactatgctcataacccaactgccagatatacaagagaaattgcaccaactgcagatggaaaagctcccctccaggaaggccatcaccgagatgatatcatggatgaacaacgtggagcatcagacgagtgacgaagactcggtgcacagcccgagttctgcaagccaggttaaacacctactccagaaacacaaggaatttcgtatggagatggattataaacagtggatcgtggattttgttaatcagagcttgcttcagctcagtacgtgcgacgtcgagagcaagcggtacgaaaggaccgagtttgcagaacacctgggggagatgaacaggcagtggcacagggtccacgggatgctgaataggaagattcaacatttggaacagctgcttgagtcaatcacagagtctgaaaataagattcaaatccttaacaactggttggaagcacaggaagagcgcctgaagacactgcaaaaacccgaaagcgtgatcagtgtccaaaagctgttgctcgactgccaggatatcgaaaaccagctggccatcaagtccaaggcgctcgatgaactaaaacagtcctacctcactctagagagcggcgccgtgccccttctggaggataccgcctctcgaatagacgaactgttccagaagcgaagttcagtcttgacccaggtcaatcagctcaagacttccatgcagtcagttctgcaggaatggaagatctacgatcagttatacgatgaggtgaatatgatgactatccgcttttggtattgcatggaacacagtaaacccgtggtgctaagcctagagaccctccgatgccaggtggaaaacttacagagcctccaggatgaggccgagtcctcagagggcagctgggagaagctccaagaggtcattgggaagttgaagggtttatgtccttccgtcgcggagattatagaggaaaagtgtcaaaatacccacaaacggtggacacaggtgaaccaggctatagctgatcagctacagaaagctcaaagcctcctccaactgtggaaggcctatagtaatgcccacggagaggccgcggcccgcctaaagcagcaagaggctaaattccaacaacttgccaacatctctatgtccggcaacaacctggccgagattttaccacccgccctccaggacattaaggagctgcaacacgacgtgcagaagactaaagaggctttcttgcagaatagtagcgtgctggatcggctgccacagcctgcggaaagttctacacatatgctactcccggggccccttcatagcctccagagagcggcatatcttgaaaaaatgctgctggtgaaagccaacgaatttgaatttgtgctaagtcagttcaaggattttggagtcagacttgagtctctaaagggtttaatcatgcatgaagaggaaaatctcgatcggttgcaccagcaagagaaagaaaacccagatagttttctgaaccacgtcttggccttaacggcacaatctcccgatattgaacatctgaatgaggtctcgctgaaactgccgctgtctgatgttgcggttaaaacactccagaatatgaacagacagtggatcagagcaaccgctaccgcactggagcgctgctcagagttacagggcatcgggttaaacgagaagtttctgtattgctgtgagaagtggatccaactgctcgaaaagattgaggaggctttgaaggtggacgtggccaactcactgcctgaacttttggaacagcagaagacttacaaaatgctggaagccgaggtgtcaattaatcaaaccatcgctgactcgtacgtgacccagtcgctgcagttactcgatacaaccgagatagagaaccgacctgagtttattacggaattcagcaagctcacagaccgctggcagaatgccgtgcaaggggtaagacagcgaaagggagatgttgatgggctggtgagacagtggcaggactttactacgagtgtggagaatctcttccggttcctcaccgatacttctcatttgctctctgcagttaagggccaggaaaggttctctctgtatcagacacgcagtctcatccacgaactgaagaacaaggagattcacttccagcggaggagaaccacatgcgccctgactctagaagcgggagagaagttgctgctcactaccgacttgaagactaaagagtcagtaggaagaaggataagtcagctgcaagactcttggaaagatatggagccgcagctcgccgaaatgataaaacagttccagagtacggtagagacttgggaccagtgcgaaaagaagatcaaggagctcaagagccggctgcaggtccttaaggcgcagagcgaggaccccctccccgagctgcacgaggatcttcacaatgaaaaagaactgattaaggaactcgaacagtcgctcgccagttggacccagaacctcaaggaacttcaaaccatgaaggcagacctaacgagacacgtactcgttgaggacgtgatggttctcaaggagcagatcgagcatttgcaccggcagtgggaagacctctgcctgagggtggccatccgaaaacaggagattgaagatcgactgaatacttgggtcgtgtttaacgagaaaaataaagaactgtgcgcctggctggtgcagatggaaaataaggttctgcaaaccgcagacatcagtattgaagaaatgatcgagaagttgcagaaagactgcatggaggaaatcaacctcttttcagagaataagctgcaactgaaacaaatgggcgaccaactgatcaaagcatccaacaagagcagggcggctgagatcgacgataaacttaacaagatcaatgaccggtggcaacacctctttgacgtcatagggtcgagagttaaaaaactgaaggaaacctttgcttttattcagcagcttgataaaaatatgtcaaaccttcgtacatggcttgccagaattgaatccgaactgtcaaaaccggtggtatacgatgtgtgcgatgatcaggagatccagaagcgcctagctgagcagcaagatcttcaacgcgacattgaacagcactctgcgggcgttgagagcgtgtttaatatctgcgacgtgctgctccacgactctgacgcttgcgcaaacgagacggagtgtgattcgatccagcagacaacacgtagccttgatcgacggtggagaaatatatgtgcgatgtccatggaaagacggatgaaaatagaggagacctggaggctgtggcagaagtttctggacgattattccaggttcgaagactggctgaaaagcgcagagagaacagcagcttgccctaattctagcgaagtgctgtacacaagcgccaaggaggaacttaagcggttcgaagcgttccagcggcagatccacgagaggcttacccagctcgagctgataaacaagcagtaccggaggctagctagagaaaataggactgacacagcatcccggctgaagcagatggttcacgaggggaatcagcggtgggacaatctccaaagacgagtaactgccgtgctgagaagattgcggcattttacaaaccaacgcgaggagttcgagggtacgcgcgaatcgattctggtttggctcaccgagatggaccttcaactgactaacgtggaacactttagcgaatctgatgcagatgataaaatgagacagctgaacggattccagcaggaaatcacactgaacactaacaaaattgatcaactgatcgtgttcggggagcagctgatacagaagtccgagcctttggatgctgtgctcattgaggatgaattagaggaactccatcgctactgccaggaagtatttggtagggtgtcccggttccatcggaggcttaccagctgtacaccaggtctagaggacgaaaaggaggcaagtgagaacgaaaccgacatggaagacccacgggagattcagacagacagctggagaaaacgaggggaatcagaggaaccaagttccccccaatccctgtgccacttagttgcgcctggccacgagagatccggttgtgaaacgcctgtcagtgtggactccatccctctggaatgggaccatactggcgatgtcgggggatcctcttctcatgaggaagatgaagagggcccatactacagcgccctgtcaggaaagtcaatttctgacggtcattcatggcacgtgccggattctccatcttgtcctgagcatcattacaagcaaatggagggggatcgtaacgtcccgcccgtgcctcctgcgtcatccacaccatataagcccccttatggcaagctccttttaccccccggaaccgacggagggaaagaaggacctagagtccttaatgggaacccccagcaggaggacggcggccttgcaggcatcactgaacaacagtctggggcattcgaccgttgggaaatgattcaggctcaagagctgcacaataaactgaagattaaacagaatctccagcagttaaactcagacatttctgccattacaacttggctaaagaaaaccgaagcggagttggaaatgttaaagatggccaaacccccaagtgacattcaagaaatcgaattgagggtgaaacggcttcaggagattttgaaagcttttgatacgtataaggccttggttgtgtcagtaaacgtcagctctaaagagttcctacagacagagtctcctgaatccacagagctccagtcccgcctaaggcagctgtccctcttatgggaagcagctcagggggctgtggactcctggcgaggaggcctcaggcagagtctgatgcagtgtcaggattttcaccagctgtcacaaaatctgctcctttggctggccagcgctaagaaccggcgtcagaaggcgcacgtgaccgaccccaaggccgacccccgagcactcttggagtgtagacgagagctgatgcaactggagaaggaacttgtggaacgtcagccccaggtggacatgctccaggaaatatctaacagcctgctgattaaaggacacggagaggactgcatcgaggcagaggagaaagttcatgtcatcgaaaagaagctcaagcagttgcgcgaacaggtgagtcaggatctaatggccctgcaaggtacacagaacccagcatccccactaccctcctttgatgaagtggactccggggaccagccaccagctacatccgtgcccgcgccacgggcgaaacagtttcgcgccgtacgcactacagaaggtgaggaagagaccgagtcacgcgtgccagggtctacgcgaccccagcggagcttcttgagccgcgtcgtaagagccgcactgccattgcagctcttattgttgttgctgctactgctggcctgcctgctcccgtcaagcgaggaggactactcatgtactcaggccaataactttgcccgttcattctatccaatgcttcggtacacaaacgggcccccgcctacctag

SEQ ID NO: 185022 - DNA, 2007 bp, Artificial Sequence
  derived and/or modified sequence
atggtgcacgagggcaaccagcggtgggacaacctgcagcggcgggtcaccgcggttttacggcgactgaggcattttacaaatcaacgagaggaattcgagggaacacgtgagtctatccttgtgtggctgaccgaaatggacctccagctgacaaatgtggagcacttcagtgaatcagatgctgacgataaaatgagacagttgaacggtttccagcaagaaattaccttaaacacgaacaagatcgatcagctgatagtatttggggaacagcttattcagaaatcagagcctctggatgcagtcctgatcgaggacgagttggaggagttgcatagatattgtcaggaggtcttcggccgtgtctcgcgattccaccggagattaacatcctgcacacccggcctggaggacgagaaggaggcttccgagaacgagacggatatggaggacccccgtgagatccagactgactcgtggcggaaacgcggggagtctgaagaacctagttctccccagagtttgtgccaccttgtggcacccgggcacgaacggagcggctgcgaaactcctgttagtgtcgattctatccctctggagtgggaccacaccggcgatgtcggagggtcaagctcacatgaagaggacgaggaaggcccctattactctgccttgagtgggaaatctatcagcgacgggcactcctggcatgtccccgatagtccttcctgtccggagcaccactacaagcagatggagggcgatagaaatgtgccacccgtgcctcccgcgagctcaaccccttataagcccccatatgggaagttgcttctacctcccggcactgatggcggaaaggagggcccccgtgtgctcaatggaaatccacaacaggaagatggagggcttgcaggcatcacagagcaacagtctggggcctttgatcgttgggagatgatccaagcgcaggaactgcacaacaagctgaaaatcaaacaaaatctgcaacagctcaattcagatattagcgccatcactacctggctcaaaaagacggaggcagagctcgagatgctaaagatggcgaagcctcctagtgacatccaggaaatagaactgagagtcaaaagacttcaggaaatattgaaggccttcgacacatacaaagccctggtggtatctgtgaatgtgagctctaaggagtttctgcaaaccgagagtcctgaaagtactgagctccagtctcgcctgcggcagttgagtttactctgggaggccgcccagggggctgtggacagctggcggggcggattaagacagagtttaatgcagtgtcaggattttcaccagctgtctcaaaatctgctcttgtggctcgccagcgccaaaaatcgccggcagaaggcccacgtgacggatccaaaagcagatccacgggccctgctcgagtgcagaagagaactgatgcaactggagaaagagctggtggaacgtcagccacaggtcgacatgcttcaggagatctccaactccctgctcatcaagggacatggagaagattgcatcgaagctgaagaaaaagtccacgtcatcgagaaaaagctcaagcagttgcgggagcaggttagccaggatttgatggctttgcagggaacccaaaacccggcttcacctttgccctcattcgatgaggtcgatagcggagatcagccgcccgccaccagcgtacctgccccgagagcgaaacagttccgggcggtgcggactacagagggtgaggaggagacagaaagcagagtgccaggcagcacacgcccccagcggtcctttctctcacgggtggttcgcgctgccctgcctctgcagctgcttctgctgctcctgctccttctggcgtgcctcctgccaagctctgaggaggattattcatgcacacaggctaacaatttcgcccggagcttctaccctatgcttagatacaccaacggcccgcccccgacttag

SEQ ID NO: 185023 - DNA, 2292 bp, Artificial Sequence
  derived and/or modified sequence
atgagcatggagcggcggatgaagatcgaggagacctggcggctgtggcagaagtttctggacgactattcgcgcttcgaggactggttaaaatctgccgagcgaactgccgcgtgtcctaactcttcagaggtcctttacacctcagccaaagaggaacttaagaggtttgaggcctttcagcgtcagatccatgagcgtttgacccagctggagcttatcaacaagcaatacagaaggctcgcaagagaaaacagaaccgacacagcgtctcggctcaagcagatggtgcacgagggaaaccagaggtgggacaacctccagaggagggtgactgcggtgctgagaaggctgcgccactttaccaatcagagggaggaattcgaaggtacccgggagagcattctcgtgtggctgactgagatggaccttcagctcacaaatgtagagcactttagcgagtccgacgctgacgacaagatgcgtcagctgaacgggttccagcaggagattacactcaatacaaacaagatcgatcaattgatcgtctttggtgaacaactgatacagaagtcagagcctctggacgccgtccttattgaggatgaactcgaggagttgcacagatactgccaggaagtcttcgggagggtgagccgctttcaccgccgccttacaagctgtacacccggcctcgaggacgagaaagaggcttcagaaaatgagactgatatggaggatcctagagaaatccaaacagactcatggcgaaagcgcggggaatcagaagagccctccagcccccagagcttgtgtcacctggtggcaccaggccatgaacgaagcggctgtgagacaccagtttccgtggatagcatccccctagagtgggatcatacaggggatgtcgggggcagcagcagtcacgaggaagacgaagaaggcccatactactcagctctctccggtaagagtatttccgatggccatagctggcacgtgccagacagccccagctgccctgaacaccactacaaacaaatggaaggcgataggaatgttcctccagtgccccctgccagcagtactccttataaacctccttacgggaaactcctgctcccccctggcacagatggcgggaaggagggccctagggtgctgaatggcaacccgcaacaggaggatgggggcctggctggaatcaccgagcagcaatctggcgccttcgatcgatgggagatgattcaggcccaggaactgcacaacaagctgaaaattaaacagaacctccagcagctgaattcagacatcagcgccatcactacctggctgaagaagactgaggccgagttagagatgctgaagatggccaagccaccatctgatatacaggagatcgagctcagagttaagcggttgcaggagatcctgaaagcatttgatacttataaggccctggttgtgtctgtgaatgtctcctccaaggagttcttgcagacagagtcaccagagtccacagaattgcagtcacgcctgcggcaactgagcttgttatgggaggcagcccagggcgccgtcgactcctggagaggcggtctgaggcagagtttgatgcagtgtcaggactttcatcagctttctcaaaaccttcttttatggttggcctcggccaagaaccgacggcagaaagcacacgtgacggacccaaaagccgacccccgcgccctgctcgagtgtcgaagggagctgatgcagttagaaaaagaacttgtggaaaggcagcctcaggtagatatgctgcaggagatttcaaatagtcttctgattaagggccacggcgaagactgcatagaggccgaggagaaggtgcatgtcattgagaagaagttgaaacagctcagagagcaagtgtcgcaggacctcatggctctgcagggcacacagaatcccgcctcccctcttccctcgtttgacgaggtggactcgggagaccagccgcctgccacctctgtaccagcacctcgcgctaaacagttccgggccgtgcgcacaaccgagggagaggaggagacggaatcaagggtcccggggagtactaggcctcaacgcagtttcctatctcgggtggtccgtgctgcattgccgctgcagttactgctgctcctgctgcttctcttggcctgtctcctgccatcatctgaggaggactacagctgcacacaggcaaataatttcgctaggagcttctacccaatgcttcggtatacgaacgggcccccccccacttag

SEQ ID NO: 185024 - DNA, 20658 bp, Artificial Sequence
  derived and/or modified sequence
atggccagtagcccagaactgcctaccgaggacgagcagggatcctggggaattgatgatctgcacatttcgctgcaggcagagcaggaggatacccagaagaaagccttcacttgttggataaactcacaacttgcccgacatacttccccaagtgtaatctctgatctgttcaccgacataaagaaggggcatgttctcctggacctgctcgaggtgctgtcggggcaacagctcccccgagacaaaggaagcaatacctttcagtgtcggatcaacatcgagcatgccctcacatttctgcggaaccgatcaatcaagttaatcaacatccatgtgaccgacatcatcgatggcaatccctccattattctcggcctgatttggacaataatcctccactttcacatagaaaagctcgcacagacattgtcctgtaactataatcagccatctttggacgatgtgtccgtcgtcgacagttctccagcctcctcccccccagccaagaaatgttcaaaggtccaggcaaggtggcagatgagcgccagaaaggcccttctgctatgggcccaagagcagtgtgccacatacgagagcgttaacgtaactgacttcaaaagctcatggcgcaatgggatggcattcctggccatcatacatgccttgcggccagaccttattgacatgaaatctgttaagcataggagcaacaaggataacttgcgggaagcgttcagaattgccgagcaggagctcaagatcccacgcctcctggaacccgaggatgtcgatgtcgtggacccagatgaaaagagcattatgacgtacgtcgcccagtttttgcagtactccaaggacgcacccggtacaggcgaggaagcacagggcaaggtcaaggatgctatgggatggcttaccttacagaaggaaaagttgcagaaattgctcaaggactcggaaaacgacacatattttaagaaatacaatagcctgctgtcctttatggaatcttttaatgaggaaaaaaaatcattcctggatgtgctcagtatcaaacgcgatcttgacgagctggacaaggatcacttgcagttgcgggaggcatgggacggtctggatcaccaaattaacgcatggaaaattaagttgaattatgccctccccccacccctgcaccagacagaagcgtggctgcaagaggttgaggagctaatggatgaagatctatccgcatcccaggaccactcccaagccgtgacactcatccaagagaagatgactcttttcaagagcctgatggaccgattcgagcaccattcaaacattctattgacttttgaaaacaaagacgagaatcatctgcctctcgttccacctaacaaactggaggagatgaaacggagaattaataacattctcgagaagaaattcattctcctgctggagtttcattactataagtgtctagtgctgggtctcgtggacgaggtaaagagtaaactcgacatatggaacatcaaatatggaagtagggaatccgtggagctgttactggaggactggcacaaatttatcgaggagaaagagtttctggctcgcttagacacctcctttcagaagtgcggggaaatttataagaacttggcaggggaatgccagaatattaacaaacagtatatgatggttaagtcggatgtgtgcatgtataggaagaacatatacaacgtcaagagcactctgcagaaggtgctggcctgttgggccacgtacgtcgaaaatctgagacttctacgtgcgtgtttcgaagagactaagaaagaagaaatcaaggaggtgccatttgagactctggctcagtggaatctggagcacgccacacttaatgaggcagggaattttttagtggaggtgagtaatgacgtggtggggtcgtcgattagcaaagagttacgcaggctgaataagagatggagaaagctcgtgtccaaaacccaattggagatgaaccttccactgatgataaaaaagcaagaccagccaacattcgataactcagggaacattttgtcaaaagaagaaaaagccaccgtggagttcagcacagacatgtctgtggagctgcccgagaactacaaccagaacattaaagcaggtgaaaaacacgaaaaggagaacgaggaattcaccggacagctgaaggtggctaaggatgttgagaagcttataggccaggtcgagatttgggaagcggaggctaagtctgtgttggatcaggacgatgtcgacacctccatggaggagtcactgaaacatctcatcgcaaagggtagtatgtttgacgagttgatggccagatctgaggacatgttacagatggacatccagaatatctcctcccaagaatctttccagcacgtcttgactactggtctgcaagcgaaaatacaggaagctaaggagaaggtccaaattaatgtggtgaaattgatcgcggctttaaagaaccttaccgatgtctcacctgatctggacattcgactcaaaatggaggagagtcagaaggagttggagagctacatgatgagagcgcagcagttgctgggccaacgcgagagccccggagagctgattagcaaacacaaggaagcattgataattagtaacacaaagtctcttgcgaaatatcttaaggcagtcgaagaactgaaaaacaatgtcacagaggacataaagatgagcttagaagaaaagtccagggatgtatgcgcgaaatgggaatcattacatcacgagttgtctctctacgttcagcagctgaaaatagacatagaaaagggtaaactgtctgacaacatccttaagctggaaaagcaaattaataaagaaaagaagctaatccgcaggggaagaactaaggggttaataaaagaacacgaggcgtgcttcagtgaggaaggctgcttgtatcagttaaatcatcatatggaggtgctgcgagaactatgcgaggagctcccttcacagaaaagccaacaagaggtgaaaaggctcctgaaggattacgagcaaaaaatcgagcgtctgttgaagtgtgccagcgagatccacatgacactgcagcctactgccggtggcaccagcaagaatgagggaactatcacgaccagtgaaaaccgaggtggtgacccccattcagaagcccctttcgccaaaagcgataaccagccaagcaccgaaaaagcgatggagccaaccatgaaatttagtcttgcaagtgttcttagaccactgcaagaagagtccattatggagaaggattacagcgcatcgataaatagcctcctggaaagatacgatacctacagagatattcttgagcaccaccttcagaataacaaatttagaattacatctgatttttcctccgaagaagatcggtcaagctcttgtctgcaagctaaactgaccgatcttcaagtcatcaagaatgagacggatgccaggtggaaggaattcgagattataagcttaaagctggaaaaccacgttaacgatattaaaaaaccattcgttatcaaggagcgggacaccttaaaggaaagggaaagagaactccagatgaccctgaatactagaatggagagcctggagaccgcattgaggctcgttcttccagtagagaaggccagtttgctgctctgcggctccgatctgcccctccataaaatggctattcaggggttccacctaatcgatgccgatcggatctaccagcacctgcgcaatattcaggatagcatagcaaaacagatcgagatttgcaaccgccttgaggagccaggcaatttcgtgttgaaagagctgcatccgttcgacctgcatgccatgcagaacataatcctgaaatacaaaactcagttcgagggcatgaatcatagggtgcaaagatcagaagacactctgaaagctttggaagactttttggccagtcttagaactgcaaagctgtcagccgagccagtgacggatttgtctgctagcgacacccaggttgcgcaggagaatacacttaccgtgaagaacaaggaaggtgagatccatctgatgaaggataaagcgaagcacctggacaagtgcctgaagatgctggacatgtccttcaaagatgccgagagaggcgatgacactagttgtgagaacctgcttgacgccttcagcattaagctgtcagaaacacatggatatggggtgcaagaagagtttactgaggaaaacaaactcttagaggcctgcattttcaaaaataacgaactgctcaagaatatccaagacgtgcagtcacaaatcagcaaaattggacttaaggatccaaccgtgcccgctgtgaaacaccgcaaaaagtcactgattagattagataaggtcttggatgagtatgaggaggagaaacgacatcttcaggaaatggctaattccctcccccacttcaaggacggcagagagaaaactgttaaccagcaatgccaaaatacagtggtgctgtgggagaataccaaggccctggtgaccgaatgcttagagcagtgtgggcgagtgctggaactactcaagcagtatcagaactttaagagtattctaactactctgattcagaaagaggagtctgtaatctccctgcaagcaagttacatgggaaaagaaaatctaaagaagagaattgctgagattgaaatcgttaaggaggagtttaacgaacatttagaggtcgtggacaagattaatcaggtatgtaagaacctccagttctacttaaataaaatgaagacctttgaggaaccaccattcgaaaaggaggcaaacattatcgttgatcgatggctggatatcaacgaaaagacggaggactactatgagaatctcggacgggcactggcgttatgggataaactgttcaaccttaaaaacgtgatcgacgaatggaccgagaaagctttgcaaaaaatggaactgcatcagctgaccgaggaagatcgggaaaggctaaaggaagaattgcaagtgcatgaacaaaagacttctgagtttagccgaagggttgcagagattcagttcctgctgcagagttccgaaatccctttggagctgcaggttatggagagctccattctgaataaaatggagcacgttcagaagtgcttaactggagagtccaactgccatgccttgagcggtagcacagcagagttacgggaggatctggatcaagccaagactcagatcggaatgactgaatctctcttgaaggctttatcgccctctgacagtttagaaatctttaccaaactcgaagaaatacaacagcagattctccaacagaagcattctatgatcctgctggagaaccagattgggtgtctcactcctgaattatcagagttgaagaaacagtatgaatctgtgagcgatctgttcaatactaaaaaatccgtgctgcaggaccacttctccaaactactgaatgatcaatgcaagaatttcaacgactggtttagtaacatcaaagtcaacctcaaggaatgtttcgagtcatccgaaacaaaaaagtcggtggaacagaagttacagaaactctctgacttcctgactcttgaaggtaggaatagcaaaatcaaacaggtggattctgtgcttaagcatgtaaaaaagcacctccccaaggcccacgtaaaagaactcatctcatggctcgttggccaggagttcgagctcgagaagatggagtccatttgccaagctcgcgctaaagagctggaggacagcctgcaacagctcctgcgcttgcaggacgatcaccgaaacctgagaaaatggctgacgaaccaggaagaaaagtggaagggaatggaggagccaggagaaaagaccgagctgttctgccaagctttggctagaaagagggagcagtttgagagcgtggcacagctcaataacagccttaaggaatatggctttactgaggaagaagagatcattatggaagccacctgcctcatggaccggtaccagactctcctgaggcagctctccgagatcgaggaggaagataagctcttgcctacagaagatcagtcattcaatgaccttgcgcatgacgttattcactggataaaggaaattaaagaaagtttaatggtgctgaactcctcggaaggcaagatgccacttgaggagcggattcagaaaatcaaagagataattctgcttaagcccgaaggagatgcacgcatagagaccatcatgaaacaagccgaatcttccgaggcacccctggtccagaagacccttactgatatatcaaatcagtgggataatactctgcatcttgcgagcacttacctcagtcaccaggagaaattgctactggaaggcgaaaagtatttgcagtccaaagaagacttgcggctgatgctgattgagttgaaaaagaagcaggaggccggattcgctttgcagcacgggttacaggaaaaaaaggctcagttaaaaatttacaaaaaatttctgaaaaaggctcaggatctcacttccctcttgaaggagcttaagtctcagggtaattatctcctcgaatgtaccaagaacccatccttctctgaggaaccgtggctagagatcaaacacctccatgaatccctgctgcaacaactgcaggactccgtgcagaacctagatggacatgtgcgggagcacgactcttaccaggtctgtgtgacagacctgaacacgaccctggataacttttcaaaagagtttgtctcattcagcgataaacccgtcgaccagattgccgttgaagagaagctgcagaagctccaggagctcgaaaacaggctgagccttcaagacggcaccctcaagaagattttggccttggccaaatccgttaaacagaatacaagtagtgtgggacagaaaattattaaggacgatataaagtcactccagtgcaaacagaaggacctggaaaataggttagcctccgccaaacaggagatggagtgttgcctcaatagcattctgaagagcaagcgcagcacggaaaaaaaggggaaatttacgctccctgggagggaaaagcaagctacatcagacgtgcaagaaagcactcaggagtccgctgccgtcgagaagctggaggaggactgggagatcaacaaagacagcgcagtcgaaatggccatgagcaagcagctgtcacttaacgcacaagaaagcatgaagaacactgaagacgaacggaaagtgaacgagctacagaatcagccactagagctcgacacaatgcttcggaacgaacaacttgaagaaattgaaaaactgtacacacaactcgaagctaagaaagcagccataaaaccgttggagcagacagagtgtctgaacaagacggagactggggctctggtactgcataacatcgggtactcagcacaacatctagataaccttttgcaagccctcatcacactgaaaaagaataaggagagccaatactgcgtgctacgcgattttcaggaatatctcgcagctgtggaatcaagtatgaaagcactgctcactgacaaggagtctctaaaggtcggcccattagactccgttacatacttagataagattaagaagttcattgcttctattgagaaggagaaggattctttggggaatctgaaaattaaatgggagaacctcagtaatcatgtgacagacatggacaagaaactgttggagagccagatcaagcagttagagcatggatgggaacaggtcgagcaacagatccagaaaaagtactcacaacaggtggttgagtatgatgagtttacaacactcatgaataaggtgcaggatactgagatttctctgcagcagcaacagcaacatctgcagctgcgtcttaaatctcccgaggagcgggctgggaatcagagcatgatcgcccttaccacggatctccaggccacgaaacacggatttagtgtgcttaaaggccaggcagagcttcaaatgaaaaggatttggggtgaaaaagaaaaaaaaaacctcgaagacggcattaacaatctcaagaagcagtgggaaaccctggagccccttcacctggaggccgagaatcaaatcaagaagtgtgacattcggaataaaatgaaagaaaccatcctttgggccaagaacctgttgggggagttaaatcctagcatcccgctactgcctgacgacatcctctcccagatcagaaaatgtaaggtgacacatgacggaattctagccaggcagcaatctgttgagagcctggccgaggaagtgaaagacaaagtgccctctctgacaacgtatgagggttctgacctaaacaacaccttggaagaccttaggaatcagtatcagatgcttgttctcaagtccacacaacgctctcaacaactagagttcaaacttgaggaacggtccaacttctttgcaatcatccggaaattccagctgatggtgcaggagagcgagactctcatcatacctagggtcgaaaccgccgctactgaggcagaactcaagcaccatcatgtaaccctcgaggcgtcccagaaagaacttcaagaaatcgactctgggattagcacccatctgcaggagctgacgaatatctacgaggagttaaatgttttcgagcggctcttcctggaagaccagttgaagaatctgaaaattcggactaacaggattcagcgtttcattcagaacacgtgtaatgaagtggagcacaaaataaagttctgtaggcagttccacgaaaagacctcggccctgcaggaagaagccgacagtatacagagaaacgagttattgctgaaccaagaggtgaacaagggtgtgaaagaggagatctataacctgaaggatcggttgacagctatcaaatgctgcatcctacaggtacttaaattaaaaaaggtgtttgattacatcggtctgaattgggatttctcccaactggatcagctccagacacaagtgttcgaaaaagaaaaagagttagaagagaaaattaagcagctggatactttcgaggaagaacacggcaagtatcaggccctgctctctaaaatgcgagccatcgaccttcagatcaagaagatgaccgaagtggtgcttaaggccccagacagctcccccgagagccgcagacttaatgcacagattctgtctcaacggattgaaaaggccaagtgcctatgtgatgagatcattaaaaagctgaacgagaataaaaccttcgatgattcctttaaagagaaggaaatcctgcaaattaaactgaatgcagaggaaaacgacaaactgtacaaggttttgcagaatatggtacttgaactgtcacccaaggagctcgatgaaaagaattgccaagacaagctcgagacgtcattacatgtgctcaaccagattaagtctcagttacaacaaccgctcttgataaacttggagatcaaacatatccaaaacgagaaagacaattgtgaagctttccaagagcaggtatgggctgagatgtgcagcatcaaggcagtgactgctatcgagaagcagcgtgaggaaaacagctcagaggcttcggacgttgaaactaagctgagggagttcgaggatctccagatgcaacttaatacgagcatcgacctgcgtaccaatgtgctcaacgatgcttatgagaatctcaccagatacaaagaagctgtgacccgagcggtcgagagcattacgagtctggaggccataatcataccctacagggtcgatgtagggaatccagaggagtcactagagatgcctctgagaaaacaggaagagttagagtccacagtagcccacatacaggacctcaccgaaaaactgggtatgatttcatcaccagaagctaaattacagcttcagtatactctgcaggagctggtgtcaaagaatagcgctatgaaggaggcctttaaagcccaggaaacggaggccgaaaggtatttggagaactacaagtgttacaggaagatggaagaagacatctatactaacttgtccaaaatggaaactgtgttgggtcagtctatgtcgtccctgcccctttcttatcgagaggccctggagagactggaacagtcaaaggccctggtgtctaatcttatttctacaaaggaagaactaatgaagttacgacagattctcagactactgaggttgcggtgtaccgagaacgatggcatctgcctcctcaaaattgtctccgcgctttgggaaaagtggctgagcctactggaagccgctaaagaatgggagatgtggtgtgaggagcttaaacaggagtggaaatttgtgagcgaggaaattgaaagagaggcgattattcttgataacctacaggaagagctcccagagattagcaagaccaaagaggctgccactaccgaagagttgtcggaactcctggactgcctttgtcagtacggggagaatgtggagaaacagcagctgctcctgactcttctgctccagagaattcgtagcattcagaatgtgcccgaaagtagcggcgcagtggagaccgtgcccgctttccaggaaattacgagcatgaaggagagatgcaacaaactgctgcagaaggtgcagaagaataaagagctggtccagactgagattcaagagaggcattctttcacaaaggagattatcgccctgaaaaatttcttccaacagacgacaacgtcattccagaatatggcattccaggatcatccagaaaaaagtgagcagttcgaggagctgcagtcaattctgaagaaaggaaagctgacgtttgaaaacattatggaaaaactgaggattaagtacagcgagatgtacaccatcgttccggctgagatcgaatcccaggtagaggaatgtaggaaagcactagaagatatcgatgagaagatctcaaacgaggtgctcaagagctccccaagttacgctatgagacggaagatcgaagagattaacaacggactgcacaacgttgagaagatgctgcaacagaaatccaagaatatcgagaaggcccaggagattcagaagaagatgtgggatgaactggatctctggcactctaagctaaatgagttggattccgaggtacaggacatcgtcgagcaggaccctgggcaggcccaagagtggatggacaacttaatgatcccttttcaacagtaccaacaagtgagccagagggctgagtgtagaactagccagctaaacaaagcaaccgtgaaaatggaggaatactcggacctgctgaaaagtacagaggcctggatagaaaacacgagccacctattggccaaccccgctgactacgactccctgcggacgctctctcaccatgcaagcaccgttcagatggccttggaagacagtgaacagaagcacaacctactgcattccatatttatggacttggaagatctgagtatcattttcgagacagacgagttgacccagtccatccaagagctgtccaatcaagtgaccgctctccaacagaaaatcatggaatcgttacctcagattcagcggatggctgacgatgtggtcgcaattgaatcagaggtcaagtctatggaaaagagagtgagcaagattaaaactatacttctgagcaaagagatatttgacttcagcccagaagagcacttgaagcatggagaagtgattctggagaacatcagacctatgaagaaaacaatcgcagaaattgtgtcttaccaggttgaactgagactcccacagacgggcatgaagccattgccagtgttccagcgaaccaatcagcttttgcaagacatcaaactgttggaaaatgtcacccaggagcaaaacgagcttttgaaggtggtgatcaagcagaccaacgaatgggatgaagagattgaaaatttaaaacagatcttgaataactactctgcccagttctcattagaacacatgagtccagatcaggccgataaacttccccaattgcaaggcgaaattgagcggatggagaagcagattctgagtcttaaccaaaggaaggaagacctgctggtggatctcaaagccaccgtactgaacctacaccaacatctcaagcaggaacaagaaggggttgaacgcgacaggctcccagccgtgacatccgaggaaggaggcgtagcagagagggacgcatccgaacggaagctcaaccgaaggggttccatgtcttacctggcagcagtcgaggaagaggtcgaggagagtagtgtgaaaagcgataacggcgacgagaaagctgagccctcgccccagagctggtctagtctctggaaacacgacaaagatatggaggaagatagagcgtcatcatctagtggaactatcgtccaggaagcatatggcaagatctctacaagcgataactcgatggcccagatccttacccctgatagcctgaataccgaacaggggccagagtgcagtctgcgaccaaatcagaccgaggagggtaccacacccccaatcgaagccgatacccttgatagctccgatgctcaagggggactcgaaccaagagtcgaaaagaccaggcctgaaccgaccgaggtccttcacgcctgcaaaactcaggttgctgagctagaattatggctccagcaagccaatgtggctgtggaaccagagacactgaatgccgacatgcagcaggtgctagagcagcaactggtgggttgtcaggctatgctgacagaaattgagcacaaggttgcctttctacttgaaacatgtaaggaccagggacttggcgacaacggcgctacacaacacgaggccgaggctctctctctcaaactaaaaactgtcaagtgtaatcttgagaaggtgcagatgatgttacaagaaaaacattcagaggatcagcacccaaccattttaaagaagtcctccgaacccgaacaccaggaagcactgcagccagtgaacctatccgagcttgaatccattgtaaccgagcggcctcagttcagtcgtcaaaaagacttccaacagcagcaggtcctcgagttgaaacctatggagcaaaaagatttcatcaaattcatagagtttaacgcgaaaaaaatgtggcctcaatattgccaacacgacaacgatactacacaagagtcatctgcaagtaatcaggccagtagtccagagaatgacgtgccggacagtatcttgagcccacagggccagaacggagataagtggcagtatcttcatcatgagcttagctccaaaattaagcttcctctacctcagctggtcgaaccacaggtaagcaccaatatgggcatattgccctctgtcacaatgtataacttccgatatcccactactgaggaacttaagacttacaccacccagcttgaagacctgcggcaggaggcctcaaacctgcagacacaggaaaacatgacagaggaggcctatattaacctggataagaaactattcgaactctttttgacactgagccagtgtcttagctcggtggaagagatgctcgagatgccacgactgtacagggaggacggcagcggacagcaagtgcactacgaaaccctggctctcgagctgaaaaaactgtacctcgcgctctctgacaaaaaaggcgatcttctcaaggctatgacttggccaggtgagaacacgaatcttctgcttgagtgttttgacaacctgcaggtgtgtctggagcacacccaggccgctgcagtatgtaggagcaagtccctgaaggccggactcgactacaaccgttcttaccagaatgaaattaaacgactgtaccaccagctaataaagtccaaaacatcactccagcagtctttgaacgaaatttcagggcagagtgtcgcagaacagctccagaaggcagatgcctacacagtggaacttgagaacgccgagtctagggtggctaagctgagagacgaaggcgagaggctgcacttaccgtacgcactgctgcaggaggtgtataagctggaggacgtactggattccatgtggggaatgctcagagccaggtatactgagctgagttctccttttgttactgaatcccagcaggacgcactgttacagggcatggtcgagttagtgaagataggcaaggaaaagctcgcccatggtcatcttaagcaaacaaaatccaaggtcgctctgcaggcccagattgagaaccataaggtattttttcagaagttagttgcagacatgctgctgatccaagcctactcagcgaagatcctcccctctctacttcaaaaccgggagactttctgggcagagcaagtaacagaagtcaaaatcttggaagagaaatcaaggcaatgtgggatgaagctgcagagcttactgcagaaatgggaagaatttgacgaaaattacgcgagccttgaaaaagatctggaaattctgatcagcacattaccctctgtcagtctggttgaagagaccgaagagagactggtagaaagaattagcttctaccagcagatcaagcgtaatattggcggaaaacacgcaaggttgtatcagacacttaacgagggcaaacagctggtggcctctgtgtcttgcccggagttggaaggacagatagccaagttagaagagcagtggctgtcactgaacaagaagatcgaccacgaactgcatcgtcttcaggctctcctgaagcacttgctttcctacaaccgtgactcagatcagttgaccaagtggctggagagttcccagcacaccctgaactactggaaagaacagtctctgaatgtaagccaggacctggacaccattcgcagcaatattaacaacttttttgagtttagcaaggaggtagacgagaaaagttctttgaaaactgccgtgatatccattgggaaccagctgcttcatcttaaggagacggacaccgcgacactgcgtgcctcgctagcccagtttgagcaaaagtggactatgctcattacacagctccccgatattcaggaaaagttgcatcagctgcagatggaaaaactgccctcccgcaaggcaattacagaaatgatatcatggatgaataacgttgagcaccagacctccgacgaagatagtgttcatagtccatcgagcgcctctcaggtgaagcatctactgcaaaagcataaagaatttagaatggagatggattataagcaatggatcgtggactttgttaatcaaagcttgttacagttaagcacgtgcgatgtggagtccaagcggtatgaacggaccgagtttgcagagcatctgggcgagatgaacaggcagtggcatcgcgtgcacggtatgttaaaccggaagatccaacatttagaacagctgctggagagtatcactgagagcgaaaataagattcagatccttaacaactggttagaggcccaagaagaacggctcaagactttgcagaaacccgagtcggttattagcgtgcagaagctgctgttggactgccaggacatagagaatcagcttgccataaagtcaaaggcattagatgaattaaaacagtcatacctgaccctggaatcaggtgccgtgcccctcctcgaagacaccgcctcaagaatcgacgagttatttcaaaaaaggagcagcgtcctgacccaggtcaaccagctgaagacttcaatgcagtccgtgctccaggagtggaaaatttacgaccagttgtacgatgaagttaatatgatgacaatacgattctggtactgcatggagcacagcaaacccgtggtgttgtccctggagacactcagatgtcaggtggagaacctccagtccctgcaggatgaagccgagtctagcgaaggatcctgggaaaaactgcaagaggtgatcggtaagttgaagggattgtgtccatctgttgccgagattattgaggagaaatgtcagaatactcataaacggtggacccaagtgaatcaggcaattgcagatcaactccagaaagctcagagcttactccaactatggaaggcttactctaatgcccatggcgaggctgccgctcgacttaagcaacaagaagctaagtttcagcaactggctaacatctctatgtctggtaacaacctcgccgagattctgccacctgccctacaggacatcaaggaactacaacacgatgttcagaaaaccaaggaggctttcttgcagaacagttcagtactcgacagattgccacagcccgcagagtcatctacgcatatgctgttgccaggacctctccactctctgcagagggcggcttacctcgagaagatgctgctggttaaggcaaatgagttcgaattcgtgctgtcacagtttaaagacttcggtgtaaggctagagtcccttaaggggctcatcatgcacgaggaggaaaatctggacaggctgcatcagcaggagaaggaaaaccctgactctttcctgaaccatgtcctggccttgaccgcacagtcaccagacattgagcatttaaatgaggttagcctgaagttgcctctgtccgacgtggccgtgaaaacactgcagaacatgaacagacaatggatccgggcaacagctaccgctttggagcgttgcagcgaactccaggggattggacttaatgagaaattcctctactgctgcgaaaagtggattcagctccttgagaaaattgaggaggctttaaaagtggatgtggccaactccctgccggaactgctagagcaacagaagacttacaaaatgcttgaagcagaggtatccatcaatcagactattgccgactcttatgttacacagagccttcagctgctagataccacagaaattgaaaaccgccctgaatttataacggagttctccaagttgacggataggtggcaaaatgcagttcagggagttaggcagaggaagggggatgttgacggcctcgttcgtcagtggcaggatttcaccacctctgttgagaatctgttccgtttcttgaccgatacctcacacctgctgtccgctgtcaagggccaggagcgatttagtctttaccaaaccaggagccttatccatgagctaaagaacaaagagatccacttccagcgcagaaggaccacctgcgcactcaccctggaagcgggtgaaaagctcctcctgactacagacctgaaaaccaaggagagcgtgggccgaagaatctcacagctgcaagattcctggaaggacatggagccacagctcgcagagatgatcaaacagttccaaagcaccgtggaaacctgggatcagtgcgagaagaagattaaagagttgaaatcacgcttgcaagtgctgaaggcccaatcagaagaccctcttcccgagcttcatgaggacctccataatgagaaggagctaatcaaggagctggaacaaagcctggccagctggacacagaacctgaaggagctccagacgatgaaggccgatctgactcggcacgtcctggttgaggatgttatggtgctgaaggagcagatcgagcatttgcaccggcagtgggaagacctctgtcttagagtagcgatccgaaaacaggagatcgaagatcgccttaatacatgggtggtttttaatgagaaaaataaggaactgtgcgcctggttagtacagatggagaataaggtcttacagacagccgatatcagcatcgaagagatgattgagaagctgcagaaggactgtatggaggaaattaatctgttttccgaaaacaaattgcaactgaaacaaatgggggatcagctgataaaggcgagcaacaagtctcgagccgcagagattgatgataagctgaacaaaattaacgatcgctggcagcacctgttcgacgtcattggtagcagagtgaaaaagcttaaagagacgtttgcgttcatccagcagcttgacaaaaacatgtcgaacttacgcacgtggctcgcccgtatagagagcgaactctccaaacccgtggtgtacgacgtgtgcgatgatcaggagatccagaagaggttggccgaacagcaagacctgcagcgtgacatcgaacagcactcagccggagtggagtccgttttcaatatctgcgatgtcctgctccacgacagcgacgcttgcgccaacgaaactgagtgtgactctatccagcagaccaccagatccctggaccgcagatggagaaatatctgtgccatgagcatggagcgaagaatgaagatagaagaaacatggcgtctctggcagaagtttctggacgattactctagatttgaggattggctgaagagtgctgaaagaacagcagcctgtcccaattctagtgaggtgctttacacctccgccaaggaggagctcaaacggttcgaagctttccagcgacaaatccatgaacggctgactcaattagagctgattaacaaacaatacagacggctggcacgtgaaaaccggaccgacactgcctccagattgaagcagatggtccatgaggggaatcagcgctgggacaatctccagagacgtgtgaccgcggttttacggaggctacgacacttcacaaaccagcgggaagagtttgaaggcaccagagagagcatattggtatggcttacagagatggatttgcagttgactaacgtggagcatttctctgagtcggacgccgatgataagatgcggcagcttaatggatttcaacaggagataactcttaatacaaataagattgatcagcttatcgtttttggcgagcagctaatacagaagagcgagcctctggatgccgtcctgatcgaggacgaactcgaagaactgcaccggtattgtcaggaggtgtttggccgtgtttctaggtttcatcgtcgtttgacttcctgcaccccaggcctggaggacgagaaggaagcttctgaaaacgaaaccgacatggaggaccctagagagatacaaacagatagctggcggaagcggggtgaatctgaagagccgagcagccctcaatccctgtgtcatttggtggccccaggccacgagagatccggctgcgaaacacccgtgtccgtggatagcatacctctcgaatgggatcacacgggagacgttggcggttctagtagccacgaggaggacgaggaaggaccctattacagtgccctaagcggaaaatctatctcagacggacattcctggcatgtcccagattcacccagctgtcctgagcatcactacaagcagatggaaggtgacaggaacgtcccaccagtgccgcctgctagttccacaccctataaacccccttatggcaagttgctcctcccacctggcacagacggtggtaaagaggggccaagagttctcaacgggaacccacaacaggaggacggagggcttgctggcattacggaacagcagtcgggcgctttcgatagatgggagatgattcaggcccaggaactccataataaactgaaaattaagcagaaccttcagcagctgaattcagacatctcagcaattacaacatggttgaaaaaaaccgaagctgagctggagatgcttaagatggccaaacccccttctgacatccaggaaatcgaactaagggtgaaacgccttcaggagatccttaaggccttcgacacctataaagcactggtagtgagcgtgaacgtgtcctcaaaagagttcttgcagactgagagccccgagtcaaccgagctgcagagcaggttgcgccagttgtcactgttatgggaagctgctcagggggctgtagattcatggcggggaggattgaggcagagcctgatgcagtgtcaggacttccaccaattatctcaaaacttgctgctttggttagcctccgcaaaaaatcgcaggcagaaggcacatgtgaccgatccaaaggctgatcctagggcactgctggagtgccgcagagagttaatgcaactggagaaggaactggttgagaggcagccgcaagtagatatgctgcaggaaatatcaaactccctactgataaagggacacggcgaggattgcatcgaggccgaagaaaaggtgcacgtgatcgagaaaaaactcaaacaactgagagaacaggttagccaggatctaatggccttacaagggacacagaatcccgcttcacctctgccttctttcgacgaggtggatagcggcgatcagcctcccgctacttcagtccccgctccacgcgcaaagcagtttagggccgtgcggactaccgaaggggaagaggagacggagagtcgcgtgccaggcagcacccgtccccagcgctccttcttatcacgggtggttagggcagccctgccccttcagctgctgctgttgctcctcttgcttctcgcttgcctgctgccaagttccgaggaggactactcttgcacgcaagcaaataatttcgctagaagcttctatcctatgctgcggtatactaacggcccaccgccaacttag

SEQ ID NO: 185025 - DNA, 9813 bp, Artificial Sequence
  derived and/or modified sequence
atggagaagctgcgaatcaaatacagcgaaatgtatacaatcgtgcctgccgagattgaaagccaggtggaggagtgccgaaaggcgctggaggacatagacgaaaaaattagtaatgaagtcctgaaatcgagcccaagctacgccatgagaagaaaaattgaagagataaataatggcctgcacaatgtggaaaagatgctgcagcagaagtccaagaatatcgaaaaagcccaggagattcagaaaaagatgtgggacgagctcgatctgtggcacagcaaacttaacgaattggatagcgaggtccaggatatagttgaacaagatcctggtcaggctcaggaatggatggataacctcatgatcccgttccaacagtaccagcaggtgtctcaaagagctgagtgtaggacatcgcagctcaacaaggcaacagtcaaaatggaagagtacagcgatctgctgaagtcaactgaggcttggatcgagaacacgtcccacctgctggccaaccctgctgactacgattcactgaggaccctgtctcatcacgcgtccactgtacaagacagcaaatgttttagaagcggcccacgacccaacatctacgttagctactatgtcaccgttatacaaatggccttggaggactccgaacagaagcacaatcttctccatagtattttcatggatctcgaagacttatccattattttcgaaaccgacgagctcacacaatcaattcaagagctgagcaatcaggtgacagctctccagcaaaagataatggaatccctgccacagatccagagaatggcggacgatgtggtcgcaatcgaaagcgaggtgaagagcatggagaaaagagtgagcaagataaagaccattttgctttccaaagagattttcgacttctcacccgaggagcacttaaagcatggcgaagtgatcttagaaaacatccggccaatgaagaagacaatagcggaaatcgtatcctatcaggtggagctccggcttcctcagaccggtatgaagcccctccccgtctttcaacggacaaatcagcttttacaagatatcaagttgctcgaaaacgttacccaggaacaaaacgaactgctgaaagtggtcatcaagcagaccaatgaatgggatgaagaaattgaaaacttaaagcagatcctaaacaactactccgcacagttttccctcgaacatatgtcacccgaccaggcggacaaactgccacagctccagggcgagatcgagcggatggaaaagcaaatactgtccctcaatcaacgcaaggaagatctgcttgtggacctgaaagctaccgtactgaatctacaccagcatctcaaacaggagcaggaaggcgtggaacgggatcggctgcccgctgtcacgtccgaagaaggcggagtcgctgagcgggatgcatccgaaagaaagctgaacagaaggggaagcatgagctacctggccgcagtagaggaggaggtggaagagagtagcgttaagtcagacaatggcgacgaaaaggccgaaccatctccccagtcctggagcagcctctggaagcacgacaaagacatggaagaggacagggcgtccagctcctctggcacaatagtgcaggaggcctacggcaagatctctaccagtgataattccatggcacaaatactgactcctgatagccttaacaccgaacaggggccagaatgctccttaaggcctaaccagactgaagaaggcactacacccccaatcgaagccgacactcttgattcttccgatgctcaaggcggtctggagccaagagtggagaagacacgacccgaaccaaccgaggtattacatgcctgcaaaacacaggtcgccgagctggaattgtggctgcaacaagccaatgtggccgtcgaacccgaaactcttaacgcagatatgcaacaagtgctcgaacagcagctggtgggctgccaggccatgttaactgaaatcgaacacaaagtagcttttcttctagagacgtgtaaggatcagggactgggtgataatggggcaacccaacacgaggccgaagctttaagtctgaagttaaagaccgtgaaatgtaatttggaaaaagtccagatgatgcttcaagagaagcactctgaggaccagcatccaacgatcctcaaaaagtcaagcgaacctgagcaccaagaagctctacagccggttaacctctctgagcttgaaagcattgtaaccgaacgacctcagttcagccggcagaaggacttccagcagcagcaggttctggagctgaagccgatggagcagaaggattttatcaaattcatagagttcaacgccaaaaaaatgtggccacaatactgccagcatgataacgataccactcaggagtcctccgcaagtaatcaggcatcctcacccgagaacgatgtgcctgattccatcctcagtccccagggtcaaaatggtgacaagtggcagtacctccaccatgaattatcaagcaaaattaagctcccgttaccgcagcttgttgagcctcaggtctcaacaaatatggggatcctcccatccgtgacaatgtacaattttcgttatcctaccacagaggaactcaaaacctacactacccagctggaggacctcaggcaggaggcaagcaatctgcagactcaagagaatatgaccgaggaagcctatattaacctcgacaagaagcttttcgagctttttctgaccctgagtcagtgcctgagttccgtcgaagagatgctcgagatgcctcggctctaccgagaagacggctccggccaacaggtgcactatgaaacattggccctcgagcttaaaaagctttatctcgcactttcagacaaaaagggcgacctcctaaaagccatgacatggcctggggaaaacacaaacttgctgctcgagtgcttcgataatttgcaagtatgcctggaacatacacaggcggcagcggtgtgccgatctaagtcactgaaagctggtcttgattacaaccgcagctaccaaaatgaaatcaagagactgtaccatcaacttataaagagtaagacatctctgcaacagagccttaacgagatatctggtcagtctgtagcagaacaacttcagaaagccgacgcctataccgtagaacttgagaatgccgaatcccgtgtcgcgaagttgagagatgagggcgaacgccttcacctgccttatgctctgctgcaggaagtttacaagctggaggatgtacttgactccatgtggggcatgcttcgcgctcgatataccgagctcagctcccctttcgtcactgagagccagcaagacgccctgcttcagggcatggtggaactagttaaaattggcaaggagaagctcgctcacggtcacctgaaacagaccaaatcaaaagttgcgctacaggcacagatcgagaaccacaaggtattttttcagaagctcgtggctgacatgctgctgatccaggcctactccgccaaaatccttcctagcctactccaaaaccgcgagaccttttgggccgagcaggtcactgaggtgaagattcttgaggaaaagtctagacaatgcggaatgaagctgcagagtctgctgcagaaatgggaagaattcgatgagaattacgccagcctggagaaagacttggaaattctcatctctactctcccaagcgtgtctctggttgaagagacggaggagcgactggtggaaagaatcagtttttatcagcagatcaaaaggaatatcggtggcaaacatgcccgactgtaccagacacttaacgaaggaaaacaactcgttgcctccgtctcgtgtcctgagttggaaggccaaatcgcaaaacttgaggagcaatggcttagcttaaacaagaaaatcgaccatgaactgcacaggctccaagccctgctgaaacatctgctctcttataacagagactccgatcagcttaccaagtggctcgagagtagtcagcacacactgaattactggaaggaacaaagcctgaacgtatctcaggatttagatacaatacggtcaaatattaataacttctttgaatttagcaaggaggtagatgagaaaagctctctcaaaactgccgttatcagcatcggaaatcagctcctccatctgaaggaaactgataccgcaaccctgcgggcttctctggcccagtttgagcagaaatggactatgctcataacccaattgccggacatacaggaaaagctacatcagcttcagatggagaagctgcccagccgaaaggcaattaccgagatgatttcatggatgaacaatgtggaacaccagacaagcgatgaagactcagttcatagtccctcttcggctagtcaagtcaagcacttgctgcaaaaacacaaagaattcagaatggaaatggactacaagcagtggatcgtcgattttgttaatcaatcactcctgcagctgagcacatgtgacgttgagtcgaagcggtatgagagaacagagttcgccgaacatctgggtgagatgaacaggcagtggcatcgtgtgcacggcatgctcaatagaaaaatccagcatctggagcagctattggaatccatcactgagagtgagaacaaaattcagattctgaataattggctcgaggcacaagaggaacggttaaagaccctgcagaagccggaatcggttatcagcgtgcagaaactgctgctcgattgtcaggacattgaaaatcaattggcaataaaatctaaggccctcgacgagcttaagcagagctacctgactctcgagtctggtgccgttcccctcctcgaggatacagccagcagaatcgacgaactctttcaaaaacggtcaagtgtcctgacgcaagtaaatcagttaaagacaagcatgcagagcgtgctccaggaatggaagatctatgaccaactgtacgacgaggtgaacatgatgacaatacggttttggtattgcatggagcattcaaagcccgtcgtgctctccctggaaaccctgcgctgtcaggtggaaaatctgcagtcgctccaagatgaagccgagagttctgagggatcatgggagaagctgcaagaggtgatcggcaaactcaagggcttatgtccgtccgtggcggaaatcatcgaggagaaatgccagaatacacataagcgctggacccaggtaaatcaggcaattgctgaccagctccaaaaggcacagtctctcctgcagctgtggaaggcttacagtaatgcccatggcgaagccgcagccagactgaagcaacaggaggccaaattccagcaactcgcaaacatatctatgagtggaaacaatctagcggagatcctgcccccagcactgcaagatataaaagaactgcagcatgacgtccaaaaaaccaaagaagcctttctgcagaatagcagtgtgcttgacagactcccccagcccgcagagtcttccacccacatgctgctgcccggacctttacactcactgcagagagctgcataccttgagaagatgttgttagtgaaagcaaatgagttcgaattcgtgttgtcacagtttaaggacttcggcgtgcgcctggagtcacttaagggactgatcatgcacgaggaggagaaccttgatcgactgcatcagcaggagaaggagaaccctgatagcttcctgaatcatgtgctggctttaaccgcccagtcccccgatatcgaacacctgaacgaagtgagcttgaaactgccgttatccgatgtcgccgtgaaaactctgcagaatatgaatcggcagtggatccgcgcaactgccactgccttggaacgctgctctgaactgcagggaatagggctgaatgagaagttcctctactgttgcgaaaagtggatccagctgctagagaaaatagaggaggccctgaaggtcgatgtggccaacagcctgcctgagcttttggagcagcaaaagacatataaaatgctcgaagctgaggtcagcatcaaccagactatcgctgactcgtacgtgacacagtccctacagctgttagacacaacggaaattgagaacagaccggagtttataactgaattttcaaaattgaccgatcgatggcagaacgccgtgcagggcgtgcgccaacgaaaaggcgacgtggacggcctggtcaggcagtggcaagattttaccacaagcgtagaaaacctcttcagattcctgacagatacaagtcatctacttagtgcagtaaaaggtcaggaacggttcagtctataccagacaaggagtctgattcatgaactgaaaaacaaagagatccatttccagcgcaggagaacgacatgcgctctgacgctcgaagcaggcgagaaattgttgctgacaaccgacctgaaaacaaaagagtcggtagggcgtcgcatcagccaattgcaggattcatggaaagatatggagccccaactcgctgaaatgatcaagcagttccagtcaactgtcgaaacctgggatcagtgtgagaagaagataaaggaactgaaaagtagactccaggtattgaaggcacagtccgaggatccgttgcccgaactacacgaagatctgcataatgagaaagagctaatcaaagagttagaacagagtttggcctcatggactcaaaatctgaaagaacttcagaccatgaaagcagatcttacccgtcatgttttggtggaggatgttatggtgctgaaagagcagatagagcacttgcatcgacagtgggaggacttatgcttgcgcgtcgctattaggaaacaagaaatcgaggaccggctcaacacctgggtagttttcaacgaaaaaaataaagaactatgcgcctggctggtacagatggagaacaaggtcctccagaccgccgacatctcgattgaggagatgatcgagaaactgcagaaggattgtatggaagagataaacctattctctgaaaacaagctgcagttgaagcagatgggggatcaactcatcaaagccagcaacaaatctcgagcggctgagattgacgacaaactgaataagataaacgataggtggcaacatctgttcgatgtgatcggcagcagggtgaagaagctgaaggaaacattcgcattcatacaacagctggataagaatatgagtaatcttagaacttggctcgcgaggatagagagcgagctgagtaaacctgttgtttatgacgtttgtgatgaccaagagattcagaagcgactggcagagcagcaagatttgcaaagggacatcgaacaacactcagccggagtcgagagcgtgttcaatatttgcgacgtgttgttgcatgatagcgacgcatgcgccaacgaaactgagtgcgacagcatccaacaaacgacaagaagtctcgaccggcgttggcgtaacatttgcgcaatgtctatggagagacgcatgaagatcgaggaaacatggcggctgtggcaaaagttcctcgacgactattcccggtttgaagactggctcaaatctgctgagagaacagccgcatgccctaatagctcggaggtactttacacctcagccaaagaagagcttaaaaggttcgaggctttccagagacagattcacgagaggctcacccagcttgaactgattaataaacagtataggcgtctggccagggagaaccgcactgacaccgccagcagacttaagcagatggtgcacgagggcaaccagcgttgggataatctgcaacgaagggtgaccgccgtgctcagaaggttgaggcattttacgaatcagcgcgaggagtttgaaggtacccgagaatccatactagtgtggctcacagagatggatctgcagcttaccaacgtggagcatttcagtgaatctgatgccgatgataaaatgaggcaactcaatggatttcagcaggagattactctcaatacgaataaaattgaccagcttatcgtctttggagagcagcttattcagaagagtgagccacttgatgcagtgctcatcgaagatgagttggaggagctgcaccgctactgtcaggaggtgttcggacgcgtgtctcggtttcaccgcagactgaccagttgcacccctgggttagaagatgagaaggaagcttcagagaacgagacagacatggaggaccccagggaaatccagacggacagctggaggaagcgaggcgagagcgaggagcccagcagcccgcagagtttgtgtcatctggtggccccagggcacgagcggtccggttgtgaaacgcctgtgtctgtggattcaattccactcgaatgggaccacacgggggatgtaggcggatcaagcagccatgaggaagatgaggaaggtccgtactactctgctctgtcagggaagtctatatctgacgggcactcatggcacgtgcccgactcaccctcttgtcccgagcaccactataaacagatggagggagaccggaatgtgccccctgtgccacccgcatccagcacaccatataagcccccatatggaaagttgctgcttccaccgggaactgatggtggaaaggagggacccagagtcctcaacggtaatccacagcaggaagacggcggtttagctggcatcacggagcagcagtctggcgcatttgaccgctgggagatgatccaggcccaggagctccacaataagcttaaaatcaagcaaaatctgcagcagttaaactccgatatcagcgccataactacatggcttaaaaaaaccgaggccgaattggaaatgctgaaaatggcgaaacctccctccgacattcaggagatcgagctccgggttaagcgactgcaggagatcctgaaagcttttgatacttacaaagcactcgttgtatcagtaaatgtgagcagcaaagaatttcttcagacagaaagccccgagtccactgaactacaaagtcggctgaggcagttaagcctcctttgggaggcagcccagggcgctgtagacagctggagaggagggctacgtcagtcactgatgcagtgccaggatttccaccaattgagtcaaaatctcctactgtggctggcctctgcaaaaaacagaagacagaaggcccacgtgaccgaccccaaagctgatcccagggccttactggagtgccgccgtgaattaatgcaactcgagaaagaactggtcgagcggcagccgcaggtggacatgctccaggaaatttccaattcactgcttattaagggccatggtgaggactgcatcgaggccgaggaaaaggtgcatgtaatcgagaaaaagctcaagcaactgcgagagcaagtgagtcaggatctgatggccctgcagggtacccagaaccctgccagtccactccccagcttcgatgaggttgattctggggatcagcctccagcaacctctgtccctgcacccagggcaaaacagtttcgcgctgttcggacaaccgagggagaagaggagactgaatccagggtccccggatccacgaggccccagaggtcctttctgtctcgcgtcgttcgggcagctctccctttgcaactgctcctcttgctgctcttgctactggcctgtttactgccttccagcgaggaggattattcttgcactcaggccaataatttcgcaagatccttttaccctatgctccgatataccaatggaccaccacctacatag

SEQ ID NO: 185026 - DNA, 9812 bp, Artificial Sequence
  derived and/or modified sequence
atggagaaactgaggattaagtactcagagatgtataccattgttcctgctgagatcgaaagtcaggttgaagaatgtcgcaaagccttagaagacattgacgagaaaatttctaatgaggtgttaaagtcatctccgagttacgcaatgaggaggaagatagaggagattaacaacggactccataatgtggaaaaaatgctccaacagaagagcaagaacattgagaaagcccaggagatacaaaagaagatgtgggatgagctggatctgtggcactctaagctgaatgaactggactctgaggtgcaggacattgtggaacaggatccaggtcaggcccaagaatggatggacaacttgatgatcccttttcagcagtaccagcaagtttcacagagagctgagtgccgcacaagccaattaaataaggccacggtcaagatggaggaatacagcgacctcctcaagagtactgaagcatggatcgaaaatacctctcacctgttggccaaccccgctgactatgatagcctgcgcacactcagtcatcacgcctccaccgtccaggactccaaatgttttcggagcggcccaagacctaacatatacgtgtcctattatgtaaccgtcatccagatggctctggaagacagtgaacaaaaacacaatcttctccattctatttttatggatttggaagacctgtcgatcatctttgagacagacgagctgacacaatctatacaggagctctcaaaccaggtaactgctcttcaacaaaagatcatggagagcctgcctcaaatccagaggatggccgatgatgtggtcgcgattgagagcgaggtgaagagtatggagaaaagggtgtccaagattaagaccatcctgttgtctaaggagatcttcgatttctccccagaagagcacctgaagcatggggaagttatactcgaaaatataaggcctatgaaaaaaaccattgctgagatcgtaagctaccaggtggagttacggctaccacagactgggatgaaaccactgcctgtttttcagagaaccaaccaactgctacaggatatcaagttattggagaatgtgacccaagaacaaaacgagcttttgaaggtagttatcaagcagactaatgagtgggacgaggagatcgagaatctgaagcagattctgaataattactcggctcaattctcccttgagcacatgtcccctgatcaagccgataagctcccacagctccaaggcgagatcgagaggatggaaaagcagatcctgtctttaaaccagaggaaagaggatcttttggtagacctgaaggccactgtcttaaacctccatcaacacctcaagcaggaacaggagggagtggagcgggacaggctgcccgctgtgaccagtgaggagggtggagtcgccgaacgagacgcttctgaacgaaaactgaacagacggggatccatgtcatacctcgccgcagttgaagaggaggtcgaggagtcctctgtgaagtccgacaacggagacgagaaggcagaaccttccccgcaaagctggtctagcttgtggaaacacgataaagacatggaggaggaccgcgcaagctcttcttcagggaccattgtccaggaggcttacggcaagatttccacttctgataatagcatggcccagattctgaccccagatagcctgaatacggagcagggccctgagtgctcgcttcgacctaatcagaccgaggagggtaccacgcccccaattgaggccgatactttggatagctcagacgctcagggcggattggagcctagggttgaaaagacgagaccagaacccacagaagtcctgcatgcatgcaaaacacaagtggcggagttggaattgtggctgcaacaggcaaatgtcgccgtggaacccgagacactaaatgccgatatgcagcaagtgctggagcagcagttggtgggatgccaggcaatgctgacagaaatagaacacaaggtggcattcctcctcgagacatgtaaggatcagggcctcggcgacaacggtgcaacccagcatgaggcggaggccttgtctctaaaactgaaaaccgtgaagtgtaacctggagaaagtgcagatgatgctgcaggagaagcattccgaggaccagcatccaactattctgaagaagagttctgaacctgagcatcaggaagctctccaaccagtgaacctgtctgagctggaatctatcgtgaccgagcggccacagttttctcggcagaaggacttccagcagcagcaggtgctagaattgaagccgatggaacagaaggatttcattaagttcatcgaattcaatgccaaaaagatgtggcctcagtactgccagcatgataacgacaccacccaggaatcatctgcgagtaaccaggcctctagccctgagaacgacgtacccgattcaatcctgtctcctcaaggacagaatggcgacaaatggcagtatctccaccacgaactgagttctaaaattaagctccctttaccccagctggtagagccacaggtctcgacaaacatgggcatcctgccgtctgttactatgtacaacttcagatacccaacaacagaggagctgaagacttacacaacgcagttagaagacctgagacaggaggctagcaatctacagacacaggagaatatgacagaggaggcttatatcaaccttgacaagaagttgttcgagctgttcctcacactgtctcagtgcctgtctagtgtggaggaaatgttggagatgccaagactttaccgggaggatggatctggacagcaagttcactacgaaacgcttgccttggaactgaagaagctttaccttgcacttagcgacaaaaagggagatctgctgaaagctatgacgtggcctggggagaatactaacctgctgcttgagtgcttcgataacctgcaggtttgcttggaacatacacaggctgctgctgtgtgcaggtctaaatccctgaaagccggtctggactataatcggagttatcaaaatgagattaagaggctttatcaccagcttatcaagagcaagaccagcttacagcagagtctcaacgagatctccggccagtccgtggcggaacaactccagaaagccgatgcttacacggtcgagttggagaacgccgaaagtagggtggctaagttgagagatgaaggggagaggctgcacctgccttacgccctcttgcaagaggtgtataaactagaagacgtacttgattctatgtggggtatgctgagagcccgttacacagagctgtctagcccattcgtgaccgagtcccagcaagacgcactgctgcaggggatggttgaactggtcaaaatcgggaaagaaaaactggcgcacgggcatttgaaacaaacaaaatccaaggtggcactgcaggcccagattgagaaccataaggtgtttttccagaagttggtcgctgacatgttgcttattcaggcttattctgctaaaatactcccctctttacttcagaaccgcgaaacattctgggcggagcaagtgacagaggtgaaaatcctggaggagaagagccggcagtgcggtatgaaactgcagagtcttctccaaaaatgggaggaattcgacgaaaactatgcatccttagagaaagatttagaaattctgatctcaaccctgccgagtgtatcactcgtggaggaaactgaggagagactggtggagcgtatctcattctaccagcaaatcaaaagaaacatcgggggtaaacatgcgagactgtatcagaccctgaacgaaggtaagcagttagtggcgtcagtcagctgccccgaactcgaaggccaaattgccaaactcgaagagcagtggctgtcactgaacaagaaaatcgaccatgagttgcatcgccttcaggctctcctgaagcacctgctgtcctataaccgcgacagcgaccagcttaccaagtggctggagagtagccaacatactctgaactattggaaggagcaatctctgaatgtgagccaggacctggacacaattaggagcaacattaacaattttttcgagttcagcaaagaggtggacgagaaatcatctctcaaaacggcggtgatctctataggtaatcagctcttacacttaaaggagacggacacagctactctgcgggcaagcctggctcagtttgagcaaaaatggacaatgctcattacccaactgcctgacatccaggagaagcttcaccaattacagatggagaaactcccttctcgtaaggccattacagagatgatctcctggatgaacaacgtggagcaccagacttccgacgaagactcagtgcactccccgtcctccgctagtcaggtgaaacatctgttgcagaagcataaggagttccgtatggaaatggattacaaacagtggattgtcgactttgtgaaccagagcttgctccagctgtcaacttgcgatgtcgagtctaagaggtacgagcggacagagtttgcagagcaccttggagagatgaatcgccagtggcacagagtgcacggaatgctcaaccgaaagatccagcacctcgaacagctccttgagagcattaccgagagcgagaacaaaatccagattttaaacaactggcttgaggcccaggaagagaggctgaaaaccctgcaaaaacccgagtccgtgatctccgtccagaaactcctgctagactgccaggacatcgaaaaccagctcgcaatcaagtccaaggccttggacgagctaaaacagagctatcttacactggaatccggcgctgttcccctcctcgaggatacggccagccggatcgacgagctcttccagaagcgaagctccgtcctgacccaggtcaatcagctgaagacgtcaatgcaatctgtgttgcaagaatggaagatttatgaccagctgtacgatgaagtcaatatgatgacaatcagattttggtactgcatggagcacagtaaaccggtcgttctgagcctggagaccctgagatgccaggtggagaacctgcaaagtctccaggatgaagccgagagctccgagggctcgtgggagaaactgcaagaggtcattggtaagttgaaaggtctctgtccctccgtagccgaaatcatcgaggagaaatgccagaacacacacaaacgttggacgcaggtgaaccaggccatcgccgaccagcttcaaaaggcacagtctttactgcaactgtggaaagcctacagcaacgctcacggagaggccgcagctagactgaaacaacaggaggctaagttccagcagcttgcaaacatttccatgtctggcaataatctggctgaaatccttccacccgctttgcaggacatcaaagaactgcagcacgacgtccaaaagactaaagaggcattcttgcagaacagctccgttctggacagactgccacagcctgctgagagctctacccacatgctgctccccggtcctctgcactctctccaaagagccgcataccttgaaaaaatgcttctagttaaggcaaatgaattcgagttcgttctttcacaattcaaagatttcggggtgcgattggaaagcctgaagggtctgattatgcatgaggaggagaatctggaccgcctccaccagcaagagaaggaaaatcctgattcgtttctgaatcatgtactcgcactgaccgctcagtccccggacatagagcaccttaacgaagtgagcttaaagttgccacttagcgacgtagccgtcaagacccttcagaacatgaatagacagtggatccgagcgacagccactgcgttggagcggtgtagcgagctgcagggaataggactgaacgagaaattcctctactgttgtgaaaaatggatccagctgttggagaaaatagaagaggccctgaaggtcgacgtcgccaatagcctgcctgagctgctggagcaacaaaagacgtataaaatgcttgaggccgaagtgtctattaatcagaccatcgccgactcctatgtcactcagagtttgcagttgcttgacaccacagagatcgagaacagacccgagtttatcactgaattcagcaagttgactgacaggtggcagaatgccgtacagggtgtgcggcaaaggaaaggcgatgttgatggactggtgaggcaatggcaagattttacaactagcgttgaaaatctgtttaggtttttaactgacacctcgcacctgctttcagccgtgaaaggacaggagagatttagtctttaccaaactcgctccttgatccacgagctgaaaaataaggagatacactttcaacgaaggcgcacgacctgtgcactgacactggaggcaggcgaaaaactgctactcactacggatctgaagacgaaggagagtgtcggtcgccgaatcagccagctccaggattcctggaaggatatggaaccccagctggccgaaatgattaagcaattccagagcactgtggaaacctgggatcagtgcgaaaagaagattaaagagctaaagtcacgcctgcaggtacttaaggcccagagcgaagatcctctgcctgagctacacgaggaccttcacaatgaaaaggagctgataaaggagttagagcagtcccttgcctcttggacacagaatctgaaagagctgcagactatgaaggcggacctcacccgccacgtgcttgttgaagacgtgatggtgctgaaagagcagatcgagcacctacaccgccaatgggaggatttgtgtctcagggtagctatccgaaagcaagagatcgaggatcgcctaaacacctgggttgtttttaacgaaaaaaataaagagttatgtgcctggctggtccaaatggaaaacaaagtcctccagacagccgatatctctatcgaggagatgattgagaaactccaaaaagactgcatggaagaaattaacctattctcagagaataaattacagctgaagcagatgggcgaccagctcattaaggccagcaacaaaagccgtgccgcagaaatcgatgataaactgaacaagatcaacgatagatggcagcacctgttcgatgtgatcggatccagggtgaaaaagttaaaagagacctttgccttcattcaacagttagataaaaacatgagcaacctgaggacctggctcgccaggattgagtccgagttgtctaagccagtggtctatgatgtgtgtgatgaccaggagattcagaagcggctggcagagcagcaggacctgcagagggatattgagcagcatagtgccggagtcgagtccgtgttcaatatatgtgacgttttgctccacgactctgacgcttgcgccaacgagaccgagtgtgactccatccaacagactacccgcagcttagaccgcaggtggagaaatatttgtgctatgtctatggagcgccgaatgaagatagaggagacctggcggctctggcaaaagtttctggacgattacagtcggtttgaggactggctgaagtccgccgaaaggacagctgcatgtcctaattcctctgaggtgctttacacatccgccaaggaagaactcaaacggttcgaagcctttcagcgacagattcatgaacggctgactcagttggagctcattaataagcagtaccgcagactggccagagaaaatcgtacagacactgcctcacgcctgaaacagatggttcacgaaggcaaccagcgatgggacaacctgcagcggagagtgaccgctgtgctgagaagattgcgccactttactaatcagcgagaggagtttgaggggacgcgggagagcatcctggtatggctcactgaaatggatctgcaactgaccaacgttgagcattttagcgagtccgatgccgatgacaagatgagacaactgaatggatttcaacaggaaataaccttaaacacgaataagattgatcaactcatcgtattcggagagcaactcattcagaaatccgaaccgctcgatgctgtgctcattgaggacgagctggaggaactccatcgttattgtcaggaggtctttgggagagtcagcagatttcataggagattgacttcatgcacacctgggctggaggacgagaaagaggcgtctgagaacgaaactgatatggaagatcccagggaaatccagacagactcctggcgcaagcggggtgaatctgaggaaccttcatctccacaatctctttgccaccttgttgcgcctggacacgagcggtccggctgtgagaccccagtgagcgtagacagcattcccctggagtgggatcacaccggtgacgtcgggggatctagcagccatgaggaggatgaagagggtccttattacagcgctttgagtggcaaaagcattagtgatgggcacagttggcatgtgcccgattcaccctcatgcccagagcaccattacaaacaaatggagggtgaccgcaatgtgcctccggtgccccctgcctcctctaccccttataaaccaccttatggcaagctgctcctgcccccaggcacggacggcggaaaggaggggcctagagtcctcaacggcaaccctcagcaagaggatggagggctcgccggtataaccgagcagcagtcgggggcattcgatcgctgggagatgattcaggcccaggagctgcataacaaactcaagatcaaacagaatttgcaacagctgaatagcgatatcagtgcaattactacttggctaaaaaaaactgaagctgagttggagatgctgaagatggccaaacccccaagcgacattcaagaaatcgaactgcgggtgaaaagactacaggaaatcctcaaggctttcgacacctacaaggcacttgtggtttctgtcaatgtaagtagtaaagaattcctccagaccgagtctcccgaatctacagaactccagtccagactcaggcaactgtcgttgctatgggaggccgctcaaggtgcagtcgacagttggcgcggtggcctgaggcaatccctcatgcaatgccaggacttccatcagctgagccagaacttactcttgtggctcgccagtgccaaaaataggcgccagaaagcgcacgtaacggatcctaaagctgatcctcgggcactcctcgaatgccgtagggaactgatgcagctcgaaaaagagcttgtcgagcgccaaccccaagtggacatgctccaggagattagtaatagtctgctgattaaagggcacggcgaagactgcatagaagccgaggaaaaggttcatgtgattgaaaaaaagctcaagcagctgcgtgagcaggtgagtcaggatctcatggcgctgcaggggacccagaatcctgcctccccacttccttctttcgacgaagtcgacagcggagatcagccccctgccacgtccgtgccagctccccgtgcaaaacaatttcgggcagtgagaaccacagagggcgaggaggagacagaatctagggtgcctgggtctacacgaccacagagaagctttctcagccgggtcgtgagggccgctttaccattgcagttgcttctgcttctccttttgctgctcgcctgcctgctgccttccagcgaggaggactattcatgcacacaggccaataacttcgctcggagcttttatcccatgcttagatatactaatgggcctcctcctacgta

SEQ ID NO: 185027 - DNA, 2007 bp, Artificial Sequence
  derived and/or modified sequence
atggtccacgagggaaatcagcgctgggacaatctgcaacggagagtcaccgcagtcctgcggcgactgcgccattttactaaccagcgcgaggaattcgaggggacaagggagagtatccttgtgtggctgacagagatggatctacaattaaccaacgtggagcacttctctgaaagtgacgcagacgataagatgagacaactcaacggctttcagcaggaaattacgctgaacaccaacaagattgaccagctgatcgtatttggagagcagttaatccagaagagcgagcctttggatgcagtgctgatcgaggatgagctcgaggaactgcatagatattgtcaggaagtctttgggagggtttccagatttcatcgacggctgacaagttgtactcctggtctggaggatgagaaagaagcttctgagaatgaaactgatatggaggatccacgtgaaatccagactgactcatggaggaagcgcggagagtccgaagagccaagctcaccccagtcactgtgccatcttgtagcacctgggcacgaaagaagcgggtgcgaaactcccgtctccgttgactcaatcccactggagtgggatcatactggggatgttgggggaagctcaagtcacgaagaggatgaggagggaccctattatagtgcccttagcggaaagtccattagcgatgggcactcatggcacgtgcccgattctccctcttgccctgagcaccactacaaacagatggagggggataggaatgtccctcctgttcccccagcctcaagcactccatacaagcccccatacggaaagctactattgccgcctggaacagatggtgggaaggaagggcctagggttctgaacggaaatccgcagcaggaggatggtggccttgcaggaattaccgagcagcagagcggggcattcgacagatgggagatgatccaggcacaggaactgcacaataaactgaagatcaagcagaacctgcaacaactgaactcggacatcagtgcaattaccacctggctgaaaaagacagaagcggagctggaaatgcttaagatggcaaagccaccttccgatatacaggaaatcgagctgagagtcaagcgtctccaggagatccttaaagctttcgatacctataaggcgttggtggtcagtgtgaacgtcagttctaaggagtttttacagacagaaagccctgaatcaacagaactccagtccaggctgcgtcaattgagtctgttgtgggaggccgcacagggggcagtagactcctggagaggaggcctgcggcagtctttgatgcaatgtcaggatttccaccaactgtcgcagaacctactactgtggctggccagcgctaaaaaccgcagacagaaggcccatgtgaccgatcccaaagcagacccacgcgctttgctagaatgccggagagagctgatgcagttggaaaaggagctcgtggaacgacagccacaggtcgacatgctgcaggagattagtaattccttgcttatcaaagggcacggggaggactgcatcgaggcagaagaaaaggtgcacgtaatcgagaaaaaactgaaacagttgcgtgagcaagtgtctcaggacctgatggctttgcagggaacgcaaaatcccgcatcaccactcccaagtttcgacgaagtcgactcgggcgatcagcctcctgctacgtccgtgcccgctccacgcgcaaagcagttcagggccgtgcgaaccactgagggggaggaagagacagagtccagggtgccgggtagcacccggcctcagcgttccttcctgtcccgcgtagtcagagccgcactgcccctccagctgttactgctactcctactcctcctggcttgtttgctgccaagtagtgaggaagattattcctgcactcaagcaaacaattttgcccgaagcttctacccgatgttgcggtatactaacgggcctccacccacttag

SEQ ID NO: 185028 - DNA, 2292 bp, Artificial Sequence
  derived and/or modified sequence
atgagtatggagaggaggatgaaaattgaggagacctggagattgtggcagaaattcctcgacgactatagccgcttcgaagactggctgaaatctgccgagcgcacagcagcttgtccaaactcatccgaagttctgtatacctcagccaaggaagaactgaaaaggtttgaggcatttcagcgccaaatccacgagagactcactcagcttgagctcataaataagcagtatcggcgattagcgagggaaaaccgcactgacaccgcctcacggctcaaacagatggtgcacgaaggcaaccagcgctgggataacctccagcggagggttaccgctgttttgagacggctgcggcactttaccaatcagagagaagagttcgagggcacacgcgagagtattctggtgtggctgacagagatggatctccagctgactaatgtagagcacttttccgaatcagacgctgatgataagatgcgacagttaaatggattccagcaggagataactcttaacaccaacaagatcgaccagttaatagtgttcggggagcaactgatacagaaaagcgaacctctggatgctgtgttgattgaggatgaactagaagaactgcacaggtactgccaggaggtgtttggtagggtgtcccggtttcacagacgccttacctcttgcaccccaggactcgaggatgaaaaggaggcttctgagaacgagacagatatggaggatcccagggagatccaaactgatagttggcggaaaagaggcgagtccgaggagcctagcagtcctcaaagtctgtgccatctggtggcccctggccatgagcgtagtggatgcgagacaccagtgagcgttgacagcattcctttggagtgggatcatacaggggacgtcggaggatcttcttctcatgaagaggatgaagaagggccatactattctgccctgagtgggaagagcatttcggacggccacagctggcacgtgcctgacagtccatcttgccctgagcatcactacaaacagatggagggagaccggaatgttccccctgtcccaccggcttcctctaccccttataaacccccttacggcaagctactattgccccctggcacggacgggggaaaagaagggcctagggttcttaacggtaatcctcagcaggaggatggaggtctggcaggcatcacagaacaacagagcggcgcattcgacagatgggaaatgatccaagcccaggaattgcataacaaactcaagatcaaacagaacttgcaacagttgaattcagatatatcagctattaccacttggctcaagaaaacagaagcagaactcgaaatgctgaagatggccaagccaccgagcgatatccaggagatcgagcttcgagttaagcggttgcaggagatcctgaaagccttcgacacatacaaggctttagtcgtgagcgtcaacgtcagcagtaaagaattcctgcaaactgagagcccagaatcgacagagctgcagagtagactgcgtcaactgtccctgctctgggaggcagcacagggagctgtggactcatggcggggtgggctgagacaatcacttatgcagtgccaggactttcaccagttatcccagaaccttctgttatggctggcttcggcaaaaaacaggaggcagaaggcacacgtcaccgaccccaaggccgaccctcgcgcactcctggaatgtcgtcgagaattgatgcagctggaaaaggaactggtggaacgtcagccacaggtcgatatgctgcaggagatcagcaattcactcctgatcaagggccacggagaggactgtattgaagccgaggaaaaagtgcacgtcatcgagaaaaaactgaaacaactccgcgagcaggtgtcacaagacctaatggcccttcagggtacgcagaaccccgctagtcctcttccctcattcgacgaggtcgattccggggaccagcccccagccacatccgtccctgccccaagagcaaagcagtttagggccgtgcggacaactgaaggcgaggaagagactgagtccagagtgccaggcagtacgaggccccagcggagctttctcagcagagttgttagggcagcgctaccactacaactactgcttctcttgttactcctgctggcctgtctcttgccgagctccgaggaggattactcgtgtacacaggccaacaatttcgctcgcagtttctatcctatgctccgttatacgaacggtccaccccctacatag

SEQ ID NO: 185029 - DNA, 21777 bp, Artificial Sequence
  derived and/or modified sequence
gccaaggagcggagcgcgctcagctgcgcccagagccttcggccggacctgaaaaagcgagagggagagcgagcaaaaggcgcgatccagagagccaggcaagcggggcgccgacctcgggcggccccggcccgcgcccttgcccctcggccgggcggacgttcacttcttcaactgagatggacatgatataatctccattgagtcaaagaatggcatctagtcctgagcttcccaccgaagatgaacagggttcctggggcatcgacgatctccatatttcattgcaagctgaacaggaagacacccagaagaaagccttcacgtgctggataaactcacagttggccaggcacacttctccctcagttatatccgacctattcacagacattaaaaaggggcatgtcctcctggatctgctagaagtactttctgggcaacagttgcctcgggataaaggatctaataccttccagtgtagaatcaatatagaacatgccttgacattcctaagaaaccgatcaattaagctaataaatattcatgttactgatatcattgatggaaacccatccattatccttggcctaatttggacaattatcctgcactttcatattgagaagcttgcccagactctttcttgcaattacaatcagccttccctggatgatgtgagtgtggttgactcatctcctgcctcaagtcctccagctaagaaatgctctaaagtgcaagcaagatggcaaatgtctgcaagaaaggcccttcttttgtgggctcaggaacaatgcgccacctatgagtctgtcaatgtgaccgattttaagtcaagttggagaaatgggatggcttttttggccatcattcatgccttgcgaccagacctaattgacatgaagagtgtgaagcatagatccaacaaagacaatctgagagaggccttcagaattgcagaacaagaattaaaaatccccagattgctggaaccagaagatgtggatgttgttgatcctgatgaaaagtccatcatgacctatgtggcacagtttctgcagtattccaaagatgcccctgggactggagaggaggctcagggaaaggtgaaagatgctatgggctggttaactctgcaaaaggaaaaactacagaagttgctaaaggattcagagaatgatacctactttaaaaagtataatagcctgctgtcctttatggagtcattcaatgaagaaaaaaagtcctttttggatgtcctgtcaataaaacgggatctggatgagctggacaaggatcatttacagttgagagaagcctgggatggcctcgatcaccagattaatgcatggaaaataaagctaaattatgccttgcccccacccctccatcaaactgaagcttggctccaggaggtagaagagcttatggatgaagatttgtcagcctcccaggatcactctcaagccgtgactctgatacaagagaaaatgactttattcaagagcctgatggatagatttgagcatcattcgaacattctccttacctttgaaaataaggatgaaaatcacttgccattggtaccacctaacaaattggaggaaatgaaaagacgaatcaacaacattttggagaaaaaatttattctacttctagaatttcattactacaagtgcttagttcttggtttggtagatgaagtgaaatcaaaattggatatttggaacattaaatatgggagcagagaatctgtggaattattgctggaagactggcataaatttattgaagaaaaagaattcctagctcgacttgatacttcttttcaaaaatgtggagaaatttataagaatttggctggagaatgtcagaatattaataaacagtatatgatggtgaaatctgatgtttgtatgtatagaaaaaatatatataatgtgaagtccactctacaaaaagtgctggcatgttgggctacttatgtggaaaaccttcgcttactaagggcttgctttgaggagacaaagaaggaagaaattaaagaggtaccctttgagacactagcccagtggaatctagaacacgctactttaaatgaagcaggaaatttcttagtcgaagtcagcaatgatgtggttggatcatctatttctaaagaactgagaaggctgaataaaagatggagaaagttggtttcaaaaactcaacttgaaatgaacctgccactgatgataaaaaaacaggatcagcccacttttgacaattctggaaatattctatctaaagaagagaaagcaactgttgagttttcaacagatatgtcagtagaacttcctgaaaattataatcaaaatataaaggctggagagaaacatgaaaaagaaaatgaagaattcacagggcaactaaaagtggctaaagatgttgaaaaactcattggacaagtggaaatctgggaggcagaagccaaatctgttttggatcaagatgatgtggacacctcaatggaagaatctttgaagcatcttattgccaaaggctctatgtttgatgagcttatggcaagaagtgaagatatgttacaaatggatatacaaaatatttcaagccaggagtcctttcaacatgttctcacaactgggcttcaggcaaagattcaagaagctaaagagaaagtccagatcaatgtggtaaaactcattgcagcgttgaagaacttaactgacgtttcaccagatttggacatcaggctgaagatggaagaatcccagaaggaacttgaatcatatatgatgagggctcagcagttactggggcaaagagagagccccggtgaactcatttcaaaacacaaggaagcactaataatttctaatacaaaaagtctggccaagtatttgaaagctgttgaagaactaaaaaataatgtaactgaggacataaagatgtctttagaagaaaagagtagagatgtctgtgccaaatgggagtctcttcatcatgaactgtctttatatgttcaacaactaaaaatagatattgaaaaaggaaagcttagtgacaatattttaaaacttgaaaagcaaataaataaagaaaagaaacttatccgtagaggaaggaccaagggtctcatcaaagaacatgaggcctgcttttctgaggaaggctgcctgtaccagcttaatcaccacatggaagtcctgagggagctgtgtgaagagctgccttcacagaagagtcaacaagaagtgaagagactactcaaagattatgaacaaaagatagaaagacttctgaaatgtgcttccgagattcatatgacactgcagcccacagcgggaggcacgtcgaaaaacgaggggaccatcaccacatctgagaatagaggaggggatccccacagtgaggcaccatttgcaaaatcagataatcagccatcaactgaaaaggcaatggaacccactatgaagtttagcctggcatcagtgttaaggcctctgcaagaagaaagcattatggaaaaggattacagtgcatctataaatagtttactagagaggtatgatacatacagagatattcttgaacaccacctgcaaaacaacaaattcaggattacttctgatttctctagtgaagaggacaggagtagttcttgtctgcaggctaaactgacagatctacaggtcataaaaaatgaaactgatgctcgctggaaagagtttgaaattatttcattgaagttagaaaatcatgtgaatgacataaaaaagccttttgtaattaaggaaagagacacactaaaggaaagagaaagagagcttcagatgactcttaataccagaatggaatctttagagacagcactgcggcttgtgttacctgtagagaaggcatcacttcttctctgtggctcggacctgcctctccataaaatggccatccagggatttcatctcattgatgctgatcgcatctatcaacacctaaggaatatccaagattccatagcaaaacagattgaaatatgtaaccgcttagaagagccaggcaactttgtattaaaggagttacacccatttgatctacacgcaatgcagaatattatactgaaatacaaaacacaatttgaaggaatgaaccacagggtgcagaggagtgaagatactctcaaagctctggaagactttttggcgtctctcagaacagctaaactctctgctgagcccgttacagacctttcagcctcagatacacaggtggcacaagaaaatacgttgacagtaaaaaataaagagggagaaattcatctgatgaaagacaaggccaaacatttggataaatgtttgaagatgctcgatatgagctttaaagatgctgaacggggtgatgacacctcctgtgaaaacctgcttgatgctttttcaataaagttatctgagacacatggctatggggtacaggaggaattcactgaggaaaacaaattactagaggcttgtattttcaaaaataatgaactccttaaaaatattcaagatgtgcagagtcaaatcagtaaaattggtcttaaggatcctactgttccagctgtgaaacatcggaaaaaatcattaatcagactggataaggttctagatgaatatgaagaagagaagagacatttacaagaaatggctaattctcttccacacttcaaagatggcagagaaaaaaccgtgaatcaacagtgccaaaatacagtagtcttgtgggagaataccaaagccttggtcaccgaatgtcttgaacaatgtgggagagttttggagctcttaaaacaatatcagaattttaaaagcatcttgacaactttgattcaaaaagaagagagtgtcatctccctgcaggcttcgtacatgggaaaggagaacctgaagaaaaggatagcagagattgaaattgtcaaagaagaatttaatgagcatttagaagttgtagacaagataaaccaggtctgcaaaaatctacaattttatctaaataaaatgaaaacttttgaagagcccccttttgaaaaagaggctaatattattgtggatagatggcttgatataaatgagaagacagaagattactatgaaaatcttggtcgagctctagctttgtgggacaaactttttaacttaaaaaatgtcattgatgagtggacagaaaaggcccttcaaaaaatggaattacatcaattgactgaagaggacagagaaaggctgaaggaagaattacaagtccatgaacaaaaaacttcagaattttctagaagagtggctgaaatacagtttttgctccaaagcagtgaaatacctcttgaattgcaggtcatggagtcctctattttgaacaagatggaacatgtacagaagtgcttaacaggagaatccaactgccatgcactcagtggcagcactgctgagctaagggaggatctcgaccaagccaagacccagatcgggatgactgaatccctcttaaaagccctgtctccttctgacagcttggagatcttcactaaactagaggagatacaacagcagattctacagcaaaaacacagtatgatattacttgagaatcaaataggttgtctgactcctgaactctctgaattgaaaaagcaatatgaaagtgtcagtgatttatttaataccaaaaaaagtgttttgcaagatcacttttctaagttattgaatgatcaatgcaagaactttaatgactggttcagcaacattaaagtgaaccttaaggagtgttttgaatcatcagaaacaaaaaagagtgtggaacaaaagctacaaaaactttctgatttcttgactcttgaaggaagaaacagtaaaataaagcaggtggacagcgtactgaagcatgtgaagaagcatctgcccaaagcacatgtgaaggagcttatcagttggctcgtgggtcaggaattcgaattagaaaaaatggagtccatatgccaggctcgagcaaaggagcttgaagactccttgcagcagctactgagactccaggatgaccatagaaacctgaggaagtggttgactaatcaagaagagaaatggaaaggaatggaagaaccaggggagaaaactgagctgttctgccaagctttagctagaaagagggaacagtttgaatctgtggcccaattgaacaactctttgaaggaatatgggtttactgaagaagaagaaataataatggaagcaacatgtttgatggatagataccagacattactgagacaactaagtgaaatcgaggaagaggataagttactacccacagaggaccagagctttaatgatcttgcacatgatgtaattcattggataaaagagattaaagagtcccttatggttttgaattcatccgaaggcaaaatgccacttgaggaaagaatccaaaaaatcaaggaaatcattttgctgaagcctgaaggggatgccagaatagagaccatcatgaagcaggctgagagcagcgaggccccgctggttcagaagaccctcactgacatcagcaaccagtgggacaacacactccatttagctagcacctacctaagccatcaagaaaagcttctactagaaggagagaaatatttacaaagtaaggaggatctgagattaatgctcatagaactaaagaagaaacaggaagcaggctttgctctacaacatggtctgcaggagaagaaagctcagttaaagatttataagaaattcctcaagaaagcccaagatttgacatccttgctaaaggagttaaaatctcagggaaactacctcttggagtgcactaaaaatcccagcttcagtgaagagccttggctggaaataaagcatctacacgaaagtcttcttcaacaactgcaggattctgtgcaaaacttggacggtcacgttcgagaacatgattcataccaggtttgcgtcacagacctgaatactacattggacaatttctccaaggaatttgtcagtttttctgataagcctgtggatcaaatagcggttgaggaaaaattgcagaaactgcaggaactagagaatagactcagtttacaagatggcacattaaagaagattttagctttagcaaaatccgtcaagcaaaatacatcttcagtggggcagaagattattaaagatgatataaaatcacttcagtgtaaacaaaaagatttggaaaacaggcttgcatctgctaagcaggagatggaatgttgtctcaacagcattctcaaatcaaaacgctcaacagaaaagaaaggaaagtttactctgccaggcagagagaagcaggccacttctgatgtgcaggagtctactcaggaatcagctgcagtggaaaagttggaggaagactgggaaataaacaaggattcagctgtggaaatggctatgtcaaaacaactttctcttaatgctcaagaaagcatgaaaaacactgaagatgagcggaaagtcaatgagctgcaaaatcaacctttagaattagatactatgttaagaaatgaacaattagaagagatagagaaattatatacccagttggaagcaaagaaagcagccattaagccactggaacaaacagaatgtcttaacaaaacagaaactggggccttggttctccacaatataggatattcggcacagcatttggacaatttgcttcaggcacttattactttgaagaaaaacaaagaaagccaatattgtgtcctcagagattttcaggaataccttgctgcagttgaatcttcaatgaaagccttgttgacagacaaggaaagtcttaaagtaggaccactggacagtgtaacgtatctggacaaaattaaaaaattcatagcatccatagaaaaagagaaagattctttaggcaacttgaaaatcaaatgggagaatttatcaaaccacgtgactgacatggataagaaattgttggaaagccagattaagcaacttgaacatggttgggaacaagtggaacagcagattcaaaagaagtattctcagcaggtagtggaatatgatgaatttacaaccctcatgaataaggtacaggacactgagatttctctgcaacagcagcagcaacatctacagttaaggctgaagtctccagaagaacgggcagggaaccaaagcatgattgccttgaccactgacctccaggctaccaagcatggattttctgttttaaaggggcaagctgaacttcagatgaagaggatttggggagaaaaagaaaagaagaatttggaggatggaataaataacttgaagaaacaatgggaaacattggagccattacacttagaagcagaaaatcagattaagaagtgtgacataaggaacaagatgaaagagactatcttatgggccaagaatttgttgggtgaacttaatccctccattccccttctcccagatgacattctttcacagatcagaaagtgcaaagtgacacatgatggcattctagctaggcagcagtctgtggaatcgttggctgaagaggtcaaagataaggttcctagccttacaacctatgagggcagtgatttaaataataccctagaggacttacggaatcaataccaaatgctggttttaaaatcaactcaaagatcacagcaattagaatttaagttggaagaaagaagcaatttttttgctataataaggaagtttcaacttatggttcaagaaagtgaaacactgataattcccagggtggagacagctgccacggaagctgaactaaaacatcaccatgttactttggaggcatctcagaaggaattgcaagaaattgacagtggaatctcaacacatcttcaggagctaacaaacatctatgaggagctgaatgtgtttgaaagattatttctggaagatcagttgaaaaatcttaagattaggaccaacagaatacaaagattcattcagaatacatgtaatgaagtggaacacaagataaagttttgcagacaattccatgaaaaaacatcagcgcttcaggaggaggctgacagtatacagcgcaatgaactattacttaatcaagaagtaaataaaggtgttaaagaggagatctataatcttaaagacagactcaccgctattaagtgttgcatcttacaggtattgaaacttaaaaaagtgtttgactatattggactaaactgggatttttcacaacttgaccaattacaaacccaagtatttgaaaaagaaaaggaacttgaagaaaaaattaagcagttggacacatttgaggaagaacatggcaaatatcaggcattattaagtaaaatgagagctattgatttgcaaattaagaaaatgactgaagtagtactaaaagctcctgatagctctccggaaagcagacggctcaatgcccaaattttaagtcagagaattgagaaagccaagtgtttatgtgatgagataataaagaaattaaatgaaaataagacctttgatgactcattcaaggagaaagaaatactacaaataaagctgaatgcagaagaaaatgataagttatacaaagttctccaaaacatggtattagaactctcaccaaaagaattggatgaaaagaattgtcaggacaaactagaaacttccttacatgttttaaatcagataaaatctcaattacagcagccattacttataaatttggaaattaaacatattcaaaatgaaaaggacaattgtgaagcatttcaggagcaagtttgggcagaaatgtgtagtattaaagctgtgactgctattgagaaacaaagagaagaaaactcttctgaagcgagtgatgtggagacaaaactacgtgagtttgaagatcttcagatgcagcttaacacaagcattgatttgcgcacaaatgtcttgaatgatgcttatgaaaatctaacacgctataaagaagcagtcaccagggcagtggagagcatcacttccctcgaagccatcattataccctacagagtagatgttggtaatccagaagaatctttagagatgcctcttcgaaaacaagaggaattggaatccacagtagcacacatccaggacctcactgagaaactgggaatgatatccagccccgaagccaaactacaacttcagtatactttacaggaactagtttctaagaactcagcaatgaaggaagctttcaaagcacaggaaactgaggcagaaaggtatcttgagaattacaaatgctatagaaaaatggaagaggatatttacactaacctcagcaaaatggagacagttcttggacagtccatgtcctcgttgccactgtcttacagagaagctttagagcgcttggaacagagcaaggccttggtgtcaaatcttatatcaaccaaagaagagttaatgaaactacgacagatccttagactcttgagactcaggtgcacagaaaatgatggcatatgtttgctcaagattgtgtcggctctgtgggagaaatggctgagtttgctggaagctgctaaagagtgggagatgtggtgcgaagaactgaagcaggaatggaaatttgtcagtgaagaaattgaacgagaggcaattattttagataatcttcaggaagaactccctgaaatttccaaaacaaaagaggcagccaccacagaggaactctctgagctgctagactgtttatgccaatatggagagaacgtggagaagcaacagctgttactgactctacttcttcagcgcatcagaagtatccagaatgttcctgaaagctcaggggctgtggaaactgttccagcatttcaagaaattacttctatgaaagaacgatgcaacaagcttcttcagaaagttcagaaaaataaagaattggtgcagactgaaatccaagaaagacattccttcacaaaagagataattgctttgaagaatttctttcaacagaccacaacttcattccaaaatatggcattccaggatcacccagaaaagtcagaacaatttgaggagcttcaaagcatccttaagaaagggaaactaacttttgagaatattatggaaaaactgcgaatcaagtattccgaaatgtacaccatagtccctgcagagattgaatcccaggtggaagaatgcagaaaagctttagaagacatagatgagaagattagcaatgaagtcttaaaaagctcaccatcatatgcaatgaggagaaaaatagaagaaattaacaatgggcttcataatgttgaaaagatgttgcagcagaaaagcaaaaatattgagaaagctcaagaaattcaaaagaaaatgtgggacgagttagatctatggcattccaaactaaatgagctggattctgaagttcaggacattgttgaacaggacccaggacaggctcaagaatggatggataacttgatgattcctttccagcagtatcagcaagtatcacagagagcagagtgtagaacctcacagttgaataaggccacagttaagatggaggaatatagtgaccttctgaagagcactgaggcttggatagaaaataccagtcatttgctggccaatcctgctgactatgactctttgaggacactgagtcaccatgctagcactgtgcagatggctttggaagattcagaacagaagcacaatcttttacattcaatctttatggatctagaagacctgtcaataatttttgaaacagatgaattaacccaatccatacaagagttaagtaatcaagtaacagctttacaacaaaaaataatggaaagccttccacagattcagcgaatggctgatgatgtggttgctattgaatctgaagtaaaatcaatggaaaaaagagtttcaaaaatcaaaactatcctattatcaaaagaaatatttgatttttcacctgaagaacatctcaaacatggggaggtcatacttgaaaatatacgtcccatgaagaaaaccattgctgagatagtgtcttaccaagtggaactgaggttgccccaaacaggaatgaaacctctgcctgtgtttcagcggacaaatcagcttttacaagatataaaactattggaaaatgtgactcaagaacaaaatgagttattaaaggtagtcataaaacagaccaatgaatgggatgaagaaatagaaaatttgaaacagatcttaaataattattcagctcagttctcccttgaacatatgtcaccagaccaagctgacaagctgccacaactacagggagaaatcgaacgtatggagaaacagattctgagtttgaaccagagaaaagaagacctgttggtggacttgaaggccaccgtactaaaccttcaccagcatttgaagcaagaacaagaaggagtagaaagagataggctgccagctgtaacatcagaggaaggtggagtggcagagagggatgcttctgagcggaagttgaacagaagaggctccatgtcttacctggcagcagtcgaggaagaggtggaagaaagttccgtgaagagcgataatggagatgagaaggcagagccatcgcctcagtcttggtcttcactttggaagcatgacaaggacatggaagaagacagagcttcctcatcctctggaacaattgttcaggaagcatatgggaaaataagcacctctgataattccatggcacaaatcctcacaccagactcactaaacactgagcaaggcccagaatgttccctaaggcccaaccaaacagaagagggcaccacacctcctattgaggctgacactctggactcttctgacgcgcaaggaggtttggagcccagggtggagaaaactaggccggagcccacagaagtcctgcatgcctgcaagacccaggtggccgagctggagctgtggctgcaacaagccaacgtggcagttgagccggaaacattaaacgcagacatgcagcaggtgctggaacagcagctggtagggtgccaggctatgctaacagagattgagcacaaggttgcctttctgttagagacttgcaaagatcagggcctgggagataatggagccactcaacatgaggctgaagcgctttccctgaaactgaaaacagtgaagtgcaatttagaaaaagtccagatgatgcttcaggagaagcacagtgaagatcagcatcctaccattctaaagaaatcctcagagccagagcatcaagaagctctccaaccagttaacctttctgaattggaatccattgtaactgaaaggccacaattcagcagacaaaaagatttccagcagcaacaggttctggagttaaaaccaatggaacagaaagatttcatcaaattcatagaatttaatgctaagaaaatgtggccccagtattgccaacatgataacgatacaactcaggaatcatctgcaagcaaccaggcatccagccctgaaaatgacgttccagactcgatcttgtcaccccagggccaaaatggagataagtggcaatatctgcatcatgaactctcatcaaaaataaagctcccactccctcagcttgtggagcctcaggtttccacaaatatgggtattctacccagcgtgactatgtataactttagatacccaacaactgaagaactgaaaacctataccacccaacttgaagacctgcgccaagaagcaagtaaccttcagacacaggaaaatatgacagaagaagcatatatcaatttggataaaaaattgtttgaactattcctgaccctcagtcagtgcctcagcagtgtggaggagatgctggagatgcccagactttacagggaggatggttctggccagcaggtgcactacgagacgctggctcttgagttgaagaaactttatttagcgctaagtgacaagaagggtgatcttttgaaagccatgacttggcctggcgagaacaccaacttgctccttgaatgttttgacaaccttcaagtctgcctggagcacactcaggctgcagctgtctgtagaagcaagtccctgaaagctggcctcgattacaaccgcagttaccagaatgaaataaagagattatatcatcagctcattaagagtaagacatctttacaacagtctttgaatgaaatcagtgggcagagtgttgctgaacagcttcagaaagcagatgcatatacagtggagctggagaacgccgagagccgagtggccaaactaagagatgaaggggagaggcttcatttaccttatgctttactccaggaggtttacaaattagaggatgtacttgacagtatgtggggaatgctaagagccaggtacacagaactcagcagccctttcgtcactgagagccagcaagatgctttgttgcaaggcatggtggaactggtgaagattgggaaggaaaagcttgctcatggccacttaaaacaaaccaaaagtaaagtggcgttacaggctcaaatagaaaatcacaaggtttttttccagaagcttgttgctgacatgttgttgatccaagcatactctgccaaaatacttccttctttattgcaaaacagagagacattttgggcagaacaagtaacagaagttaaaatactagaagaaaagtcacgccaatgtggtatgaagctgcagagtttgttgcagaaatgggaagaatttgatgaaaactatgcatctcttgaaaaggacctggaaattcttatatctacattgccctctgtgagtttggtggaagaaacagaggaaagattagtggaaaggatttcattttaccagcaaataaaaagaaacattggtggaaaacacgcccggctttaccaaactctgaacgaaggcaaacagttggtggcgtctgtgagctgtcctgaattagagggccagatcgcaaaactggaagagcagtggttgtccctgaacaagaaaattgaccatgagctccacaggctgcaagctcttctcaagcatctgctcagttataacagagattcggatcagttaaccaagtggttggaatcttcccagcatactctgaattactggaaagaacagtccctcaatgtgtctcaggacttggatacaatcagaagcaacatcaacaatttttttgagttttcaaaagaagttgatgaaaaatcctccttgaagactgccgttatcagtatcgggaaccagcttcttcacctgaaagaaactgatacagctacactgagagcttctttagcacagtttgaacaaaaatggacaatgctcataactcaacttccagatattcaagaaaaacttcaccagcttcaaatggagaaattgccgtctcgtaaagcaatcacagaaatgattagctggatgaacaatgtggagcatcaaacttcagatgaagactccgtgcattcaccaagttctgcatctcaagttaaacatcttcttcagaagcacaaggagtttagaatggaaatggactataaacagtggatagttgacttcgttaaccagtcattacttcagctaagcacctgtgatgtagaaagcaagcgctatgaaagaacggagtttgcagagcacctgggggagatgaaccgccagtggcaccgtgtacatggaatgctgaatagaaagatacaacatttagaacaacttctagaaagtatcactgagagtgaaaataaaatacagatcttgaacaactggctggaagcacaagaagagagactgaaaactttacaaaaacctgaaagtgtgatctcagtgcagaagctgctcctggactgtcaggatatagaaaatcaacttgcaattaaatccaaagcactagatgagttgaaacaaagttatctgactttggagagtggggcagtgccattgttagaagatacagcatcccgaattgatgagttatttcaaaagagaagcagtgttctcactcaggtcaatcagctcaaaacctccatgcagtcagttttacaggagtggaagatttatgatcaactctatgatgaagtgaatatgatgacaatccgattctggtactgcatggaacacagcaagcctgtggtgttatcattggagaccttgagatgccaggtggagaaccttcagtctctgcaagatgaagctgagagcagtgaagggagttgggagaaactccaggaggttatcggcaaactcaaaggtctctgcccctctgttgctgaaataatcgaagagaaatgccaaaatactcataaaaggtggactcaggtgaaccaagccattgcagaccagttgcagaaggcccagagtctgctccagctctggaaggcctatagcaatgctcatggtgaagctgccgcaaggctgaagcagcaggaagcaaagtttcaacagctcgcaaacatcagcatgtctggaaacaacctggcagagatcctgcccccagccctgcaggacataaaggagctgcagcatgatgtgcagaaaacaaaagaagcctttctccaaaattccagtgtcctggatcgactcccacaacccgcagagtccagcacccacatgctcctcccgggccccctgcactctctccagagggctgcttatttggaaaagatgctgcttgtgaaagcaaatgaatttgagtttgttctctcacagtttaaggattttggagtccggctggaatctttaaaaggtcttattatgcatgaagaagagaatttggatagacttcaccaacaggaaaaagaaaatcctgactcattcctgaatcatgtgctggcactgacagcccaatcacctgatattgaacatttgaatgaagtgagcctcaagctcccacttagtgacgtagctgtgaagacgttacaaaatatgaaccggcaatggattcgggccacggccacggcactggagcgctgcagtgagcttcagggaattggattgaatgaaaagtttctttattgctgtgaaaagtggatccaacttttggagaagatagaagaagcactcaaagtggatgtggctaacagccttcctgagctcctggagcagcagaaaacctataagatgttagaagctgaagtttctataaaccagacaattgctgattcctatgtcacccagtccttacaactcctggacacaacagaaatagagaacagaccagaatttattacagaattctcaaagctgacggatcggtggcagaatgctgtccagggtgttcggcagaggaagggtgacgttgatgggctggtgaggcagtggcaagatttcactacttctgtggagaacttgtttcgcttcctcactgacaccagccacctgctatctgcagtgaagggccaggagcgcttcagcctctaccaaaccagaagtctgatccatgagctgaagaataaagaaattcattttcaaaggaggcgaactacctgtgccctaaccttggaagctggagaaaagttactgctcacaactgacctgaaaactaaagagtctgtgggtaggagaatcagtcaacttcaggacagctggaaagacatggagccccagctggcagagatgattaagcagttccagagcactgtagagacctgggaccagtgtgaaaagaaaatcaaggagttgaaaagcaggctgcaagttttaaaggcacaaagtgaagatcctcttccagagcttcacgaggacctccataacgaaaaagagctgattaaggaactagaacagtctttggctagctggactcagaacttgaaagaacttcaaactatgaaggcggacttaacccggcacgttctcgtggaagatgtgatggttttgaaggagcaaatagagcatttgcacagacaatgggaggacctctgcttaagggtggccatacgtaaacaggagattgaagacagactcaatacatgggttgtattcaatgaaaaaaataaagagttgtgtgcctggctggtgcagatggaaaacaaagttctacagacagcggacattagtattgaagaaatgattgaaaagttacagaaggactgcatggaagaaataaacttgtttagtgaaaacaagttacagttaaagcagatgggtgaccagttgatcaaggccagcaacaaatcaagagcagctgagatcgatgacaagctcaacaaaattaacgatcgttggcaacatctttttgatgtcatcggatcaagggtgaagaagctgaaggagacctttgcttttattcagcagttggacaaaaacatgagcaaccttcgcacctggttggctcgaattgagtctgagctttccaagcctgttgtttatgatgtctgcgatgatcaagagatccagaagaggctcgctgagcagcaggatctacagcgagatattgaacaacacagcgcaggggtggagtccgtgtttaacatctgtgacgtcctactgcacgactccgatgcctgtgcaaatgagaccgagtgtgactcgatccagcagaccaccaggagcctggacagacgctggaggaacatttgtgccatgtccatggagcggcgcatgaaaatcgaggagacgtggcgcctgtggcagaagtttttagacgactattctcgctttgaggactggctcaagtcagctgagaggacggcagcctgcccaaattcctcagaggtgttgtacacgagtgccaaagaggaactgaagaggtttgaggcctttcagcggcagattcatgagcggctcactcagctggagctcatcaacaagcagtaccggcggctggcccgggagaaccgcacagacacggccagcaggctgaagcagatggtccacgagggcaaccagcgctgggacaaccttcagaggcgggtcacagccgtcctgcggagactcaggcatttcaccaaccagagggaagaatttgagggcaccagggagagcattctggtgtggctcacagagatggacctgcagctgaccaacgtggagcacttctcagagagtgacgccgatgacaagatgcgccaactgaatggcttccaacaggaaattacattaaataccaacaagattgatcagctcattgtgtttggggagcagctgattcagaagagcgagcccctggatgctgtgctgattgaggatgagctggaggaactccaccgctactgccaggaggtgtttggaagggtctcccggttccaccggcggctcacctcctgcactccgggcttggaagatgaaaaggaggcctctgagaatgaaacagacatggaagaccccagagaaatccagactgattcttggcgtaaacggggagagagcgaggaaccgtcatctcctcagtccctgtgtcatctagtggccccagggcacgagcggtctggctgcgagacccctgtcagcgtggactccatccccctggagtgggaccacacaggcgacgtggggggctcctcctctcacgaagaggacgaggagggcccatactacagcgcactgtcaggtaaatccatttcggatggccactcgtggcatgttcccgacagcccttcctgtcccgagcatcactacaagcaaatggaaggtgacaggaatgttccacctgttccccctgcgtccagcaccccttataaaccaccctatggaaagctactattacctccaggcacggatggtggcaaagaaggcccgcgagtcctgaatggcaacccacagcaggaagacgggggactggccggtatcacagagcagcagtcaggtgccttcgacagatgggagatgattcaagcacaggagcttcacaataagctcaaaataaaacaaaatttgcaacagctgaactctgatatcagcgccatcactacttggctgaaaaaaactgaagcagagctggaaatgttaaagatggcaaagcctccctctgatatccaggaaatagaactgagagtgaagagactgcaggagatactgaaagcctttgacacttacaaggcattagtggtctctgtcaacgtgagcagcaaggaatttctgcaaaccgagagccccgaatccacagagctccaaagtagactccgccagctgagcctgctctgggaagcagcacagggcgcagtggacagctggagagggggcttacgacagtcgctcatgcagtgccaggacttccaccagttgagtcaaaatctgctgctgtggttagcgagtgccaagaaccggaggcagaaggctcatgtcaccgatccaaaggcagacccccgggctctcctagagtgtcggagggaactaatgcaactggaaaaggagctggtagaacgtcaacctcaagtggacatgttacaggagatttcaaacagccttctcattaagggacatggagaagactgtattgaagctgaagaaaaggtgcatgttattgagaagaaactcaaacagttacgggagcaagtgtcccaagatttaatggccttgcagggaacccagaacccagcctcacccctgcccagcttcgacgaggtagactcgggggaccagcctcctgcaacatccgtgccagctccccgagcaaagcagttcagagcagtgagaactacagaaggcgaggaggagacagagagcagggtccccggcagcacacggccacagcgctccttcctctcaagggtggtccgggcagccctacccctgcagctgctcctcctgctgctgctgctcctggcctgcctgctgccctcctccgaagaagactacagctgcactcaggccaacaactttgcccggtccttttaccccatgctgaggtacaccaatgggccaccccccacatagagggcatagctggccacagtgctacaccacctgcctgattgccaagggtgcccagcacgtggccccagaccaatctgagtgacttagtgttggcaaggtcccgggacctgtgcagacttcttctgggcttacccagcacgggctccctggagcccagggcagctttcagattgtgttcctccccaggagcagggaacctgtgtggcaggtgccccgggtattttggcagaactagttgattagtttagggatctctggaaatgtcagtttcctgaagagccaagcactttgtgaattctggtttgtttgtaaaacagcattattataatgtaggtatggtcaatgagcagtggtgtccatcacatatattatagaagcaagcgaggacattccaccctagaaatggttcagaaactcataggcacccttagctgatggaaacaatcaatcatatttaatacgcttagaatcagttttactccaatcagctggcaattttgagctgccggttatacaccaaaatgttctgttcagtacctagctctgctcttttatattgctttaaatttttaaagaaattgtattgcatggatgtggttatttgtgcatattttttaacaatgcccaatctgtatgaataatgtaaacttcgatttttttttaaaaaaattagattttagctggagcttttgactaatgtaaagtaaatgccaaactaccgacttgatagggatgtttttgtaagttaattttctaagactttttcacatccaaagtgatgctttgctttgggttttaactgtttggccacggcgggggtgggggcggggggttggtacagaaacttgaagctgtttgtgatatgtacaactcagatgtttctcattaaaaaacaaaattagccaga

SEQ ID NO: 185030 - DNA, 21878 bp, Artificial Sequence
  derived and/or modified sequence
gtttgccgctttccgagcgccaaggagcggagcgcgctcagctgcgcccagagccttcggccggacctgaaaaagcgagagggagagcgagcaaaaggcgcgatccagagagccaggcaagcggggcgccgacctcgggcggccccggcccgcgcccttgcccctcggccgggcggacgttcacttcttcaactgagatggacatgatataatctccattgagtcaaagaatggcatctagtcctgagcttcccaccgaagatgaacagggttcctggggcatcgacgatctccatatttcattgcaagctgaacaggaagacacccagaagaaagccttcacgtgctggataaactcacagttggccaggcacacttctccctcagttatatccgacctattcacagacattaaaaaggggcatgtcctcctggatctgctagaagtactttctgggcaacagttgcctcgggataaaggatctaataccttccagtgtagaatcaatatagaacatgccttgacattcctaagaaaccgatcaattaagctaataaatattcatgttactgatatcattgatggaaacccatccattatccttggcctaatttggacaattatcctgcactttcatattgagaagcttgcccagactctttcttgcaattacaatcagccttccctggatgatgtgagtgtggttgactcatctcctgcctcaagtcctccagctaagaaatgctctaaagtgcaagcaagatggcaaatgtctgcaagaaaggcccttcttttgtgggctcaggaacaatgcgccacctatgagtctgtcaatgtgaccgattttaagtcaagttggagaaatgggatggcttttttggccatcattcatgccttgcgaccagacctaattgacatgaagagtgtgaagcatagatccaacaaagacaatctgagagaggccttcagaattgcagaacaagaattaaaaatccccagattgctggaaccagaagatgtggatgttgttgatcctgatgaaaagtccatcatgacctatgtggcacagtttctgcagtattccaaagatgcccctgggactggagaggaggctcagggaaaggtgaaagatgctatgggctggttaactctgcaaaaggaaaaactacagaagttgctaaaggattcagagaatgatacctactttaaaaagtataatagcctgctgtcctttatggagtcattcaatgaagaaaaaaagtcctttttggatgtcctgtcaataaaacgggatctggatgagctggacaaggatcatttacagttgagagaagcctgggatggcctcgatcaccagattaatgcatggaaaataaagctaaattatgccttgcccccacccctccatcaaactgaagcttggctccaggaggtagaagagcttatggatgaagatttgtcagcctcccaggatcactctcaagccgtgactctgatacaagagaaaatgactttattcaagagcctgatggatagatttgagcatcattcgaacattctccttacctttgaaaataaggatgaaaatcacttgccattggtaccacctaacaaattggaggaaatgaaaagacgaatcaacaacattttggagaaaaaatttattctacttctagaatttcattactacaagtgcttagttcttggtttggtagatgaagtgaaatcaaaattggatatttggaacattaaatatgggagcagagaatctgtggaattattgctggaagactggcataaatttattgaagaaaaagaattcctagctcgacttgatacttcttttcaaaaatgtggagaaatttataagaatttggctggagaatgtcagaatattaataaacagtatatgatggtgaaatctgatgtttgtatgtatagaaaaaatatatataatgtgaagtccactctacaaaaagtgctggcatgttgggctacttatgtggaaaaccttcgcttactaagggcttgctttgaggagacaaagaaggaagaaattaaagaggtaccctttgagacactagcccagtggaatctagaacacgctactttaaatgaagcaggaaatttcttagtcgaagtcagcaatgatgtggttggatcatctatttctaaagaactgagaaggctgaataaaagatggagaaagttggtttcaaaaactcaacttgaaatgaacctgccactgatgataaaaaaacaggatcagcccacttttgacaattctggaaatattctatctaaagaagagaaagcaactgttgagttttcaacagatatgtcagtagaacttcctgaaaattataatcaaaatataaaggctggagagaaacatgaaaaagaaaatgaagaattcacagggcaactaaaagtggctaaagatgttgaaaaactcattggacaagtggaaatctgggaggcagaagccaaatctgttttggatcaagatgatgtggacacctcaatggaagaatctttgaagcatcttattgccaaaggctctatgtttgatgagcttatggcaagaagtgaagatatgttacaaatggatatacaaaatatttcaagccaggagtcctttcaacatgttctcacaactgggcttcaggcaaagattcaagaagctaaagagaaagtccagatcaatgtggtaaaactcattgcagcgttgaagaacttaactgacgtttcaccagatttggacatcaggctgaagatggaagaatcccagaaggaacttgaatcatatatgatgagggctcagcagttactggggcaaagagagagccccggtgaactcatttcaaaacacaaggaagcactaataatttctaatacaaaaagtctggccaagtatttgaaagctgttgaagaactaaaaaataatgtaactgaggacataaagatgtctttagaagaaaagagtagagatgtctgtgccaaatgggagtctcttcatcatgaactgtctttatatgttcaacaactaaaaatagatattgaaaaaggaaagcttagtgacaatattttaaaacttgaaaagcaaataaataaagaaaagaaacttatccgtagaggaaggaccaagggtctcatcaaagaacatgaggcctgcttttctgaggaaggctgcctgtaccagcttaatcaccacatggaagtcctgagggagctgtgtgaagagctgccttcacagaagagtcaacaagaagtgaagagactactcaaagattatgaacaaaagatagaaagacttctgaaatgtgcttccgagattcatatgacactgcagcccacagcgggaggcacgtcgaaaaacgaggggaccatcaccacatctgagaatagaggaggggatccccacagtgaggcaccatttgcaaaatcagataatcagccatcaactgaaaaggcaatggaacccactatgaagtttagcctggcatcagtgttaaggcctctgcaagaagaaagcattatggaaaaggattacagtgcatctataaatagtttactagagaggtatgatacatacagagatattcttgaacaccacctgcaaaacaacaaattcaggattacttctgatttctctagtgaagaggacaggagtagttcttgtctgcaggctaaactgacagatctacaggtcataaaaaatgaaactgatgctcgctggaaagagtttgaaattatttcattgaagttagaaaatcatgtgaatgacataaaaaagccttttgtaattaaggaaagagacacactaaaggaaagagaaagagagcttcagatgactcttaataccagaatggaatctttagagacagcactgcggcttgtgttacctgtagagaaggcatcacttcttctctgtggctcggacctgcctctccataaaatggccatccagggatttcatctcattgatgctgatcgcatctatcaacacctaaggaatatccaagattccatagcaaaacagattgaaatatgtaaccgcttagaagagccaggcaactttgtattaaaggagttacacccatttgatctacacgcaatgcagaatattatactgaaatacaaaacacaatttgaaggaatgaaccacagggtgcagaggagtgaagatactctcaaagctctggaagactttttggcgtctctcagaacagctaaactctctgctgagcccgttacagacctttcagcctcagatacacaggtggcacaagaaaatacgttgacagtaaaaaataaagagggagaaattcatctgatgaaagacaaggccaaacatttggataaatgtttgaagatgctcgatatgagctttaaagatgctgaacggggtgatgacacctcctgtgaaaacctgcttgatgctttttcaataaagttatctgagacacatggctatggggtacaggaggaattcactgaggaaaacaaattactagaggcttgtattttcaaaaataatgaactccttaaaaatattcaagatgtgcagagtcaaatcagtaaaattggtcttaaggatcctactgttccagctgtgaaacatcggaaaaaatcattaatcagactggataaggttctagatgaatatgaagaagagaagagacatttacaagaaatggctaattctcttccacacttcaaagatggcagagaaaaaaccgtgaatcaacagtgccaaaatacagtagtcttgtgggagaataccaaagccttggtcaccgaatgtcttgaacaatgtgggagagttttggagctcttaaaacaatatcagaattttaaaagcatcttgacaactttgattcaaaaagaagagagtgtcatctccctgcaggcttcgtacatgggaaaggagaacctgaagaaaaggatagcagagattgaaattgtcaaagaagaatttaatgagcatttagaagttgtagacaagataaaccaggtctgcaaaaatctacaattttatctaaataaaatgaaaacttttgaagagcccccttttgaaaaagaggctaatattattgtggatagatggcttgatataaatgagaagacagaagattactatgaaaatcttggtcgagctctagctttgtgggacaaactttttaacttaaaaaatgtcattgatgagtggacagaaaaggcccttcaaaaaatggaattacatcaattgactgaagaggacagagaaaggctgaaggaagaattacaagtccatgaacaaaaaacttcagaattttctagaagagtggctgaaatacagtttttgctccaaagcagtgaaatacctcttgaattgcaggtcatggagtcctctattttgaacaagatggaacatgtacagaagtgcttaacaggagaatccaactgccatgcactcagtggcagcactgctgagctaagggaggatctcgaccaagccaagacccagatcgggatgactgaatccctcttaaaagccctgtctccttctgacagcttggagatcttcactaaactagaggagatacaacagcagattctacagcaaaaacacagtatgatattacttgagaatcaaataggttgtctgactcctgaactctctgaattgaaaaagcaatatgaaagtgtcagtgatttatttaataccaaaaaaagtgttttgcaagatcacttttctaagttattgaatgatcaatgcaagaactttaatgactggttcagcaacattaaagtgaaccttaaggagtgttttgaatcatcagaaacaaaaaagagtgtggaacaaaagctacaaaaactttctgatttcttgactcttgaaggaagaaacagtaaaataaagcaggtggacagcgtactgaagcatgtgaagaagcatctgcccaaagcacatgtgaaggagcttatcagttggctcgtgggtcaggaattcgaattagaaaaaatggagtccatatgccaggctcgagcaaaggagcttgaagactccttgcagcagctactgagactccaggatgaccatagaaacctgaggaagtggttgactaatcaagaagagaaatggaaaggaatggaagaaccaggggagaaaactgagctgttctgccaagctttagctagaaagagggaacagtttgaatctgtggcccaattgaacaactctttgaaggaatatgggtttactgaagaagaagaaataataatggaagcaacatgtttgatggatagataccagacattactgagacaactaagtgaaatcgaggaagaggataagttactacccacagaggaccagagctttaatgatcttgcacatgatgtaattcattggataaaagagattaaagagtcccttatggttttgaattcatccgaaggcaaaatgccacttgaggaaagaatccaaaaaatcaaggaaatcattttgctgaagcctgaaggggatgccagaatagagaccatcatgaagcaggctgagagcagcgaggccccgctggttcagaagaccctcactgacatcagcaaccagtgggacaacacactccatttagctagcacctacctaagccatcaagaaaagcttctactagaaggagagaaatatttacaaagtaaggaggatctgagattaatgctcatagaactaaagaagaaacaggaagcaggctttgctctacaacatggtctgcaggagaagaaagctcagttaaagatttataagaaattcctcaagaaagcccaagatttgacatccttgctaaaggagttaaaatctcagggaaactacctcttggagtgcactaaaaatcccagcttcagtgaagagccttggctggaaataaagcatctacacgaaagtcttcttcaacaactgcaggattctgtgcaaaacttggacggtcacgttcgagaacatgattcataccaggtttgcgtcacagacctgaatactacattggacaatttctccaaggaatttgtcagtttttctgataagcctgtggatcaaatagcggttgaggaaaaattgcagaaactgcaggaactagagaatagactcagtttacaagatggcacattaaagaagattttagctttagcaaaatccgtcaagcaaaatacatcttcagtggggcagaagattattaaagatgatataaaatcacttcagtgtaaacaaaaagatttggaaaacaggcttgcatctgctaagcaggagatggaatgttgtctcaacagcattctcaaatcaaaacgctcaacagaaaagaaaggaaagtttactctgccaggcagagagaagcaggccacttctgatgtgcaggagtctactcaggaatcagctgcagtggaaaagttggaggaagactgggaaataaacaaggattcagctgtggaaatggctatgtcaaaacaactttctcttaatgctcaagaaagcatgaaaaacactgaagatgagcggaaagtcaatgagctgcaaaatcaacctttagaattagatactatgttaagaaatgaacaattagaagagatagagaaattatatacccagttggaagcaaagaaagcagccattaagccactggaacaaacagaatgtcttaacaaaacagaaactggggccttggttctccacaatataggatattcggcacagcatttggacaatttgcttcaggcacttattactttgaagaaaaacaaagaaagccaatattgtgtcctcagagattttcaggaataccttgctgcagttgaatcttcaatgaaagccttgttgacagacaaggaaagtcttaaagtaggaccactggacagtgtaacgtatctggacaaaattaaaaaattcatagcatccatagaaaaagagaaagattctttaggcaacttgaaaatcaaatgggagaatttatcaaaccacgtgactgacatggataagaaattgttggaaagccagattaagcaacttgaacatggttgggaacaagtggaacagcagattcaaaagaagtattctcagcaggtagtggaatatgatgaatttacaaccctcatgaataaggtacaggacactgagatttctctgcaacagcagcagcaacatctacagttaaggctgaagtctccagaagaacgggcagggaaccaaagcatgattgccttgaccactgacctccaggctaccaagcatggattttctgttttaaaggggcaagctgaacttcagatgaagaggatttggggagaaaaagaaaagaagaatttggaggatggaataaataacttgaagaaacaatgggaaacattggagccattacacttagaagcagaaaatcagattaagaagtgtgacataaggaacaagatgaaagagactatcttatgggccaagaatttgttgggtgaacttaatccctccattccccttctcccagatgacattctttcacagatcagaaagtgcaaagtgacacatgatggcattctagctaggcagcagtctgtggaatcgttggctgaagaggtcaaagataaggttcctagccttacaacctatgagggcagtgatttaaataataccctagaggacttacggaatcaataccaaatgctggttttaaaatcaactcaaagatcacagcaattagaatttaagttggaagaaagaagcaatttttttgctataataaggaagtttcaacttatggttcaagaaagtgaaacactgataattcccagggtggagacagctgccacggaagctgaactaaaacatcaccatgttactttggaggcatctcagaaggaattgcaagaaattgacagtggaatctcaacacatcttcaggagctaacaaacatctatgaggagctgaatgtgtttgaaagattatttctggaagatcagttgaaaaatcttaagattaggaccaacagaatacaaagattcattcagaatacatgtaatgaagtggaacacaagataaagttttgcagacaattccatgaaaaaacatcagcgcttcaggaggaggctgacagtatacagcgcaatgaactattacttaatcaagaagtaaataaaggtgttaaagaggagatctataatcttaaagacagactcaccgctattaagtgttgcatcttacaggtattgaaacttaaaaaagtgtttgactatattggactaaactgggatttttcacaacttgaccaattacaaacccaagtatttgaaaaagaaaaggaacttgaagaaaaaattaagcagttggacacatttgaggaagaacatggcaaatatcaggcattattaagtaaaatgagagctattgatttgcaaattaagaaaatgactgaagtagtactaaaagctcctgatagctctccggaaagcagacggctcaatgcccaaattttaagtcagagaattgagaaagccaagtgtttatgtgatgagataataaagaaattaaatgaaaataagacctttgatgactcattcaaggagaaagaaatactacaaataaagctgaatgcagaagaaaatgataagttatacaaagttctccaaaacatggtattagaactctcaccaaaagaattggatgaaaagaattgtcaggacaaactagaaacttccttacatgttttaaatcagataaaatctcaattacagcagccattacttataaatttggaaattaaacatattcaaaatgaaaaggacaattgtgaagcatttcaggagcaagtttgggcagaaatgtgtagtattaaagctgtgactgctattgagaaacaaagagaagaaaactcttctgaagcgagtgatgtggagacaaaactacgtgagtttgaagatcttcagatgcagcttaacacaagcattgatttgcgcacaaatgtcttgaatgatgcttatgaaaatctaacacgctataaagaagcagtcaccagggcagtggagagcatcacttccctcgaagccatcattataccctacagagtagatgttggtaatccagaagaatctttagagatgcctcttcgaaaacaagaggaattggaatccacagtagcacacatccaggacctcactgagaaactgggaatgatatccagccccgaagccaaactacaacttcagtatactttacaggaactagtttctaagaactcagcaatgaaggaagctttcaaagcacaggaaactgaggcagaaaggtatcttgagaattacaaatgctatagaaaaatggaagaggatatttacactaacctcagcaaaatggagacagttcttggacagtccatgtcctcgttgccactgtcttacagagaagctttagagcgcttggaacagagcaaggccttggtgtcaaatcttatatcaaccaaagaagagttaatgaaactacgacagatccttagactcttgagactcaggtgcacagaaaatgatggcatatgtttgctcaagattgtgtcggctctgtgggagaaatggctgagtttgctggaagctgctaaagagtgggagatgtggtgcgaagaactgaagcaggaatggaaatttgtcagtgaagaaattgaacgagaggcaattattttagataatcttcaggaagaactccctgaaatttccaaaacaaaagaggcagccaccacagaggaactctctgagctgctagactgtttatgccaatatggagagaacgtggagaagcaacagctgttactgactctacttcttcagcgcatcagaagtatccagaatgttcctgaaagctcaggggctgtggaaactgttccagcatttcaagaaattacttctatgaaagaacgatgcaacaagcttcttcagaaagttcagaaaaataaagaattggtgcagactgaaatccaagaaagacattccttcacaaaagagataattgctttgaagaatttctttcaacagaccacaacttcattccaaaatatggcattccaggatcacccagaaaagtcagaacaatttgaggagcttcaaagcatccttaagaaagggaaactaacttttgagaatattatggaaaaactgcgaatcaagtattccgaaatgtacaccatagtccctgcagagattgaatcccaggtggaagaatgcagaaaagctttagaagacatagatgagaagattagcaatgaagtcttaaaaagctcaccatcatatgcaatgaggagaaaaatagaagaaattaacaatgggcttcataatgttgaaaagatgttgcagcagaaaagcaaaaatattgagaaagctcaagaaattcaaaagaaaatgtgggacgagttagatctatggcattccaaactaaatgagctggattctgaagttcaggacattgttgaacaggacccaggacaggctcaagaatggatggataacttgatgattcctttccagcagtatcagcaagtatcacagagagcagagtgtagaacctcacagttgaataaggccacagttaagatggaggaatatagtgaccttctgaagagcactgaggcttggatagaaaataccagtcatttgctggccaatcctgctgactatgactctttgaggacactgagtcaccatgctagcactgtgcaggattccaagtgttttagaagtggaccaagaccaaatatttatgtttcttattatgttacagttatacagatggctttggaagattcagaacagaagcacaatcttttacattcaatctttatggatctagaagacctgtcaataatttttgaaacagatgaattaacccaatccatacaagagttaagtaatcaagtaacagctttacaacaaaaaataatggaaagccttccacagattcagcgaatggctgatgatgtggttgctattgaatctgaagtaaaatcaatggaaaaaagagtttcaaaaatcaaaactatcctattatcaaaagaaatatttgatttttcacctgaagaacatctcaaacatggggaggtcatacttgaaaatatacgtcccatgaagaaaaccattgctgagatagtgtcttaccaagtggaactgaggttgccccaaacaggaatgaaacctctgcctgtgtttcagcggacaaatcagcttttacaagatataaaactattggaaaatgtgactcaagaacaaaatgagttattaaaggtagtcataaaacagaccaatgaatgggatgaagaaatagaaaatttgaaacagatcttaaataattattcagctcagttctcccttgaacatatgtcaccagaccaagctgacaagctgccacaactacagggagaaatcgaacgtatggagaaacagattctgagtttgaaccagagaaaagaagacctgttggtggacttgaaggccaccgtactaaaccttcaccagcatttgaagcaagaacaagaaggagtagaaagagataggctgccagctgtaacatcagaggaaggtggagtggcagagagggatgcttctgagcggaagttgaacagaagaggctccatgtcttacctggcagcagtcgaggaagaggtggaagaaagttccgtgaagagcgataatggagatgagaaggcagagccatcgcctcagtcttggtcttcactttggaagcatgacaaggacatggaagaagacagagcttcctcatcctctggaacaattgttcaggaagcatatgggaaaataagcacctctgataattccatggcacaaatcctcacaccagactcactaaacactgagcaaggcccagaatgttccctaaggcccaaccaaacagaagagggcaccacacctcctattgaggctgacactctggactcttctgacgcgcaaggaggtttggagcccagggtggagaaaactaggccggagcccacagaagtcctgcatgcctgcaagacccaggtggccgagctggagctgtggctgcaacaagccaacgtggcagttgagccggaaacattaaacgcagacatgcagcaggtgctggaacagcagctggtagggtgccaggctatgctaacagagattgagcacaaggttgcctttctgttagagacttgcaaagatcagggcctgggagataatggagccactcaacatgaggctgaagcgctttccctgaaactgaaaacagtgaagtgcaatttagaaaaagtccagatgatgcttcaggagaagcacagtgaagatcagcatcctaccattctaaagaaatcctcagagccagagcatcaagaagctctccaaccagttaacctttctgaattggaatccattgtaactgaaaggccacaattcagcagacaaaaagatttccagcagcaacaggttctggagttaaaaccaatggaacagaaagatttcatcaaattcatagaatttaatgctaagaaaatgtggccccagtattgccaacatgataacgatacaactcaggaatcatctgcaagcaaccaggcatccagccctgaaaatgacgttccagactcgatcttgtcaccccagggccaaaatggagataagtggcaatatctgcatcatgaactctcatcaaaaataaagctcccactccctcagcttgtggagcctcaggtttccacaaatatgggtattctacccagcgtgactatgtataactttagatacccaacaactgaagaactgaaaacctataccacccaacttgaagacctgcgccaagaagcaagtaaccttcagacacaggaaaatatgacagaagaagcatatatcaatttggataaaaaattgtttgaactattcctgaccctcagtcagtgcctcagcagtgtggaggagatgctggagatgcccagactttacagggaggatggttctggccagcaggtgcactacgagacgctggctcttgagttgaagaaactttatttagcgctaagtgacaagaagggtgatcttttgaaagccatgacttggcctggcgagaacaccaacttgctccttgaatgttttgacaaccttcaagtctgcctggagcacactcaggctgcagctgtctgtagaagcaagtccctgaaagctggcctcgattacaaccgcagttaccagaatgaaataaagagattatatcatcagctcattaagagtaagacatctttacaacagtctttgaatgaaatcagtgggcagagtgttgctgaacagcttcagaaagcagatgcatatacagtggagctggagaacgccgagagccgagtggccaaactaagagatgaaggggagaggcttcatttaccttatgctttactccaggaggtttacaaattagaggatgtacttgacagtatgtggggaatgctaagagccaggtacacagaactcagcagccctttcgtcactgagagccagcaagatgctttgttgcaaggcatggtggaactggtgaagattgggaaggaaaagcttgctcatggccacttaaaacaaaccaaaagtaaagtggcgttacaggctcaaatagaaaatcacaaggtttttttccagaagcttgttgctgacatgttgttgatccaagcatactctgccaaaatacttccttctttattgcaaaacagagagacattttgggcagaacaagtaacagaagttaaaatactagaagaaaagtcacgccaatgtggtatgaagctgcagagtttgttgcagaaatgggaagaatttgatgaaaactatgcatctcttgaaaaggacctggaaattcttatatctacattgccctctgtgagtttggtggaagaaacagaggaaagattagtggaaaggatttcattttaccagcaaataaaaagaaacattggtggaaaacacgcccggctttaccaaactctgaacgaaggcaaacagttggtggcgtctgtgagctgtcctgaattagagggccagatcgcaaaactggaagagcagtggttgtccctgaacaagaaaattgaccatgagctccacaggctgcaagctcttctcaagcatctgctcagttataacagagattcggatcagttaaccaagtggttggaatcttcccagcatactctgaattactggaaagaacagtccctcaatgtgtctcaggacttggatacaatcagaagcaacatcaacaatttttttgagttttcaaaagaagttgatgaaaaatcctccttgaagactgccgttatcagtatcgggaaccagcttcttcacctgaaagaaactgatacagctacactgagagcttctttagcacagtttgaacaaaaatggacaatgctcataactcaacttccagatattcaagaaaaacttcaccagcttcaaatggagaaattgccgtctcgtaaagcaatcacagaaatgattagctggatgaacaatgtggagcatcaaacttcagatgaagactccgtgcattcaccaagttctgcatctcaagttaaacatcttcttcagaagcacaaggagtttagaatggaaatggactataaacagtggatagttgacttcgttaaccagtcattacttcagctaagcacctgtgatgtagaaagcaagcgctatgaaagaacggagtttgcagagcacctgggggagatgaaccgccagtggcaccgtgtacatggaatgctgaatagaaagatacaacatttagaacaacttctagaaagtatcactgagagtgaaaataaaatacagatcttgaacaactggctggaagcacaagaagagagactgaaaactttacaaaaacctgaaagtgtgatctcagtgcagaagctgctcctggactgtcaggatatagaaaatcaacttgcaattaaatccaaagcactagatgagttgaaacaaagttatctgactttggagagtggggcagtgccattgttagaagatacagcatcccgaattgatgagttatttcaaaagagaagcagtgttctcactcaggtcaatcagctcaaaacctccatgcagtcagttttacaggagtggaagatttatgatcaactctatgatgaagtgaatatgatgacaatccgattctggtactgcatggaacacagcaagcctgtggtgttatcattggagaccttgagatgccaggtggagaaccttcagtctctgcaagatgaagctgagagcagtgaagggagttgggagaaactccaggaggttatcggcaaactcaaaggtctctgcccctctgttgctgaaataatcgaagagaaatgccaaaatactcataaaaggtggactcaggtgaaccaagccattgcagaccagttgcagaaggcccagagtctgctccagctctggaaggcctatagcaatgctcatggtgaagctgccgcaaggctgaagcagcaggaagcaaagtttcaacagctcgcaaacatcagcatgtctggaaacaacctggcagagatcctgcccccagccctgcaggacataaaggagctgcagcatgatgtgcagaaaacaaaagaagcctttctccaaaattccagtgtcctggatcgactcccacaacccgcagagtccagcacccacatgctcctcccgggccccctgcactctctccagagggctgcttatttggaaaagatgctgcttgtgaaagcaaatgaatttgagtttgttctctcacagtttaaggattttggagtccggctggaatctttaaaaggtcttattatgcatgaagaagagaatttggatagacttcaccaacaggaaaaagaaaatcctgactcattcctgaatcatgtgctggcactgacagcccaatcacctgatattgaacatttgaatgaagtgagcctcaagctcccacttagtgacgtagctgtgaagacgttacaaaatatgaaccggcaatggattcgggccacggccacggcactggagcgctgcagtgagcttcagggaattggattgaatgaaaagtttctttattgctgtgaaaagtggatccaacttttggagaagatagaagaagcactcaaagtggatgtggctaacagccttcctgagctcctggagcagcagaaaacctataagatgttagaagctgaagtttctataaaccagacaattgctgattcctatgtcacccagtccttacaactcctggacacaacagaaatagagaacagaccagaatttattacagaattctcaaagctgacggatcggtggcagaatgctgtccagggtgttcggcagaggaagggtgacgttgatgggctggtgaggcagtggcaagatttcactacttctgtggagaacttgtttcgcttcctcactgacaccagccacctgctatctgcagtgaagggccaggagcgcttcagcctctaccaaaccagaagtctgatccatgagctgaagaataaagaaattcattttcaaaggaggcgaactacctgtgccctaaccttggaagctggagaaaagttactgctcacaactgacctgaaaactaaagagtctgtgggtaggagaatcagtcaacttcaggacagctggaaagacatggagccccagctggcagagatgattaagcagttccagagcactgtagagacctgggaccagtgtgaaaagaaaatcaaggagttgaaaagcaggctgcaagttttaaaggcacaaagtgaagatcctcttccagagcttcacgaggacctccataacgaaaaagagctgattaaggaactagaacagtctttggctagctggactcagaacttgaaagaacttcaaactatgaaggcggacttaacccggcacgttctcgtggaagatgtgatggttttgaaggagcaaatagagcatttgcacagacaatgggaggacctctgcttaagggtggccatacgtaaacaggagattgaagacagactcaatacatgggttgtattcaatgaaaaaaataaagagttgtgtgcctggctggtgcagatggaaaacaaagttctacagacagcggacattagtattgaagaaatgattgaaaagttacagaaggactgcatggaagaaataaacttgtttagtgaaaacaagttacagttaaagcagatgggtgaccagttgatcaaggccagcaacaaatcaagagcagctgagatcgatgacaagctcaacaaaattaacgatcgttggcaacatctttttgatgtcatcggatcaagggtgaagaagctgaaggagacctttgcttttattcagcagttggacaaaaacatgagcaaccttcgcacctggttggctcgaattgagtctgagctttccaagcctgttgtttatgatgtctgcgatgatcaagagatccagaagaggctcgctgagcagcaggatctacagcgagatattgaacaacacagcgcaggggtggagtccgtgtttaacatctgtgacgtcctactgcacgactccgatgcctgtgcaaatgagaccgagtgtgactcgatccagcagaccaccaggagcctggacagacgctggaggaacatttgtgccatgtccatggagcggcgcatgaaaatcgaggagacgtggcgcctgtggcagaagtttttagacgactattctcgctttgaggactggctcaagtcagctgagaggacggcagcctgcccaaattcctcagaggtgttgtacacgagtgccaaagaggaactgaagaggtttgaggcctttcagcggcagattcatgagcggctcactcagctggagctcatcaacaagcagtaccggcggctggcccgggagaaccgcacagacacggccagcaggctgaagcagatggtccacgagggcaaccagcgctgggacaaccttcagaggcgggtcacagccgtcctgcggagactcaggcatttcaccaaccagagggaagaatttgagggcaccagggagagcattctggtgtggctcacagagatggacctgcagctgaccaacgtggagcacttctcagagagtgacgccgatgacaagatgcgccaactgaatggcttccaacaggaaattacattaaataccaacaagattgatcagctcattgtgtttggggagcagctgattcagaagagcgagcccctggatgctgtgctgattgaggatgagctggaggaactccaccgctactgccaggaggtgtttggaagggtctcccggttccaccggcggctcacctcctgcactccgggcttggaagatgaaaaggaggcctctgagaatgaaacagacatggaagaccccagagaaatccagactgattcttggcgtaaacggggagagagcgaggaaccgtcatctcctcagtccctgtgtcatctagtggccccagggcacgagcggtctggctgcgagacccctgtcagcgtggactccatccccctggagtgggaccacacaggcgacgtggggggctcctcctctcacgaagaggacgaggagggcccatactacagcgcactgtcaggtaaatccatttcggatggccactcgtggcatgttcccgacagcccttcctgtcccgagcatcactacaagcaaatggaaggtgacaggaatgttccacctgttccccctgcgtccagcaccccttataaaccaccctatggaaagctactattacctccaggcacggatggtggcaaagaaggcccgcgagtcctgaatggcaacccacagcaggaagacgggggactggccggtatcacagagcagcagtcaggtgccttcgacagatgggagatgattcaagcacaggagcttcacaataagctcaaaataaaacaaaatttgcaacagctgaactctgatatcagcgccatcactacttggctgaaaaaaactgaagcagagctggaaatgttaaagatggcaaagcctccctctgatatccaggaaatagaactgagagtgaagagactgcaggagatactgaaagcctttgacacttacaaggcattagtggtctctgtcaacgtgagcagcaaggaatttctgcaaaccgagagccccgaatccacagagctccaaagtagactccgccagctgagcctgctctgggaagcagcacagggcgcagtggacagctggagagggggcttacgacagtcgctcatgcagtgccaggacttccaccagttgagtcaaaatctgctgctgtggttagcgagtgccaagaaccggaggcagaaggctcatgtcaccgatccaaaggcagacccccgggctctcctagagtgtcggagggaactaatgcaactggaaaaggagctggtagaacgtcaacctcaagtggacatgttacaggagatttcaaacagccttctcattaagggacatggagaagactgtattgaagctgaagaaaaggtgcatgttattgagaagaaactcaaacagttacgggagcaagtgtcccaagatttaatggccttgcagggaacccagaacccagcctcacccctgcccagcttcgacgaggtagactcgggggaccagcctcctgcaacatccgtgccagctccccgagcaaagcagttcagagcagtgagaactacagaaggcgaggaggagacagagagcagggtccccggcagcacacggccacagcgctccttcctctcaagggtggtccgggcagccctacccctgcagctgctcctcctgctgctgctgctcctggcctgcctgctgccctcctccgaagaagactacagctgcactcaggccaacaactttgcccggtccttttaccccatgctgaggtacaccaatgggccaccccccacatagagggcatagctggccacagtgctacaccacctgcctgattgccaagggtgcccagcacgtggccccagaccaatctgagtgacttagtgttggcaaggtcccgggacctgtgcagacttcttctgggcttacccagcacgggctccctggagcccagggcagctttcagattgtgttcctccccaggagcagggaacctgtgtggcaggtgccccgggtattttggcagaactagttgattagtttagggatctctggaaatgtcagtttcctgaagagccaagcactttgtgaattctggtttgtttgtaaaacagcattattataatgtaggtatggtcaatgagcagtggtgtccatcacatatattatagaagcaagcgaggacattccaccctagaaatggttcagaaactcataggcacccttagctgatggaaacaatcaatcatatttaatacgcttagaatcagttttactccaatcagctggcaattttgagctgccggttatacaccaaaatgttctgttcagtacctagctctgctcttttatattgctttaaatttttaaagaaattgtattgcatggatgtggttatttgtgcatattttttaacaatgcccaatctgtatgaataatgtaaacttcgatttttttttaaaaaaattagattttagctggagcttttgactaatgtaaagtaaatgccaaactaccgacttgatagggatgtttttgtaagttaattttctaagactttttcacatccaaagtgatgctttgctttgggttttaactgtttggccacggcgggggtgggggcggggggttggtacagaaacttgaagctgtttgtgatatgtacaactcagatgtttctcattaaaaaacaaaattagccagacttctgttgtactg

SEQ ID NO: 185031 - DNA, 11095 bp, Artificial Sequence
  derived and/or modified sequence
tgctgcttgcagctttttagatcaggactgcaatggagatacaattaaatcctaaaggtactttagaagcagggggtgttgtaatgtcttttctagataatggtgtgacactatgaagagatatcaagtttaattcttacaaattagaaagcatcatctgactaaactgagtgtctctggggcttaatcagcttgtatcactagtggggttttgtcatgcaaactgcactcctttaaatcataaggatgtgctggaaggctgctttcactttttagaattaaacttttcccccagtctcgtgagtattgcaactctcttaatgcttttaggagcttcaaagcatccttaagaaagggaaactaacttttgagaatattatggaaaaactgcgaatcaagtattccgaaatgtacaccatagtccctgcagagattgaatcccaggtggaagaatgcagaaaagctttagaagacatagatgagaagattagcaatgaagtcttaaaaagctcaccatcatatgcaatgaggagaaaaatagaagaaattaacaatgggcttcataatgttgaaaagatgttgcagcagaaaagcaaaaatattgagaaagctcaagaaattcaaaagaaaatgtgggacgagttagatctatggcattccaaactaaatgagctggattctgaagttcaggacattgttgaacaggacccaggacaggctcaagaatggatggataacttgatgattcctttccagcagtatcagcaagtatcacagagagcagagtgtagaacctcacagttgaataaggccacagttaagatggaggaatatagtgaccttctgaagagcactgaggcttggatagaaaataccagtcatttgctggccaatcctgctgactatgactctttgaggacactgagtcaccatgctagcactgtgcaggattccaagtgttttagaagtggaccaagaccaaatatttatgtttcttattatgttacagttatacagatggctttggaagattcagaacagaagcacaatcttttacattcaatctttatggatctagaagacctgtcaataatttttgaaacagatgaattaacccaatccatacaagagttaagtaatcaagtaacagctttacaacaaaaaataatggaaagccttccacagattcagcgaatggctgatgatgtggttgctattgaatctgaagtaaaatcaatggaaaaaagagtttcaaaaatcaaaactatcctattatcaaaagaaatatttgatttttcacctgaagaacatctcaaacatggggaggtcatacttgaaaatatacgtcccatgaagaaaaccattgctgagatagtgtcttaccaagtggaactgaggttgccccaaacaggaatgaaacctctgcctgtgtttcagcggacaaatcagcttttacaagatataaaactattggaaaatgtgactcaagaacaaaatgagttattaaaggtagtcataaaacagaccaatgaatgggatgaagaaatagaaaatttgaaacagatcttaaataattattcagctcagttctcccttgaacatatgtcaccagaccaagctgacaagctgccacaactacagggagaaatcgaacgtatggagaaacagattctgagtttgaaccagagaaaagaagacctgttggtggacttgaaggccaccgtactaaaccttcaccagcatttgaagcaagaacaagaaggagtagaaagagataggctgccagctgtaacatcagaggaaggtggagtggcagagagggatgcttctgagcggaagttgaacagaagaggctccatgtcttacctggcagcagtcgaggaagaggtggaagaaagttccgtgaagagcgataatggagatgagaaggcagagccatcgcctcagtcttggtcttcactttggaagcatgacaaggacatggaagaagacagagcttcctcatcctctggaacaattgttcaggaagcatatgggaaaataagcacctctgataattccatggcacaaatcctcacaccagactcactaaacactgagcaaggcccagaatgttccctaaggcccaaccaaacagaagagggcaccacacctcctattgaggctgacactctggactcttctgacgcgcaaggaggtttggagcccagggtggagaaaactaggccggagcccacagaagtcctgcatgcctgcaagacccaggtggccgagctggagctgtggctgcaacaagccaacgtggcagttgagccggaaacattaaacgcagacatgcagcaggtgctggaacagcagctggtagggtgccaggctatgctaacagagattgagcacaaggttgcctttctgttagagacttgcaaagatcagggcctgggagataatggagccactcaacatgaggctgaagcgctttccctgaaactgaaaacagtgaagtgcaatttagaaaaagtccagatgatgcttcaggagaagcacagtgaagatcagcatcctaccattctaaagaaatcctcagagccagagcatcaagaagctctccaaccagttaacctttctgaattggaatccattgtaactgaaaggccacaattcagcagacaaaaagatttccagcagcaacaggttctggagttaaaaccaatggaacagaaagatttcatcaaattcatagaatttaatgctaagaaaatgtggccccagtattgccaacatgataacgatacaactcaggaatcatctgcaagcaaccaggcatccagccctgaaaatgacgttccagactcgatcttgtcaccccagggccaaaatggagataagtggcaatatctgcatcatgaactctcatcaaaaataaagctcccactccctcagcttgtggagcctcaggtttccacaaatatgggtattctacccagcgtgactatgtataactttagatacccaacaactgaagaactgaaaacctataccacccaacttgaagacctgcgccaagaagcaagtaaccttcagacacaggaaaatatgacagaagaagcatatatcaatttggataaaaaattgtttgaactattcctgaccctcagtcagtgcctcagcagtgtggaggagatgctggagatgcccagactttacagggaggatggttctggccagcaggtgcactacgagacgctggctcttgagttgaagaaactttatttagcgctaagtgacaagaagggtgatcttttgaaagccatgacttggcctggcgagaacaccaacttgctccttgaatgttttgacaaccttcaagtctgcctggagcacactcaggctgcagctgtctgtagaagcaagtccctgaaagctggcctcgattacaaccgcagttaccagaatgaaataaagagattatatcatcagctcattaagagtaagacatctttacaacagtctttgaatgaaatcagtgggcagagtgttgctgaacagcttcagaaagcagatgcatatacagtggagctggagaacgccgagagccgagtggccaaactaagagatgaaggggagaggcttcatttaccttatgctttactccaggaggtttacaaattagaggatgtacttgacagtatgtggggaatgctaagagccaggtacacagaactcagcagccctttcgtcactgagagccagcaagatgctttgttgcaaggcatggtggaactggtgaagattgggaaggaaaagcttgctcatggccacttaaaacaaaccaaaagtaaagtggcgttacaggctcaaatagaaaatcacaaggtttttttccagaagcttgttgctgacatgttgttgatccaagcatactctgccaaaatacttccttctttattgcaaaacagagagacattttgggcagaacaagtaacagaagttaaaatactagaagaaaagtcacgccaatgtggtatgaagctgcagagtttgttgcagaaatgggaagaatttgatgaaaactatgcatctcttgaaaaggacctggaaattcttatatctacattgccctctgtgagtttggtggaagaaacagaggaaagattagtggaaaggatttcattttaccagcaaataaaaagaaacattggtggaaaacacgcccggctttaccaaactctgaacgaaggcaaacagttggtggcgtctgtgagctgtcctgaattagagggccagatcgcaaaactggaagagcagtggttgtccctgaacaagaaaattgaccatgagctccacaggctgcaagctcttctcaagcatctgctcagttataacagagattcggatcagttaaccaagtggttggaatcttcccagcatactctgaattactggaaagaacagtccctcaatgtgtctcaggacttggatacaatcagaagcaacatcaacaatttttttgagttttcaaaagaagttgatgaaaaatcctccttgaagactgccgttatcagtatcgggaaccagcttcttcacctgaaagaaactgatacagctacactgagagcttctttagcacagtttgaacaaaaatggacaatgctcataactcaacttccagatattcaagaaaaacttcaccagcttcaaatggagaaattgccgtctcgtaaagcaatcacagaaatgattagctggatgaacaatgtggagcatcaaacttcagatgaagactccgtgcattcaccaagttctgcatctcaagttaaacatcttcttcagaagcacaaggagtttagaatggaaatggactataaacagtggatagttgacttcgttaaccagtcattacttcagctaagcacctgtgatgtagaaagcaagcgctatgaaagaacggagtttgcagagcacctgggggagatgaaccgccagtggcaccgtgtacatggaatgctgaatagaaagatacaacatttagaacaacttctagaaagtatcactgagagtgaaaataaaatacagatcttgaacaactggctggaagcacaagaagagagactgaaaactttacaaaaacctgaaagtgtgatctcagtgcagaagctgctcctggactgtcaggatatagaaaatcaacttgcaattaaatccaaagcactagatgagttgaaacaaagttatctgactttggagagtggggcagtgccattgttagaagatacagcatcccgaattgatgagttatttcaaaagagaagcagtgttctcactcaggtcaatcagctcaaaacctccatgcagtcagttttacaggagtggaagatttatgatcaactctatgatgaagtgaatatgatgacaatccgattctggtactgcatggaacacagcaagcctgtggtgttatcattggagaccttgagatgccaggtggagaaccttcagtctctgcaagatgaagctgagagcagtgaagggagttgggagaaactccaggaggttatcggcaaactcaaaggtctctgcccctctgttgctgaaataatcgaagagaaatgccaaaatactcataaaaggtggactcaggtgaaccaagccattgcagaccagttgcagaaggcccagagtctgctccagctctggaaggcctatagcaatgctcatggtgaagctgccgcaaggctgaagcagcaggaagcaaagtttcaacagctcgcaaacatcagcatgtctggaaacaacctggcagagatcctgcccccagccctgcaggacataaaggagctgcagcatgatgtgcagaaaacaaaagaagcctttctccaaaattccagtgtcctggatcgactcccacaacccgcagagtccagcacccacatgctcctcccgggccccctgcactctctccagagggctgcttatttggaaaagatgctgcttgtgaaagcaaatgaatttgagtttgttctctcacagtttaaggattttggagtccggctggaatctttaaaaggtcttattatgcatgaagaagagaatttggatagacttcaccaacaggaaaaagaaaatcctgactcattcctgaatcatgtgctggcactgacagcccaatcacctgatattgaacatttgaatgaagtgagcctcaagctcccacttagtgacgtagctgtgaagacgttacaaaatatgaaccggcaatggattcgggccacggccacggcactggagcgctgcagtgagcttcagggaattggattgaatgaaaagtttctttattgctgtgaaaagtggatccaacttttggagaagatagaagaagcactcaaagtggatgtggctaacagccttcctgagctcctggagcagcagaaaacctataagatgttagaagctgaagtttctataaaccagacaattgctgattcctatgtcacccagtccttacaactcctggacacaacagaaatagagaacagaccagaatttattacagaattctcaaagctgacggatcggtggcagaatgctgtccagggtgttcggcagaggaagggtgacgttgatgggctggtgaggcagtggcaagatttcactacttctgtggagaacttgtttcgcttcctcactgacaccagccacctgctatctgcagtgaagggccaggagcgcttcagcctctaccaaaccagaagtctgatccatgagctgaagaataaagaaattcattttcaaaggaggcgaactacctgtgccctaaccttggaagctggagaaaagttactgctcacaactgacctgaaaactaaagagtctgtgggtaggagaatcagtcaacttcaggacagctggaaagacatggagccccagctggcagagatgattaagcagttccagagcactgtagagacctgggaccagtgtgaaaagaaaatcaaggagttgaaaagcaggctgcaagttttaaaggcacaaagtgaagatcctcttccagagcttcacgaggacctccataacgaaaaagagctgattaaggaactagaacagtctttggctagctggactcagaacttgaaagaacttcaaactatgaaggcggacttaacccggcacgttctcgtggaagatgtgatggttttgaaggagcaaatagagcatttgcacagacaatgggaggacctctgcttaagggtggccatacgtaaacaggagattgaagacagactcaatacatgggttgtattcaatgaaaaaaataaagagttgtgtgcctggctggtgcagatggaaaacaaagttctacagacagcggacattagtattgaagaaatgattgaaaagttacagaaggactgcatggaagaaataaacttgtttagtgaaaacaagttacagttaaagcagatgggtgaccagttgatcaaggccagcaacaaatcaagagcagctgagatcgatgacaagctcaacaaaattaacgatcgttggcaacatctttttgatgtcatcggatcaagggtgaagaagctgaaggagacctttgcttttattcagcagttggacaaaaacatgagcaaccttcgcacctggttggctcgaattgagtctgagctttccaagcctgttgtttatgatgtctgcgatgatcaagagatccagaagaggctcgctgagcagcaggatctacagcgagatattgaacaacacagcgcaggggtggagtccgtgtttaacatctgtgacgtcctactgcacgactccgatgcctgtgcaaatgagaccgagtgtgactcgatccagcagaccaccaggagcctggacagacgctggaggaacatttgtgccatgtccatggagcggcgcatgaaaatcgaggagacgtggcgcctgtggcagaagtttttagacgactattctcgctttgaggactggctcaagtcagctgagaggacggcagcctgcccaaattcctcagaggtgttgtacacgagtgccaaagaggaactgaagaggtttgaggcctttcagcggcagattcatgagcggctcactcagctggagctcatcaacaagcagtaccggcggctggcccgggagaaccgcacagacacggccagcaggctgaagcagatggtccacgagggcaaccagcgctgggacaaccttcagaggcgggtcacagccgtcctgcggagactcaggcatttcaccaaccagagggaagaatttgagggcaccagggagagcattctggtgtggctcacagagatggacctgcagctgaccaacgtggagcacttctcagagagtgacgccgatgacaagatgcgccaactgaatggcttccaacaggaaattacattaaataccaacaagattgatcagctcattgtgtttggggagcagctgattcagaagagcgagcccctggatgctgtgctgattgaggatgagctggaggaactccaccgctactgccaggaggtgtttggaagggtctcccggttccaccggcggctcacctcctgcactccgggcttggaagatgaaaaggaggcctctgagaatgaaacagacatggaagaccccagagaaatccagactgattcttggcgtaaacggggagagagcgaggaaccgtcatctcctcagtccctgtgtcatctagtggccccagggcacgagcggtctggctgcgagacccctgtcagcgtggactccatccccctggagtgggaccacacaggcgacgtggggggctcctcctctcacgaagaggacgaggagggcccatactacagcgcactgtcaggtaaatccatttcggatggccactcgtggcatgttcccgacagcccttcctgtcccgagcatcactacaagcaaatggaaggtgacaggaatgttccacctgttccccctgcgtccagcaccccttataaaccaccctatggaaagctactattacctccaggcacggatggtggcaaagaaggcccgcgagtcctgaatggcaacccacagcaggaagacgggggactggccggtatcacagagcagcagtcaggtgccttcgacagatgggagatgattcaagcacaggagcttcacaataagctcaaaataaaacaaaatttgcaacagctgaactctgatatcagcgccatcactacttggctgaaaaaaactgaagcagagctggaaatgttaaagatggcaaagcctccctctgatatccaggaaatagaactgagagtgaagagactgcaggagatactgaaagcctttgacacttacaaggcattagtggtctctgtcaacgtgagcagcaaggaatttctgcaaaccgagagccccgaatccacagagctccaaagtagactccgccagctgagcctgctctgggaagcagcacagggcgcagtggacagctggagagggggcttacgacagtcgctcatgcagtgccaggacttccaccagttgagtcaaaatctgctgctgtggttagcgagtgccaagaaccggaggcagaaggctcatgtcaccgatccaaaggcagacccccgggctctcctagagtgtcggagggaactaatgcaactggaaaaggagctggtagaacgtcaacctcaagtggacatgttacaggagatttcaaacagccttctcattaagggacatggagaagactgtattgaagctgaagaaaaggtgcatgttattgagaagaaactcaaacagttacgggagcaagtgtcccaagatttaatggccttgcagggaacccagaacccagcctcacccctgcccagcttcgacgaggtagactcgggggaccagcctcctgcaacatccgtgccagctccccgagcaaagcagttcagagcagtgagaactacagaaggcgaggaggagacagagagcagggtccccggcagcacacggccacagcgctccttcctctcaagggtggtccgggcagccctacccctgcagctgctcctcctgctgctgctgctcctggcctgcctgctgccctcctccgaagaagactacagctgcactcaggccaacaactttgcccggtccttttaccccatgctgaggtacaccaatgggccaccccccacatagagggcatagctggccacagtgctacaccacctgcctgattgccaagggtgcccagcacgtggccccagaccaatctgagtgacttagtgttggcaaggtcccgggacctgtgcagacttcttctgggcttacccagcacgggctccctggagcccagggcagctttcagattgtgttcctccccaggagcagggaacctgtgtggcaggtgccccgggtattttggcagaactagttgattagtttagggatctctggaaatgtcagtttcctgaagagccaagcactttgtgaattctggtttgtttgtaaaacagcattattataatgtaggtatggtcaatgagcagtggtgtccatcacatatattatagaagcaagcgaggacattccaccctagaaatggttcagaaactcataggcacccttagctgatggaaacaatcaatcatatttaatacgcttagaatcagttttactccaatcagctggcaattttgagctgccggttatacaccaaaatgttctgttcagtacctagctctgctcttttatattgctttaaatttttaaagaaattgtattgcatggatgtggttatttgtgcatattttttaacaatgcccaatctgtatgaataatgtaaacttcgatttttttttaaaaaaattagattttagctggagcttttgactaatgtaaagtaaatgccaaactaccgacttgatagggatgtttttgtaagttaattttctaagactttttcacatccaaagtgatgctttgctttgggttttaactgtttggccacggcgggggtgggggcggggggttggtacagaaacttgaagctgtttgtgatatgtacaactcagatgtttctcattaaaaaacaaaattagcc

SEQ ID NO: 185032 - DNA, 3277 bp, Artificial Sequence
  derived and/or modified sequence
cagggtctcccccactaaaccgtgcgggtgtcaggggataaaagaagtgcaaaagcacaggcttggaggggatggcttgtgttaagttgctttgctcccatcagaatcgaggagacgtggcgcctgtggcagaagtttttagacgactattctcgctttgaggactggctcaagtcagctgagaggacggcagcctgcccaaattcctcagaggtgttgtacacgagtgccaaagaggaactgaagaggtttgaggcctttcagcggcagattcatgagcggctcactcagctggagctcatcaacaagcagtaccggcggctggcccgggagaaccgcacagacacggccagcaggctgaagcagatggtccacgagggcaaccagcgctgggacaaccttcagaggcgggtcacagccgtcctgcggagactcaggcatttcaccaaccagagggaagaatttgagggcaccagggagagcattctggtgtggctcacagagatggacctgcagctgaccaacgtggagcacttctcagagagtgacgccgatgacaagatgcgccaactgaatggcttccaacaggaaattacattaaataccaacaagattgatcagctcattgtgtttggggagcagctgattcagaagagcgagcccctggatgctgtgctgattgaggatgagctggaggaactccaccgctactgccaggaggtgtttggaagggtctcccggttccaccggcggctcacctcctgcactccgggcttggaagatgaaaaggaggcctctgagaatgaaacagacatggaagaccccagagaaatccagactgattcttggcgtaaacggggagagagcgaggaaccgtcatctcctcagtccctgtgtcatctagtggccccagggcacgagcggtctggctgcgagacccctgtcagcgtggactccatccccctggagtgggaccacacaggcgacgtggggggctcctcctctcacgaagaggacgaggagggcccatactacagcgcactgtcaggtaaatccatttcggatggccactcgtggcatgttcccgacagcccttcctgtcccgagcatcactacaagcaaatggaaggtgacaggaatgttccacctgttccccctgcgtccagcaccccttataaaccaccctatggaaagctactattacctccaggcacggatggtggcaaagaaggcccgcgagtcctgaatggcaacccacagcaggaagacgggggactggccggtatcacagagcagcagtcaggtgccttcgacagatgggagatgattcaagcacaggagcttcacaataagctcaaaataaaacaaaatttgcaacagctgaactctgatatcagcgccatcactacttggctgaaaaaaactgaagcagagctggaaatgttaaagatggcaaagcctccctctgatatccaggaaatagaactgagagtgaagagactgcaggagatactgaaagcctttgacacttacaaggcattagtggtctctgtcaacgtgagcagcaaggaatttctgcaaaccgagagccccgaatccacagagctccaaagtagactccgccagctgagcctgctctgggaagcagcacagggcgcagtggacagctggagagggggcttacgacagtcgctcatgcagtgccaggacttccaccagttgagtcaaaatctgctgctgtggttagcgagtgccaagaaccggaggcagaaggctcatgtcaccgatccaaaggcagacccccgggctctcctagagtgtcggagggaactaatgcaactggaaaaggagctggtagaacgtcaacctcaagtggacatgttacaggagatttcaaacagccttctcattaagggacatggagaagactgtattgaagctgaagaaaaggtgcatgttattgagaagaaactcaaacagttacgggagcaagtgtcccaagatttaatggccttgcagggaacccagaacccagcctcacccctgcccagcttcgacgaggtagactcgggggaccagcctcctgcaacatccgtgccagctccccgagcaaagcagttcagagcagtgagaactacagaaggcgaggaggagacagagagcagggtccccggcagcacacggccacagcgctccttcctctcaagggtggtccgggcagccctacccctgcagctgctcctcctgctgctgctgctcctggcctgcctgctgccctcctccgaagaagactacagctgcactcaggccaacaactttgcccggtccttttaccccatgctgaggtacaccaatgggccaccccccacatagagggcatagctggccacagtgctacaccacctgcctgattgccaagggtgcccagcacgtggccccagaccaatctgagtgacttagtgttggcaaggtcccgggacctgtgcagacttcttctgggcttacccagcacgggctccctggagcccagggcagctttcagattgtgttcctccccaggagcagggaacctgtgtggcaggtgccccgggtattttggcagaactagttgattagtttagggatctctggaaatgtcagtttcctgaagagccaagcactttgtgaattctggtttgtttgtaaaacagcattattataatgtaggtatggtcaatgagcagtggtgtccatcacatatattatagaagcaagcgaggacattccaccctagaaatggttcagaaactcataggcacccttagctgatggaaacaatcaatcatatttaatacgcttagaatcagttttactccaatcagctggcaattttgagctgccggttatacaccaaaatgttctgttcagtacctagctctgctcttttatattgctttaaatttttaaagaaattgtattgcatggatgtggttatttgtgcatattttttaacaatgcccaatctgtatgaataatgtaaacttcgatttttttttaaaaaaattagattttagctggagcttttgactaatgtaaagtaaatgccaaactaccgacttgatagggatgtttttgtaagttaattttctaagactttttcacatccaaagtgatgctttgctttgggttttaactgtttggccacggcgggggtgggggcggggggttggtacagaaacttgaagctgtttgtgatatgtacaactcagatgtttctcattaaaaaacaaaattagcc

SEQ ID NO: 185033 - DNA, 3396 bp, Artificial Sequence
  derived and/or modified sequence
ggcaaggccttgcaaataacaatttaccctgagtggatctacagcgagatattgaacaacacagcgcaggggtggagtccgtgtttaacatctgtgacgtcctactgcacgactccgatgcctgtgcaaatgagaccgagtgtgactcgatccagcagaccaccaggagcctggacagacgctggaggaacatttgtgccatgtccatggagcggcgcatgaaaatcgaggagacgtggcgcctgtggcagaagtttttagacgactattctcgctttgaggactggctcaagtcagctgagaggacggcagcctgcccaaattcctcagaggtgttgtacacgagtgccaaagaggaactgaagaggtttgaggcctttcagcggcagattcatgagcggctcactcagctggagctcatcaacaagcagtaccggcggctggcccgggagaaccgcacagacacggccagcaggctgaagcagatggtccacgagggcaaccagcgctgggacaaccttcagaggcgggtcacagccgtcctgcggagactcaggcatttcaccaaccagagggaagaatttgagggcaccagggagagcattctggtgtggctcacagagatggacctgcagctgaccaacgtggagcacttctcagagagtgacgccgatgacaagatgcgccaactgaatggcttccaacaggaaattacattaaataccaacaagattgatcagctcattgtgtttggggagcagctgattcagaagagcgagcccctggatgctgtgctgattgaggatgagctggaggaactccaccgctactgccaggaggtgtttggaagggtctcccggttccaccggcggctcacctcctgcactccgggcttggaagatgaaaaggaggcctctgagaatgaaacagacatggaagaccccagagaaatccagactgattcttggcgtaaacggggagagagcgaggaaccgtcatctcctcagtccctgtgtcatctagtggccccagggcacgagcggtctggctgcgagacccctgtcagcgtggactccatccccctggagtgggaccacacaggcgacgtggggggctcctcctctcacgaagaggacgaggagggcccatactacagcgcactgtcaggtaaatccatttcggatggccactcgtggcatgttcccgacagcccttcctgtcccgagcatcactacaagcaaatggaaggtgacaggaatgttccacctgttccccctgcgtccagcaccccttataaaccaccctatggaaagctactattacctccaggcacggatggtggcaaagaaggcccgcgagtcctgaatggcaacccacagcaggaagacgggggactggccggtatcacagagcagcagtcaggtgccttcgacagatgggagatgattcaagcacaggagcttcacaataagctcaaaataaaacaaaatttgcaacagctgaactctgatatcagcgccatcactacttggctgaaaaaaactgaagcagagctggaaatgttaaagatggcaaagcctccctctgatatccaggaaatagaactgagagtgaagagactgcaggagatactgaaagcctttgacacttacaaggcattagtggtctctgtcaacgtgagcagcaaggaatttctgcaaaccgagagccccgaatccacagagctccaaagtagactccgccagctgagcctgctctgggaagcagcacagggcgcagtggacagctggagagggggcttacgacagtcgctcatgcagtgccaggacttccaccagttgagtcaaaatctgctgctgtggttagcgagtgccaagaaccggaggcagaaggctcatgtcaccgatccaaaggcagacccccgggctctcctagagtgtcggagggaactaatgcaactggaaaaggagctggtagaacgtcaacctcaagtggacatgttacaggagatttcaaacagccttctcattaagggacatggagaagactgtattgaagctgaagaaaaggtgcatgttattgagaagaaactcaaacagttacgggagcaagtgtcccaagatttaatggccttgcagggaacccagaacccagcctcacccctgcccagcttcgacgaggtagactcgggggaccagcctcctgcaacatccgtgccagctccccgagcaaagcagttcagagcagtgagaactacagaaggcgaggaggagacagagagcagggtccccggcagcacacggccacagcgctccttcctctcaagggtggtccgggcagccctacccctgcagctgctcctcctgctgctgctgctcctggcctgcctgctgccctcctccgaagaagactacagctgcactcaggccaacaactttgcccggtccttttaccccatgctgaggtacaccaatgggccaccccccacatagagggcatagctggccacagtgctacaccacctgcctgattgccaagggtgcccagcacgtggccccagaccaatctgagtgacttagtgttggcaaggtcccgggacctgtgcagacttcttctgggcttacccagcacgggctccctggagcccagggcagctttcagattgtgttcctccccaggagcagggaacctgtgtggcaggtgccccgggtattttggcagaactagttgattagtttagggatctctggaaatgtcagtttcctgaagagccaagcactttgtgaattctggtttgtttgtaaaacagcattattataatgtaggtatggtcaatgagcagtggtgtccatcacatatattatagaagcaagcgaggacattccaccctagaaatggttcagaaactcataggcacccttagctgatggaaacaatcaatcatatttaatacgcttagaatcagttttactccaatcagctggcaattttgagctgccggttatacaccaaaatgttctgttcagtacctagctctgctcttttatattgctttaaatttttaaagaaattgtattgcatggatgtggttatttgtgcatattttttaacaatgcccaatctgtatgaataatgtaaacttcgatttttttttaaaaaaattagattttagctggagcttttgactaatgtaaagtaaatgccaaactaccgacttgatagggatgtttttgtaagttaattttctaagactttttcacatccaaagtgatgctttgctttgggttttaactgtttggccacggcgggggtgggggcggggggttggtacagaaacttgaagctgtttgtgatatgtacaactcagatgtttctcattaaaaaacaaaattagcc

SEQ ID NO: 185034 - protein, 2434 aa, Artificial Sequence
  derived and/or modified sequence
MDESSILRRRGLQKELSLPRRGSLIDSQKWNCLVKRCRTSNRKSLIGNGQSPALPRPHSPLSAHAGNSPQDSPRNFSPSASAHFSFARRTDGRRWSLASLPSSGYGTNTPSSTVSSSCSSQEKLHQLPYQPTPDELHFLSKHFCTTESIATENRCRNTPMRPRSRSLSPGRSPACCDHEIIMMNHVYKERFPKATAQMEERLKEIITSYSPDNVLPLADGVLSFTHHQIIELARDCLDKSHQGLITSRYFLELQHKLDKLLQEAHDRSESGELAFIKQLVRKILIVIARPARLLECLEFDPEEFYYLLEAAEGHAKEGQGIKTDIPRYIISQLGLNKDPLEEMAHLGNYDSGTAETPETDESVSSSNASLKLRRKPRESDFETIKLISNGAYGAVYFVRHKESRQRFAMKKINKQNLILRNQIQQAFVERDILTFAENPFVVSMYCSFETRRHLCMVMEYVEGGDCATLMKNMGPLPVDMARMYFAETVLALEYLHNYGIVHRDLKPDNLLVTSMGHIKLTDFGLSKVGLMSMTTNLYEGHIEKDAREFLDKQVCGTPEYIAPEVILRQGYGKPVDWWAMGIILYEFLVGCVPFFGDTPEELFGQVISDEINWPEKDEAPPPDAQDLITLLLRQNPLERLGTGGAYEVKQHRFFRSLDWNSLLRQKAEFIPQLESEDDTSYFDTRSEKYHHMETEEEDDTNDEDFNVEIRQFSSCSHRFSKVFSSIDRITQNSAEEKEDSVDKTKSTTLPSTETLSWSSEYSEMQQLSTSNSSDTESNRHKLSSGLLPKLAISTEGEQDEAASCPGDPHEEPGKPALPPEECAQEEPEVTTPASTISSSTLSVGSFSEHLDQINGRSECVDSTDNSSKPSSEPASHMARQRLESTEKKKISGKVTKSLSASALSLMIPGDMFAVSPLGSPMSPHSLSSDPSSSRDSSPSRDSSAASASPHQPIVIHSSGKNYGFTIRAIRVYVGDSDIYTVHHIVWNVEEGSPACQAGLKAGDLITHINGEPVHGLVHTEVIELLLKSGNKVSITTTPFENTSIKTGPARRNSYKSRMVRRSKKSKKKESLERRRSLFKKLAKQPSPLLHTSRSFSCLNRSLSSGESLPGSPTHSLSPRSPTPSYRSTPDFPSGTNSSQSSSPSSSAPNSPAGSGHIRPSTLHGLAPKLGGQRYRSGRRKSAGNIPLSPLARTPSPTPQPTSPQRSPSPLLGHSLGNSKIAQAFPSKMHSPPTIVRHIVRPKSAEPPRSPLLKRVQSEEKLSPSYGSDKKHLCSRKHSLEVTQEEVQREQSQREAPLQSLDENVCDVPPLSRARPVEQGCLKRPVSRKVGRQESVDDLDRDKLKAKVVVKKADGFPEKQESHQKSHGPGSDLENFALFKLEEREKKVYPKAVERSSTFENKASMQEAPPLGSLLKDALHKQASVRASEGAMSDGRVPAEHRQGGGDFRRAPAPGTLQDGLCHSLDRGISGKGEGTEKSSQAKELLRCEKLDSKLANIDYLRKKMSLEDKEDNLCPVLKPKMTAGSHECLPGNPVRPTGGQQEPPPASESRAFVSSTHAAQMSAVSFVPLKALTGRVDSGTEKPGLVAPESPVRKSPSEYKLEGRSVSCLKPIEGTLDIALLSGPQASKTELPSPESAQSPSPSGDVRASVPPVLPSSSGKKNDTTSARELSPSSLKMNKSYLLEPWFLPPSRGLQNSPAVSLPDPEFKRDRKGPHPTARSPGTVMESNPQQREGSSPKHQDHTTDPKLLTCLGQNLHSPDLARPRCPLPPEASPSREKPGLRESSERGPPTARSERSAARADTCREPSMELCFPETAKTSDNSKNLLSVGRTHPDFYTQTQAMEKAWAPGGKTNHKDGPGEARPPPRDNSSLHSAGIPCEKELGKVRRGVEPKPEALLARRSLQPPGIESEKSEKLSSFPSLQKDGAKEPERKEQPLQRHPSSIPPPPLTAKDLSSPAARQHCSSPSHASGREPGAKPSTAEPSSSPQDPPKPVAAHSESSSHKPRPGPDPGPPKTKHPDRSLSSQKPSVGATKGKEPATQSLGGSSREGKGHSKSGPDVFPATPGSQNKASDGIGQGEGGPSVPLHTDRAPLDAKPQPTSGGRPLEVLEKPVHLPRPGHPGPSEPADQKLSAVGEKQTLSPKHPKPSTVKDCPTLCKQTDNRQTDKSPSQPAANTDRRAEGKKCTEALYAPAEGDKLEAGLSFVHSENRLKGAERPAAGVGKGFPEARGKGPGPQKPPTEADKPNGMKRSPSATGQSSFRSTALPEKSLSCSSSFPETRAGVREASAASSDTSSAKAAGGMLELPAPSNRDHRKAQPAGEGRTHMTKSDSLPSFRVSTLPLESHHPDPNTMGGASHRDRALSVTATVGETKGKDPAPAQPPPARKQNVGRDVTKPSPAPNTDRPISLSNEKDFVVRQRRGKESLRSSPHKKAL

SEQ ID NO: 185035 - DNA, 7305 bp, Artificial Sequence
  derived and/or modified sequence
atggacgagagcagcatcctgagaagaagaggcctgcagaaggagctgagcctgcccagaagaggcagcctgatcgacagccagaagtggaactgcctggtgaagagatgcagaaccagcaacagaaagagcctgatcggcaacggccagagccccgccctgcccagaccccacagccccctgagcgcccacgccggcaacagcccccaggacagccccagaaacttcagccccagcgccagcgcccacttcagcttcgccagaagaaccgacggcagaagatggagcctggccagcctgcccagcagcggctacggcaccaacacccccagcagcaccgtgagcagcagctgcagcagccaggagaagctgcaccagctgccctaccagcccacccccgacgagctgcacttcctgagcaagcacttctgcaccaccgagagcatcgccaccgagaacagatgcagaaacacccccatgagacccagaagcagaagcctgagccccggcagaagccccgcctgctgcgaccacgagatcatcatgatgaaccacgtgtacaaggagagattccccaaggccaccgcccagatggaggagagactgaaggagatcatcaccagctacagccccgacaacgtgctgcccctggccgacggcgtgctgagcttcacccaccaccagatcatcgagctggccagagactgcctggacaagagccaccagggcctgatcaccagcagatacttcctggagctgcagcacaagctggacaagctgctgcaggaggcccacgacagaagcgagagcggcgagctggccttcatcaagcagctggtgagaaagatcctgatcgtgatcgccagacccgccagactgctggagtgcctggagttcgaccccgaggagttctactacctgctggaggccgccgagggccacgccaaggagggccagggcatcaagaccgacatccccagatacatcatcagccagctgggcctgaacaaggaccccctggaggagatggcccacctgggcaactacgacagcggcaccgccgagacccccgagaccgacgagagcgtgagcagcagcaacgccagcctgaagctgagaagaaagcccagagagagcgacttcgagaccatcaagctgatcagcaacggcgcctacggcgccgtgtacttcgtgagacacaaggagagcagacagagattcgccatgaagaagatcaacaagcagaacctgatcctgagaaaccagatccagcaggccttcgtggagagagacatcctgaccttcgccgagaaccccttcgtggtgagcatgtactgcagcttcgagaccagaagacacctgtgcatggtgatggagtacgtggagggcggcgactgcgccaccctgatgaagaacatgggccccctgcccgtggacatggccagaatgtacttcgccgagaccgtgctggccctggagtacctgcacaactacggcatcgtgcacagagacctgaagcccgacaacctgctggtgaccagcatgggccacatcaagctgaccgacttcggcctgagcaaggtgggcctgatgagcatgaccaccaacctgtacgagggccacatcgagaaggacgccagagagttcctggacaagcaggtgtgcggcacccccgagtacatcgcccccgaggtgatcctgagacagggctacggcaagcccgtggactggtgggccatgggcatcatcctgtacgagttcctggtgggctgcgtgcccttcttcggcgacacccccgaggagctgttcggccaggtgatcagcgacgagatcaactggcccgagaaggacgaggcccccccccccgacgcccaggacctgatcaccctgctgctgagacagaaccccctggagagactgggcaccggcggcgcctacgaggtgaagcagcacagattcttcagaagcctggactggaacagcctgctgagacagaaggccgagttcatcccccagctggagagcgaggacgacaccagctacttcgacaccagaagcgagaagtaccaccacatggagaccgaggaggaggacgacaccaacgacgaggacttcaacgtggagatcagacagttcagcagctgcagccacagattcagcaaggtgttcagcagcatcgacagaatcacccagaacagcgccgaggagaaggaggacagcgtggacaagaccaagagcaccaccctgcccagcaccgagaccctgagctggagcagcgagtacagcgagatgcagcagctgagcaccagcaacagcagcgacaccgagagcaacagacacaagctgagcagcggcctgctgcccaagctggccatcagcaccgagggcgagcaggacgaggccgccagctgccccggcgacccccacgaggagcccggcaagcccgccctgccccccgaggagtgcgcccaggaggagcccgaggtgaccacccccgccagcaccatcagcagcagcaccctgagcgtgggcagcttcagcgagcacctggaccagatcaacggcagaagcgagtgcgtggacagcaccgacaacagcagcaagcccagcagcgagcccgccagccacatggccagacagagactggagagcaccgagaagaagaagatcagcggcaaggtgaccaagagcctgagcgccagcgccctgagcctgatgatccccggcgacatgttcgccgtgagccccctgggcagccccatgagcccccacagcctgagcagcgaccccagcagcagcagagacagcagccccagcagagacagcagcgccgccagcgccagcccccaccagcccatcgtgatccacagcagcggcaagaactacggcttcaccatcagagccatcagagtgtacgtgggcgacagcgacatctacaccgtgcaccacatcgtgtggaacgtggaggagggcagccccgcctgccaggccggcctgaaggccggcgacctgatcacccacatcaacggcgagcccgtgcacggcctggtgcacaccgaggtgatcgagctgctgctgaagagcggcaacaaggtgagcatcaccaccacccccttcgagaacaccagcatcaagaccggccccgccagaagaaacagctacaagagcagaatggtgagaagaagcaagaagagcaagaagaaggagagcctggagagaagaagaagcctgttcaagaagctggccaagcagcccagccccctgctgcacaccagcagaagcttcagctgcctgaacagaagcctgagcagcggcgagagcctgcccggcagccccacccacagcctgagccccagaagccccacccccagctacagaagcacccccgacttccccagcggcaccaacagcagccagagcagcagccccagcagcagcgcccccaacagccccgccggcagcggccacatcagacccagcaccctgcacggcctggcccccaagctgggcggccagagatacagaagcggcagaagaaagagcgccggcaacatccccctgagccccctggccagaacccccagccccaccccccagcccaccagcccccagagaagccccagccccctgctgggccacagcctgggcaacagcaagatcgcccaggccttccccagcaagatgcacagcccccccaccatcgtgagacacatcgtgagacccaagagcgccgagccccccagaagccccctgctgaagagagtgcagagcgaggagaagctgagccccagctacggcagcgacaagaagcacctgtgcagcagaaagcacagcctggaggtgacccaggaggaggtgcagagagagcagagccagagagaggcccccctgcagagcctggacgagaacgtgtgcgacgtgccccccctgagcagagccagacccgtggagcagggctgcctgaagagacccgtgagcagaaaggtgggcagacaggagagcgtggacgacctggacagagacaagctgaaggccaaggtggtggtgaagaaggccgacggcttccccgagaagcaggagagccaccagaagagccacggccccggcagcgacctggagaacttcgccctgttcaagctggaggagagagagaagaaggtgtaccccaaggccgtggagagaagcagcaccttcgagaacaaggccagcatgcaggaggccccccccctgggcagcctgctgaaggacgccctgcacaagcaggccagcgtgagagccagcgagggcgccatgagcgacggcagagtgcccgccgagcacagacagggcggcggcgacttcagaagagcccccgcccccggcaccctgcaggacggcctgtgccacagcctggacagaggcatcagcggcaagggcgagggcaccgagaagagcagccaggccaaggagctgctgagatgcgagaagctggacagcaagctggccaacatcgactacctgagaaagaagatgagcctggaggacaaggaggacaacctgtgccccgtgctgaagcccaagatgaccgccggcagccacgagtgcctgcccggcaaccccgtgagacccaccggcggccagcaggagcccccccccgccagcgagagcagagccttcgtgagcagcacccacgccgcccagatgagcgccgtgagcttcgtgcccctgaaggccctgaccggcagagtggacagcggcaccgagaagcccggcctggtggcccccgagagccccgtgagaaagagccccagcgagtacaagctggagggcagaagcgtgagctgcctgaagcccatcgagggcaccctggacatcgccctgctgagcggcccccaggccagcaagaccgagctgcccagccccgagagcgcccagagccccagccccagcggcgacgtgagagccagcgtgccccccgtgctgcccagcagcagcggcaagaagaacgacaccaccagcgccagagagctgagccccagcagcctgaagatgaacaagagctacctgctggagccctggttcctgccccccagcagaggcctgcagaacagccccgccgtgagcctgcccgaccccgagttcaagagagacagaaagggcccccaccccaccgccagaagccccggcaccgtgatggagagcaacccccagcagagagagggcagcagccccaagcaccaggaccacaccaccgaccccaagctgctgacctgcctgggccagaacctgcacagccccgacctggccagacccagatgccccctgccccccgaggccagccccagcagagagaagcccggcctgagagagagcagcgagagaggcccccccaccgccagaagcgagagaagcgccgccagagccgacacctgcagagagcccagcatggagctgtgcttccccgagaccgccaagaccagcgacaacagcaagaacctgctgagcgtgggcagaacccaccccgacttctacacccagacccaggccatggagaaggcctgggcccccggcggcaagaccaaccacaaggacggccccggcgaggccagacccccccccagagacaacagcagcctgcacagcgccggcatcccctgcgagaaggagctgggcaaggtgagaagaggcgtggagcccaagcccgaggccctgctggccagaagaagcctgcagccccccggcatcgagagcgagaagagcgagaagctgagcagcttccccagcctgcagaaggacggcgccaaggagcccgagagaaaggagcagcccctgcagagacaccccagcagcatcccccccccccccctgaccgccaaggacctgagcagccccgccgccagacagcactgcagcagccccagccacgccagcggcagagagcccggcgccaagcccagcaccgccgagcccagcagcagcccccaggacccccccaagcccgtggccgcccacagcgagagcagcagccacaagcccagacccggccccgaccccggcccccccaagaccaagcaccccgacagaagcctgagcagccagaagcccagcgtgggcgccaccaagggcaaggagcccgccacccagagcctgggcggcagcagcagagagggcaagggccacagcaagagcggccccgacgtgttccccgccacccccggcagccagaacaaggccagcgacggcatcggccagggcgagggcggccccagcgtgcccctgcacaccgacagagcccccctggacgccaagccccagcccaccagcggcggcagacccctggaggtgctggagaagcccgtgcacctgcccagacccggccaccccggccccagcgagcccgccgaccagaagctgagcgccgtgggcgagaagcagaccctgagccccaagcaccccaagcccagcaccgtgaaggactgccccaccctgtgcaagcagaccgacaacagacagaccgacaagagccccagccagcccgccgccaacaccgacagaagagccgagggcaagaagtgcaccgaggccctgtacgcccccgccgagggcgacaagctggaggccggcctgagcttcgtgcacagcgagaacagactgaagggcgccgagagacccgccgccggcgtgggcaagggcttccccgaggccagaggcaagggccccggcccccagaagccccccaccgaggccgacaagcccaacggcatgaagagaagccccagcgccaccggccagagcagcttcagaagcaccgccctgcccgagaagagcctgagctgcagcagcagcttccccgagaccagagccggcgtgagagaggccagcgccgccagcagcgacaccagcagcgccaaggccgccggcggcatgctggagctgcccgcccccagcaacagagaccacagaaaggcccagcccgccggcgagggcagaacccacatgaccaagagcgacagcctgcccagcttcagagtgagcaccctgcccctggagagccaccaccccgaccccaacaccatgggcggcgccagccacagagacagagccctgagcgtgaccgccaccgtgggcgagaccaagggcaaggaccccgcccccgcccagcccccccccgccagaaagcagaacgtgggcagagacgtgaccaagcccagccccgcccccaacaccgacagacccatcagcctgagcaacgagaaggacttcgtggtgagacagagaagaggcaaggagagcctgagaagcagcccccacaagaaggccctgtag

SEQ ID NO: 185036 - DNA, 7305 bp, Artificial Sequence
  derived and/or modified sequence
atggatgagagcagtattctccggcgacgcggcttgcagaaggagctttctctgcctcgaaggggctcgcttattgacagtcaaaagtggaattgtctggtcaaacgctgccggacctcgaacaggaagtctctgattggaaacggccagtcgcccgctctaccaagacctcattctcccctgagcgcacatgcaggaaactcaccacaggattctccccgtaacttttcccccagtgcctccgctcacttctcatttgctcgaaggaccgatgggagacgctggagcctcgccagtctcccttcctctggatatgggaccaacaccccctcaagcactgtgtcctccagctgtagcagccaggaaaaactccatcaactcccgtaccagccaacaccagatgagcttcatttcctgagtaaacacttctgtacgacagaaagtatcgcaactgaaaacagatgcagaaataccccaatgcgtccgcgcagccggtctttgagtcccggcaggagccccgcatgttgtgatcacgagatcatcatgatgaatcacgtgtacaaagagaggtttcccaaagccacagcccagatggaagagaggctgaaagagatcattaccagctactcccctgataacgtccttccactggccgacggagttctgagttttacccaccatcagatcatcgaattagctagagattgccttgacaaaagccaccagggccttattacatctcggtatttcctggagttacagcataaactggataaacttctacaggaagctcacgatagatccgagagcggtgagctggccttcattaaacagctagtgaggaagatactgattgtgatcgcccgccccgcccgcttactagaatgtctggaattcgaccccgaagagttttactatctgttggaggccgctgagggccacgccaaagaggggcaaggcattaaaacagatattccaaggtacattatttctcagctcggactgaacaaggacccactggaagaaatggcccatctcggaaactacgatagtggcactgcagaaacccccgaaacagatgagtcagtgtcatcctcaaatgcgagcctcaagctgagacgcaagccgagagaaagcgacttcgaaactatcaaattgatcagcaatggcgcctatggtgcggtctatttcgttaggcacaaggaatccagacagaggttcgcaatgaaaaagatcaacaaacagaatctaatcttgagaaatcagatccagcaagcgtttgtcgagagggatatccttaccttcgccgagaacccattcgttgttagcatgtactgtagttttgaaacccgtagacacctctgtatggtcatggaatacgtggaaggcggggattgcgcaactcttatgaaaaatatgggtccgttacccgtagacatggccaggatgtacttcgccgagacagttcttgctctggaatacttgcataattatgggatagtgcaccgagatttgaagccagacaacttattagtgactagtatgggccacattaagctgactgatttcgggcttagcaaggtaggtcttatgagtatgacgacgaacctttacgagggtcacatagaaaaagacgcccgtgagttcctggacaagcaggtttgtggcacccccgagtacattgccccggaagtaatactaaggcagggctacgggaagcctgtggattggtgggctatgggcataatactctatgaatttttggtgggatgcgtgccgtttttcggggacaccccggaagagctgtttggacaggtgataagcgatgagattaactggcccgagaaggatgaagccccacctccagatgcacaggaccttattacccttctcctccgtcagaacccactggagaggctggggactgggggagcttatgaggttaaacagcatcgctttttccgctccctcgattggaacagcctgttgcgacaaaaggctgaattcatcccacaattggagagtgaggatgacacatcttatttcgacactcgctctgaaaaatatcatcacatggaaacggaggaggaggatgacacaaacgatgaggattttaacgtcgagatcaggcaattcagttcttgctcgcaccgtttttctaaagtgttttccagcattgacaggatcacacagaacagcgcggaagaaaaggaagactcagtagacaaaacgaaatccacaactctgccatcaactgaaacgctgtcttggtcttccgagtacagcgaaatgcagcagctatcaacctctaatagttctgataccgaaagtaatcgccacaaactcagctccgggctactacctaagctggcaatctccactgaaggggagcaggacgaagccgcatcatgcccgggtgacccgcatgaggaaccaggaaagcctgcgctgccccctgaagagtgcgcacaggaggaaccagaggtgacaacaccagcatcaacaattagtagtagcacactgagcgtggggtcattttcagagcatctagatcagattaacggccgatcagaatgtgtggactcgaccgataattcttctaagccttcttctgaacccgcctcgcatatggcacggcagcgcctagagtccacagaaaaaaaaaagatcagtggtaaggttacaaaatcgctgtcagccagcgccctcagcctgatgatcccaggggatatgttcgctgtgtcacccctgggtagtccaatgtcccctcatagtctgtcttccgaccctagtagtagccgggactcctcccctagcagagacagtagtgcagcctccgccagcccacaccagccaatagtgatacatagctcagggaagaactatgggtttacgatacgcgcaattcgcgtgtatgtaggcgattcagacatttatacagtacaccacatcgtctggaacgtggaagaaggaagccccgcgtgccaggccggcctcaaggcaggggacctcatcacgcatatcaatggggagccagtgcatgggctggttcataccgaggtgatcgagctgttgctgaaatccggcaacaaggtgagcataactactactccgtttgagaataccagcattaagacagggcccgccaggcggaatagctacaagtccaggatggtccggcggtctaaaaagtcaaagaaaaaagaatctcttgagaggcgaaggtcactctttaagaaacttgcgaagcagcccagcccactgctgcatacctccagatctttcagctgcttaaaccgctcgctcagctctggcgagtcgctgccaggctctcctacccactcgctgtcgccaaggtctcccacacctagttacaggagcacaccggactttccatcaggcacaaactctagccaatcttccagcccttcatcttcggcccctaacagccccgccggatccggccacatccggccttccacactgcacggactggcacccaagctgggcggccagcggtaccgtagcggaagaagaaagtctgctgggaacatccccctgagccctctcgcccgaaccccctcgccgacgccccagcccacatctcctcagcgctcgcccagccccttgctcgggcattctctcggcaattcaaaaatcgcccaagcctttccatctaaaatgcactcccctcccacaattgtacgccacattgtccggccaaagtccgccgagcctccaaggagccctttgctcaagagggtgcaatcagaagagaagctcagtccaagttacggtagcgataagaagcacctctgctcacgcaagcacagcttggaggtaacacaggaagaagtgcagcgagaacaatcacaaagagaagcaccattacagagccttgacgagaacgtgtgtgatgtccccccactctccagagccaggccagttgagcaggggtgcctgaaaagaccagtctctcgcaaggtaggccgacaggaatctgtcgacgatctggaccgggataaattgaaggctaaggtggtggtgaagaaggcagatggcttccccgaaaaacaggagagccaccagaagtcacatgggccaggctctgatctcgagaatttcgcactgtttaaactggaggagcgtgagaaaaaagtataccccaaggccgtcgagaggtcttcaacatttgagaacaaagcctctatgcaggaggcacctcctttaggctccctgctcaaggacgccttacacaagcaggcatccgtgagggcatcagaaggggctatgagtgatgggagagttccagcagagcatcggcaaggcgggggtgatttccgacgcgcccctgcccccggcactttgcaagacgggctttgtcattctttggacagaggtatatccgggaagggcgagggtacagaaaagtctagtcaggccaaggagcttctgaggtgcgaaaagctggactctaaactggccaacatcgattatcttaggaagaagatgtccctcgaggacaaggaagataatctctgccccgtccttaagcctaagatgactgccggctctcacgagtgcttgcctggtaatccagtcagaccgacagggggccagcaggagcctccgcccgcttcagagtcccgtgccttcgtctcaagcacacacgccgcccagatgtcagctgtttcttttgtgccgttgaaggctctcaccggtagagtggattccggaacagagaagcctggcctggtggctcccgagtctccagtacgaaaatcaccatccgagtacaaactggaagggagatcagtttcctgcctgaagcccatcgaagggacactcgacatcgccctgctcagcgggccacaggcatcaaaaacggaactcccaagcccagaatcagcccaaagcccttccccctctggcgacgtgcgggcttctgtcccaccagtactcccctcaagttcaggcaagaagaatgatactacctcagcgagagagctgtccccatcatcactcaagatgaacaaaagctatctgttagagccgtggtttctgccaccctctcggggtctccagaacagtcccgccgtttcgctgccagatccagagtttaagagggaccgaaaggggcctcatcctactgctaggtctccgggaaccgttatggagtctaatcctcaacaaagggaaggatcctcacccaagcatcaggatcatacgaccgaccccaaattactgacctgtctcggacagaacctgcacagtcctgacctggctcgtccaaggtgtcctctgcccccagaggcctccccctcacgtgaaaagcctggtctgcgcgaatcatcagagcgcggcccgccaaccgccaggtctgaaagaagtgcagcgagagctgatacttgtagggagccctccatggagctgtgcttcccagagaccgccaaaacgagtgacaattccaagaacctgctgagtgtcggtagaacccaccctgacttttacacgcagactcaagcgatggaaaaggcttgggcaccaggaggtaagacaaaccacaaagacggccccggagaagctcgcccacctcccagggataacagctctctccacagcgccggcataccctgcgaaaaagaacttggcaaggtgagacggggtgtggagcccaaacccgaggccctgctagcaagacgcagcctgcagcctcccgggatcgagagtgagaagtcagagaagttgtcttctttccctagcttgcagaaggacggcgccaaggagccagagcggaaggagcagccactgcagcggcacccttcaagtattccaccaccacccctgactgcaaaagatctatcctctcctgctgccagacagcattgttcctcaccaagccacgcttctgggagagagcccggcgcgaaaccctccactgcggagccttcttccagtcctcaagatcctccaaagcccgtggcagctcacagtgagtctagctctcataagcccaggcccggtccagaccctggcccccctaagaccaaacacccagacagatctctcagttcacagaaaccgagcgtaggagccaccaaagggaaggagcctgctacccaatctcttggaggcagttccagggaaggtaaagggcatagcaagtccggccccgacgtgttcccagctacccccggtagtcagaataaggcttccgatggaattggccagggggaaggaggacccagcgtcccgctgcatactgaccgcgccccactcgatgcaaaaccccagcctacatctggcggccgcccactagaagtcctggaaaagcctgttcatctcccaaggcccggacaccccggtccatctgagcccgcagatcagaaattgagtgcagtgggcgagaaacagaccctcagtcccaaacatccgaaacctagtaccgtcaaagattgccctaccctatgtaagcagacagacaacagacagaccgacaagtcaccatctcagccagcagctaatacagaccggcgggcagagggcaagaaatgcacagaggctctgtatgcccccgcggaaggggacaaactggaagcgggtctgtcctttgttcactcggagaacagactgaaaggtgcagagagacccgccgcgggtgtggggaagggctttcccgaggccagaggaaagggacctggaccccagaaaccacccactgaagccgacaagccaaatggaatgaagcggagccccagcgctacggggcagagtagctttaggtcgactgcactgcccgagaagagtctctcttgttcctcttcttttcctgagacgagggctggagtcagggaagcatccgctgcttccagcgatacttcctccgccaaggctgccggaggcatgttagaattgcccgcaccatctaacagggaccaccggaaagcccagcctgctggggagggcaggacacatatgacaaaaagcgattcgctaccaagctttcgggtctccactctgccactggaatcacaccaccccgatcctaacacaatgggcggtgcaagccaccgcgaccgggccctcagcgtcaccgccacagtgggagaaactaagggtaaggacccagcccccgcccagcccccccctgctcgtaaacaaaatgtgggccgcgatgtgaccaagccttctcccgcacccaacacagatcggccaatcagcctgtccaacgagaaagacttcgttgtaagacaacggcgcggcaaggaatccctccgcagcagtccacataaaaaggccctgtag

SEQ ID NO: 185037 - DNA, 7305 bp, Artificial Sequence
  derived and/or modified sequence
atggatgagagcagcatcctgcggcggcggggcctgcagaaggagctgagcctgccccggcggggcagcctgattgacagccagaagtggaactgcctggtgaagcgctgcaggaccagcaacaggaagagcctgattggaaatggccagagccctgccctgccccggccccacagccccctgagcgcccatgctggcaacagcccccaggacagccccaggaacttcagccccagcgccagcgcccacttctcctttgcccggaggacagatggaagacgctggagcctggccagcctgcccagcagcggctacggcaccaacacccccagcagcacagtgagcagcagctgcagcagccaggagaagctgcaccagctgccctaccagcccaccccagatgagctgcacttcctgagcaagcacttctgcaccacagagagcatcgccacagagaaccgctgcaggaacacccccatgaggcccaggagccgcagcctgagccctggccgcagccctgcctgctgtgaccacgagatcatcatgatgaaccacgtgtacaaggagcgcttccccaaggccacagcccagatggaggagcggctgaaggagatcatcaccagctacagcccagacaacgtgctgcccctggctgatggagtgctgtccttcacccaccaccagatcatcgagctggcccgggactgcctggacaagagccaccagggcctcatcaccagccgctacttcctggagctgcagcacaagctggacaagctgctgcaggaggcccatgacagaagtgagagcggggagctggccttcatcaagcagctggtgaggaagatcctgattgtgattgcccggcctgcccggctgctggagtgcctggagtttgatcctgaggagttctactacctgctggaggccgctgagggccacgccaaggagggccagggcatcaagacagacatcccccgctacatcatcagccagctgggcctgaacaaggaccccctggaggagatggcccacctgggcaactatgattctggaacagctgagaccccagagacagatgagagcgtgagcagcagcaatgccagcctgaagctgcggaggaagccccgggagagtgactttgagaccatcaagctgatcagcaatggagcctacggggctgtgtactttgtgcgccacaaggagagccggcagagatttgccatgaagaagatcaacaagcagaacctgatcctgaggaaccagatccagcaggcctttgtggagcgggacatcctgacctttgctgagaacccctttgtggtgtccatgtactgcagctttgagaccaggaggcacctgtgcatggtgatggagtatgtggagggcggggactgtgccaccctgatgaagaacatgggccccctgcctgtggacatggccaggatgtactttgctgagaccgtgctggccctggagtacctgcacaactacggcatcgtgcaccgggacctgaagccagacaacctgctggtgacctccatgggccacatcaagctgacagactttggcctgagcaaggtgggcctgatgtccatgaccaccaacctgtatgagggccacatcgagaaggatgcccgggagttcctggacaagcaggtgtgtggcaccccagagtacatcgcccctgaggtgatcctgcggcagggctacggcaagcctgtggactggtgggccatgggcatcatcctgtatgagttcctggtgggctgtgtgcccttctttggagacaccccagaggagctgtttggccaggtgatcagtgatgagatcaactggccagagaaggatgaggcccctcctccagatgcccaggacctgatcaccctgctgctgcggcagaaccccctggagcggctgggcaccggcggggcctatgaggtgaagcagcaccgcttcttccgcagcctggactggaacagcctgctgcggcagaaggccgagttcatcccccagctggagagtgaagatgacaccagctactttgacaccaggtctgagaagtaccaccacatggagacagaggaggaggatgacaccaatgatgaggacttcaacgtggagatccggcagttcagcagctgcagccaccgcttcagcaaggtgttcagcagcattgaccgcatcacccagaacagcgctgaggagaaggaggacagcgtggacaagaccaagagcaccaccctgcccagcacagagaccctgtcctggagcagcgagtacagcgagatgcagcagctgagcaccagcaacagcagtgacacagagagcaacagacacaagctgagcagcggcctgctgcccaagctggccatcagcacagaaggagagcaggatgaagctgccagctgccctggggacccccatgaggagcccgggaagccagccctgcccccagaagaatgtgcccaggaggagcctgaggtgaccaccccagccagcaccatcagcagcagcaccctgtctgtgggcagcttcagcgagcacctggaccagatcaatggccgctcagaatgtgtggacagcacagacaacagcagcaagcccagcagcgagcccgccagccacatggcccggcagaggctggagagcacagagaagaagaagatcagcggcaaggtgaccaagagcctgagcgccagcgccctgagcctgatgatccctggggacatgtttgctgtgagccccctgggcagccccatgagcccccacagcctgagcagtgaccccagcagcagccgggacagcagccccagccgggacagcagcgctgccagcgccagcccccaccagcccatcgtcatccacagcagcggcaagaactacggcttcaccatccgggccatccgggtgtatgtgggggacagcgacatctacacagtgcaccacatcgtgtggaatgtggaggagggcagccctgcctgccaggccggcctgaaggccggggacctgatcacccacatcaatggagagcctgtgcacggcctggtgcacacagaggtgattgagctgctgctgaagagcggcaacaaggtgtccatcaccaccaccccatttgagaacaccagcatcaagacaggccctgccaggagaaattcctacaagagcaggatggtgcggcgcagcaagaagagcaagaagaaggagagcctggagcggcggcgcagcctcttcaagaagctggccaagcagcccagccccctgctgcacaccagccgctccttcagctgcctgaacagaagcctgagcagcggggagagcctgcccggcagccccacccacagcctgagccccaggagccccacccccagctaccgcagcaccccagacttccccagcggcaccaacagcagccagagcagcagccccagcagcagcgcccccaacagccctgctggcagcggccacatccggcccagcaccctgcacggcctggcccccaagctgggcggccagcgctaccgcagcggccgcaggaagtctgctggcaacatccccctgagccccctggcccggacccccagccccaccccccagcccaccagcccccagaggagccccagccccctgctgggccacagcctgggcaacagcaagatcgcccaggccttccccagcaagatgcacagcccccccaccatcgtgcgccacatcgtgcggcccaagtctgctgagccccccaggagccccctgctgaagagggtgcagagcgaggagaagctgagccccagctatggcagtgacaagaagcacctgtgcagcaggaagcacagcctggaggtgacccaggaggaggtgcagcgggagcagagccagcgggaggcccccctgcagagcctggatgaaaatgtgtgtgatgtgccccccctgagccgggcccggcctgtggagcagggctgcctgaagaggcctgtgtccaggaaggtgggccggcaggagagcgtggatgacctggaccgggacaagctgaaggccaaggtggtggtgaagaaggcagatggcttccctgagaagcaggagagccaccagaagagccacggccctggcagtgacctggagaactttgccctcttcaagctggaggagcgggagaagaaggtgtaccccaaggctgtggagaggagcagcacctttgagaacaaggcctccatgcaggaggccccacccctgggcagcctgctgaaggatgccctgcacaagcaggcctctgtgcgggccagcgagggcgccatgtctgatggccgggtgcctgctgagcaccggcagggcggcggggacttccggcgggccccagcccctggcaccctgcaggacggcctgtgccacagcctggaccggggcatctctggaaaaggagagggcacagagaagagcagccaggccaaggagctgctgcgctgtgagaagctggacagcaagctggccaacatcgactacctgaggaagaagatgagcctggaggacaaggaggacaacctgtgccctgtgctgaagcccaagatgacagctggcagccatgaatgtctgcccggcaaccctgtgcggcccactggaggccagcaggagcccccaccagccagcgagagccgggcctttgtgagcagcacccacgccgcccagatgtctgctgtgtcctttgtgcccctgaaggccctgaccggccgggtggacagcggcacagagaagccaggcctggtggcccctgagagccctgtgaggaagagccccagcgagtacaagctggagggccgctctgtgtcctgcctgaagcccatcgagggcaccctggacatcgccctgctgagcggcccccaggccagcaagacagagctgcccagccctgagagcgcccagagccccagccccagcggagatgtgcgggcctctgtgccccctgtgctgcccagcagcagcggcaagaagaatgacaccaccagcgcccgggagctgagccccagcagcctgaagatgaacaagagctacctgctggagccctggttcctgccccccagccggggcctgcagaacagccctgctgtgtccctgcctgaccctgagttcaagagggacaggaagggcccccaccccacagcccggagccctggcaccgtgatggagagcaacccccagcagcgggagggcagcagccccaagcaccaggaccacaccacagaccccaagctgctgacctgcctgggccagaacctgcacagcccagacctggcccggccccgctgccccctgcccccagaggccagccccagccgggagaagccaggcctgcgggagagcagcgagcggggccccccaacagcccggtctgagaggtctgctgcccgggctgacacctgccgggagcccagcatggagctgtgcttccctgagacagccaagaccagtgacaacagcaagaacctgctgtctgtgggccgcacccacccagacttctacacccagacccaggccatggagaaggcctgggcccctgggggcaagaccaaccacaaggatggccctggagaggcccggcccccaccccgggacaacagcagcctgcacagcgctggcatcccctgtgagaaggagctgggcaaggtgagaagaggagtggagcccaagccagaggccctgctggcccggcgcagcctgcagcccccaggcatcgagagcgagaagtctgagaagctgagcagcttccccagcctgcagaaggatggagccaaggagcctgagaggaaggagcagcccctgcagaggcaccccagcagcatccccccaccacccctgacagccaaggacctgagcagccctgctgcccggcagcactgcagcagccccagccacgccagcggccgggagcccggggccaagcccagcacagctgagcccagcagcagcccccaggacccccccaagcctgtggccgcccacagcgagagcagcagccacaagcccaggcctggccctgaccccggcccccccaagaccaagcacccagacaggagcctgagcagccagaagcccagcgtgggcgccaccaagggcaaggagcccgccacccagagcctgggcggcagcagccgggagggcaagggccacagcaagagcggcccagatgtgtttcctgccaccccaggcagccagaacaaggccagtgatggcatcggccagggcgagggcggccccagcgtgcccctgcacacagaccgggcccccctggatgccaagccccagcccaccagcggcggccggcccctggaggtgctggagaagcctgtgcacctgccccggcccggccaccctggccccagcgagcctgctgaccagaagctgtctgctgtgggggagaagcagaccctgagccccaagcaccccaagcccagcacagtgaaggactgccccaccctgtgcaagcagacagacaaccggcagacagacaagagccccagccagcctgctgccaacacagaccggcgggcagagggcaagaagtgcacagaggccctgtatgccccagctgagggggacaagctggaggccggcctgagctttgtgcacagcgagaaccggctgaagggagctgagaggcctgctgctggggtgggcaagggcttccctgaggcccggggcaaaggacctggcccccagaagccacccacagaggccgacaagcccaacggcatgaagaggagccccagcgccaccggccagagcagcttccgcagcacagccctgcctgagaagagcctgagctgcagcagcagcttccctgagaccagggctggggtgcgggaggccagcgctgccagcagtgacaccagcagcgccaaggctgctgggggcatgctggagctgcctgcccccagcaacagagaccacaggaaggcccagcctgctggggagggccgcacccacatgaccaagagtgacagcctgcccagcttccgggtgtccaccctgcccctggagagccaccacccagaccccaacaccatgggcggggccagccaccgggaccgggccctgtctgtgacagccaccgtgggggagaccaagggcaaggaccctgccccagcccagcccccaccagccaggaagcagaatgtgggcagagatgtgaccaagcccagccctgcccccaacacagaccggcccatcagcctgagcaatgagaaggactttgtggtgcggcagaggcggggcaaggagagcctgcggagcagcccccacaagaaggccctgtag

SEQ ID NO: 185038 - DNA, 7305 bp, Artificial Sequence
  derived and/or modified sequence
atggacgagagcagcatcctgcggcggcggggcctgcagaaggagctgtctctgccccggcggggaagccttatagactcccagaagtggaactgtctggtgaagagatgcaggacgagcaatcgaaagtccctcattgggaacgggcaatccccagctctccctcgcccacacagcccactttccgcccacgccggtaattctccacaggattctccacggaacttttcaccctctgccagtgcacacttttctttcgcacggcggaccgacggtcgcagatggtcactggccagtctgccttccagcggctacgggacaaatactccctcctctacagtaagcagcagctgttcctctcaggagaagctccatcagcttccataccagcccacccctgacgagcttcactttctctcaaagcatttctgtacaaccgaatctattgccacagaaaaccgctgccgcaacactcccatgaggccacggagccgctccctttcgcctggcagatctcccgcatgctgcgatcacgaaataattatgatgaatcacgtgtacaaggagcgtttccccaaagcaactgctcagatggaagagcggctgaaagaaataattacatcgtattctcctgataatgtgcttcctctggctgacggggttctgtcctttacacaccatcagattatcgaattggccagggactgcctggacaaatcacaccaggggctcatcacaagccggtacttcctagagctgcagcacaagctggataaactcctgcaggaagcgcacgataggagtgagagcggagagctcgcttttataaaacagctcgtacgtaagatcctaatcgttattgcgagaccagctcgcttgctagaatgcctggagtttgacccagaggaattctattacctcctggaggccgcggaggggcacgctaaagaaggccaaggaattaagactgatataccgagatacatcatatcacaactggggctgaataaagacccactggaagaaatggcgcacctggggaattacgactccggcaccgcagagacccctgagaccgatgaatccgtgtcaagtagtaatgccagtctgaaacttaggcgtaaacctcgcgaatccgatttcgaaacgattaaactgatctcaaacggagcatacggagctgtatatttcgtgcgccacaaagaatctagacaacggttcgctatgaagaaaattaataaacagaatttaatcctgaggaaccagatccagcaggccttcgtggaacgtgatatcctcacttttgccgagaatccttttgtagtgagcatgtactgcagttttgagacaaggaggcacctgtgtatggttatggagtacgtggaggggggagattgtgctacacttatgaaaaacatgggccctctgcctgtcgacatggctagaatgtacttcgcagagacagttttggctctggaatacctgcataattacggtatagtccatagagatcttaagccagataacttgctcgtgacctctatggggcatattaagctaactgatttcggcttgagcaaggtgggtctgatgagtatgactacaaatctttacgagggccatatcgagaaggacgctcgggagttcttggacaagcaggtttgcggaactccagagtatatcgcgcctgaggtaattctgcgccagggttatggcaaacccgtggattggtgggccatgggtatcatactgtacgagtttttagttggctgcgtacccttttttggagacacccccgaagaattgttcggacaggtgatcagcgacgaaatcaattggcccgagaaggatgaggccccgcctcctgatgcccaggacctgattacactgctcttgagacaaaaccccttggagcgattagggacgggtggcgcatacgaggtcaaacagcaccgattctttcgaagtctggactggaatagtctacttcgccagaaggcggagttcattccccaactggaatccgaagatgatacctcttattttgacactcgctctgagaagtaccaccatatggagacagaagaagaggacgataccaatgacgaggactttaatgtcgaaattagacagttcagtagttgcagccacagattttcaaaggtgttttcatccatcgacaggatcactcagaactctgctgaagaaaaggaggactcggtcgataagacaaagagcaccaccctccccagcaccgaaacactgtcatggagcagcgaatattccgaaatgcaacaacttagcactagcaacagttctgacacagagtccaatcggcataaactgtcttccggcctcttgcccaaactcgctatttcaaccgagggcgagcaagacgaagcagcctcatgtcctggggaccctcacgaagaacccgggaagccggccctgcctcccgaagagtgcgctcaggaagagcctgaggtgaccacacccgcttcaacaatctctagttccacactgtccgtcggcagtttttccgagcatctggatcagattaatggacggtccgagtgtgtcgactcgactgacaacagcagcaagcctagtagtgaaccggcctcgcacatggcacggcagcggcttgaaagcacagagaagaaaaagatctccgggaaagtgaccaaaagcctatcagctagtgccctcagtctcatgatcccgggagacatgtttgctgtcagccctttgggcagcccaatgtcccctcactcccttagctctgacccgtcctcctcaagagactcaagccctagtcgggattctagcgccgcctctgctagcccacaccagcccattgtgatacattcctcaggcaaaaattatggttttacaattcgcgccatccgcgtctacgttggtgatagtgacatatacacagtccaccatatcgtttggaacgttgaagaaggctctcccgcctgccaggccggtctgaaagcgggcgatctgattacacatattaatggcgaacccgtgcatggcttagtgcataccgaagttattgagctgttactgaaaagtgggaacaaggtttcaatcactaccactcctttcgagaacaccagcatcaagacagggcctgcccggagaaattcctataaatctcgcatggtccgtcggtccaaaaagtctaaaaagaaggagtcattagaacggaggaggtctctgttcaagaagctcgccaaacagccctctccacttctgcacacctcccggtcatttagctgcttgaaccggtccctcagtagcggcgaaagtctcccaggctcccccacacattcactctccccacggagccctactccctcgtacagaagtacacctgactttccgtcgggtactaacagcagtcaaagttccagccccagcagcagtgccccaaattcccccgcaggttctggtcacatcagaccgtccacactgcacgggctcgctcccaaactaggcggccagcgctaccggagtggccgccggaaaagtgcagggaacattcctctcagcccgttggcgaggactccctcgcctacaccccagcccacatccccccagaggtctccaagtccactgttgggccactctcttggaaattctaaaatagctcaggcctttccttccaaaatgcatagtcccccgactatcgtcagacacattgtgcggcccaaaagtgccgaaccccctaggtcaccactgctgaagagagtccaatcagaagagaagctttcacctagctacgggagcgacaaaaaacatttatgctcgagaaaacattccctcgaggtgactcaagaagaggtgcaacgggagcagagccagcgggaggcaccattacagtcattggatgaaaacgtgtgtgacgtgcccccattatctcgagccaggcctgtggagcagggctgccttaagcgccccgttagccggaaagtgggtcgccaggaaagcgtcgatgatctcgatcgagacaagctcaaagcaaaagttgtcgtcaagaaggcagatggctttcccgaaaagcaagaatcacatcagaaatctcacgggcccggcagcgacttagagaacttcgctctcttcaaactcgaggagagagagaagaaggtctaccctaaggcagtggagcggagctcaacatttgagaacaaggcttctatgcaggaagcaccccctctcgggtccctcctcaaagacgctctgcataaacaggcctccgtgagagccagcgagggtgcgatgtcagacgggcgcgtgcccgctgagcatcggcagggtggcggcgatttcaggcgcgccccagctccggggacactgcaggatgggttatgccactcacttgacagaggaatcagcggtaaaggagagggaactgaaaagagctcccaagcaaaggagctacttagatgcgaaaagttagacagtaagctggctaatattgattacctccggaaaaagatgagtctggaagataaggaggacaatctctgtcctgtgttgaagccgaaaatgacggccgggtcccacgagtgtcttcccggtaacccagtgaggccaaccggcggtcagcaggagcccccaccagcttctgagagcagagcctttgtttcatcaacacatgcagcgcaaatgagtgctgtgtccttcgtcccactgaaggctctgacaggacgggtggatagcgggacggagaagccagggttagtagcccccgagagtcccgtccgtaagagtcctagcgaatataaactcgaggggaggtccgtaagctgtttaaaacccattgagggaaccctggatatagccctgctctccgggccccaggcctctaaaaccgagttgccgtcccccgagtcagcgcagagccctagccccagcggcgacgtgcgcgcgtctgtgcctcccgtcctgccaagttcttcgggcaagaaaaatgataccacttcagcccgcgagctctcgcctagctccctgaagatgaacaagtcttacctgctggaaccatggtttctccctccatcgcgtgggctccagaactcacccgccgtctccctacccgatcccgagttcaagcgcgacagaaagggaccacacccaactgctcgatcacctggtaccgtgatggagtccaacccccagcaaagggagggcagctcacctaaacatcaggatcacactacggatcctaaactgttgacctgcctgggacaaaacctgcactcacccgaccttgctaggcccagatgtcccctccccccagaagcttctccttcccgggaaaaaccaggacttcgggaatccagtgagagaggccccccaaccgctagatccgagcggagtgctgctagagccgacacatgccgggagcctagtatggagctgtgcttccctgagaccgctaaaaccagcgacaattctaaaaatctgctcagtgtaggcaggacacaccccgatttctacacacaaacccaggcaatggagaaagcctgggccccaggcggtaagacgaatcataaagatggccctggggaggctcgtccacctccacgggacaactcatcattacattccgccggcatcccatgcgagaaggaattgggaaaagttcgcaggggtgtcgagcccaagcctgaggccttacttgcaagacgcagcctgcaaccacctggcattgagtctgagaagagcgagaaactgagttcctttccatctcttcagaaagacggagccaaagaacccgaaagaaaagaacaaccactgcaacggcacccatcttcaatccctccccctcctctcacagccaaagatctatcaagccccgcagcccgccagcactgctcatccccctcccatgcttccggccgggagcctggggctaagccatctaccgctgaaccttcgtcgagtccacaggatccacctaagccggtcgctgcgcattcagagtctagcagccataagcctcgcccaggacccgaccccggacccccaaagaccaaacatccagatcgcagcttatctagccagaaaccttccgtcggagccacaaagggcaaagaacctgcgacacaatccctgggcggatcttcaagggaaggtaaaggccactccaagagcgggcctgacgttttccccgccactcccggctcacagaacaaggcttcagacggtatcgggcagggtgaaggaggaccttcagtccctcttcataccgatcgggcgccactcgacgctaaacctcagcctacctcaggcggtcgtcccctggaagtgctcgagaaacccgttcatctacctcggcccggccaccccggcccttcagagcccgccgaccagaaactatccgccgtgggagaaaaacagactctgagccccaaacaccctaagccttcaaccgtgaaagactgtcccactctctgcaaacagaccgataatcgacagacagataagtccccttctcagcccgccgccaacaccgatcgccgtgcggaaggtaaaaaatgcacagaagccctgtacgcccccgccgagggcgataaattggaggccggcttgtcgttcgtacactccgaaaaccggttgaaaggggctgagcggccagcggctggagttgggaaaggcttcccagaggctagagggaaggggcctggcccccagaaaccgcccaccgaagccgacaaacccaacggtatgaagcggtctcccagcgccactgggcagtccagctttcggtctacagctttgccagaaaagtctctgtcatgtagtagctctttcccggaaactcgcgctggggtccgcgaggcctccgctgctagttcagacacctcatccgccaaagccgccggtggcatgttagaactccccgccccctccaatcgggaccaccgcaaagctcaaccagctggggaagggcgcacccatatgacaaaatctgacagtttaccatctttccgtgtgtccacgctgccattagaatcgcatcaccctgaccccaacactatgggcggggcatctcacagggacagggctctgtcagtgaccgcaaccgtgggcgaaactaaaggcaaggatcccgctcctgcccaacccccgcctgcacgtaagcagaacgtagggagagacgtcaccaaacccagccccgcccccaataccgaccgaccaatctctttgtctaacgagaaggatttcgttgtgagacagaggcgaggaaaggagtccctgcgaagttctcctcacaagaaagccctttag

SEQ ID NO: 185039 - DNA, 7586 bp, Artificial Sequence
  derived and/or modified sequence
gtgctgaagtagaggtagtacagcatggctagactgttgtgagaggctcagagaaagcagagggtgagatggatgagtccagcattctaagacgaagagggctccagaaggagctgagtctccccagaagaggaagtttgatagattcccagaagtggaattgcttggtcaaacgttgccgaacaagcaaccggaaaagcttaataggcaatgggcagtcaccagcattgcctcgaccacactcacctctctctgctcatgcaggaaatagccctcaagatagtccaagaaatttctcccccagtgcctcagcccatttttcatttgcacggaggactgatggacgccgctggtcgttggcttctctcccttcctctggctatgggacaaacacacccagctctacggtctcttcatcctgttcctcccaggagaagttgcatcagttaccataccaaccaacaccagacgagttacacttcttatcaaaacatttctgtaccaccgaaagcatcgccactgagaacagatgcaggaacacgccgatgcgcccccgttcccgaagtctgagccctggacgttctcccgcctgctgtgaccatgaaataattatgatgaaccatgtctacaaagaaaggttcccaaaggctacagctcagatggaagaacgtctaaaggaaattatcaccagctactctcctgacaacgttctacccttagcagatggagtgcttagtttcactcaccaccagattattgaactggctcgagattgcttggataaatcccaccagggcctcatcacctcacgatacttccttgaattacagcacaaattagataagttgctacaggaggctcatgatcgttcagaaagtggagaattggcatttattaaacaactagttcgaaagatcctaattgttattgcccgccctgctcggttattagagtgcctggaatttgatccggaagaattttactacctattggaagcagcagaaggccatgccaaagaaggacagggtattaaaaccgacattcccaggtacatcattagccaactgggactcaataaggatcccttggaagaaatggctcatttgggaaactacgatagtgggacagcagaaacaccagaaacagatgaatcagtgagtagctctaatgcctccctgaaacttcgaaggaaacctcgggaaagtgattttgaaacgattaaattgattagcaatggagcctatggggcagtctactttgttcggcataaagaatcccggcagaggtttgccatgaagaagattaataaacagaacctcatccttcgaaaccagatccagcaggcctttgtggagcgggatatcctgacttttgcagaaaacccctttgttgtcagcatgtattgctcctttgaaacaaggcgccacttgtgcatggtcatggaatatgtggaagggggagactgtgctactttaatgaaaaacatgggtcctctccctgttgatatggccagaatgtactttgctgagacggtcttggccttggaatatttacataattatggaattgtacacagggatttgaaaccagacaacttgttggttacctccatggggcacataaagctgacagattttggattatctaaggtgggactaatgagcatgactaccaacctttacgagggtcatattgagaaggatgctagagagttcctggataaacaggtctgtggcacacctgaatacattgcaccagaagtgattctgaggcagggttatggaaagccggtggactggtgggccatggggattatcctctatgaatttctggttggatgcgtgccattctttggggatactccagaggagctatttggacaagtcatcagtgatgagatcaactggcctgagaaggatgaggcacccccacctgatgcccaggatctgattaccttactcctcaggcagaatcccctggagaggctgggaacaggtggtgcatatgaagtcaaacagcatcgattcttccgttctttagactggaacagtttgctgagacagaaggcagaatttattccccaactggaatctgaggatgacacaagttattttgatactcggtctgagaagtatcatcatatggaaacggaggaagaagatgacacaaatgatgaagactttaatgtggaaataaggcagttttcttcatgttcacacaggttttcaaaagttttcagcagtatagatcgaatcactcagaattcagcagaagagaaggaagactctgtggacaaaaccaaaagcaccaccttgccatccacagaaacactgagctggagttcagaatattctgaaatgcaacagctatcaacatccaactcttcagatactgaaagcaacagacataaactcagttctggcctacttcccaaactggctatttcaacagagggagagcaagatgaagctgcctcctgccctggagacccccatgaggagccaggaaagccagcccttcctcctgaagagtgtgcccaggaggagcctgaggtcaccaccccagccagcaccatcagcagctccaccctgtcagttggcagtttttcagagcacttggatcagataaatggacgaagcgagtgtgtggacagtacagataattcctcaaagccatccagtgaacccgcttctcacatggctcggcagcgattagaaagcacagaaaaaaagaaaatctcggggaaagtcacaaagtccctctctgccagtgctctttccctcatgatcccaggagatatgtttgctgtttcccctctgggaagtccaatgtctccccattccctgtcctcggacccttcttcttcacgagattcctctcccagccgagattcctcagcagcttctgccagtccacatcagccgattgtgatccacagttcggggaagaactacggctttaccatccgagccatccgggtgtatgtgggagacagtgacatctatacagtgcaccatatcgtctggaatgtagaagaaggaagtccggcatgccaggcaggactgaaggctggagatcttatcactcacatcaatggagaaccagtgcatggacttgtccacacagaagttatagaactcctactgaagagtgggaataaggtgtcaatcactactaccccatttgaaaacacatcaatcaaaactggaccagccaggagaaacagctataagagccggatggtgaggcggagcaagaaatccaagaagaaagaaagtctcgaaaggaggagatctcttttcaaaaagctagccaagcagccttctcctttactccacaccagccgaagtttctcctgcttgaacagatccctgtcatcgggtgagagcctcccaggttcccccactcatagcttgtctccccggtctccaacaccaagctaccgctccacccctgacttcccatctggtactaattcctcccagagcagctcccctagttctagtgcccccaattccccagcagggtccgggcacatccggcccagcactctccacggtcttgcacccaaactcggcgggcagcggtaccggtccggaaggcgaaagtccgccggcaacatcccactgtccccgctggcccggacgccctctccaaccccgcaacccacctccccgcagcggtcaccatcccctcttctgggacactcactgggcaattccaagatcgcgcaagcctttcccagcaagatgcactccccgcccaccatcgtcagacacatcgtgaggcccaagagtgcggagccccccaggtccccgctgctcaagcgcgtgcagtccgaggagaagctgtcgccctcttacggcagtgacaagaagcacctgtgctcccgcaagcacagcctggaggtgacccaagaggaggtgcagcgggagcagtcccagcgggaggcgccgctgcagagcctggatgagaacgtgtgcgacgtgccgccgctcagccgcgcccggccagtggagcaaggctgcctgaaacgcccagtctcccggaaggtgggccgccaggagtctgtggacgacctggaccgcgacaagctgaaggccaaggtggtggtgaagaaagcagacggcttcccagagaaacaggaatcccaccagaaatcccatggacccgggagtgatttggaaaactttgctctgtttaagctggaagagagagagaagaaagtctatccgaaggctgtggaaaggtcaagtacttttgaaaacaaagcgtctatgcaggaggcgccaccgctgggcagcctgctgaaggatgctcttcacaagcaggccagcgtgcgcgccagcgagggtgcgatgtcggatggccgggtgcctgcggagcaccgccagggtggcggggacttcagacgggcccccgctcctggcaccctccaggatggtctctgccactccctcgacaggggcatctctgggaagggggaaggcacggagaagtcctcccaggccaaggagcttctccgatgtgaaaagttagacagcaagctggccaacatcgattacctccgaaagaaaatgtcacttgaggacaaagaggacaacctctgccctgtgctgaagcccaagatgacagctggctcccacgaatgcctgccagggaacccagtccgacccacgggtgggcagcaggagcccccgccggcttctgagagccgagcttttgtcagcagcacccatgcagctcagatgagtgccgtctcttttgttcccctcaaggccttaacaggccgggtggacagtggaacggagaagcctggcttggttgctcctgagtcccctgttaggaagagcccctccgagtataagctggaaggtaggtctgtctcatgcctgaagccgatcgagggcactctggacattgctctcctgtccggacctcaggcctccaagacagaactgccttccccagagtctgcacagagccccagcccaagtggtgacgtgagggcctctgtgccaccagttctccccagcagcagtgggaaaaagaacgataccaccagtgcaagagagctttctccttccagcttaaagatgaataaatcctacctgctggagccttggttcctgccccccagccgaggtctccagaattcaccagcagtttccctgcctgacccagagttcaagagggacaggaaaggtccccatcctactgccaggagccctggaacagtcatggaaagcaatccccaacagagagagggcagctcccctaaacaccaagaccacaccactgaccccaagcttctgacctgcctggggcagaacctccacagccctgacctggccaggccacgctgcccgctcccacctgaagcttccccctcaagggagaagccaggcctgagggaatcgtctgaaagaggccctcccacagccagaagcgagcgctctgctgcgagggctgacacatgcagagagccctccatggaactgtgctttccagaaactgcgaaaaccagtgacaactccaaaaatctcctctctgtgggaaggacccacccagatttctatacacagacccaggccatggagaaagcatgggcgccgggtgggaaaacgaaccacaaagatggcccaggtgaggcgaggcccccgcccagagacaactcctctctgcactcagctggaattccctgtgagaaggagctgggcaaggtgaggcgtggcgtggaacccaagcccgaagcgcttcttgccaggcggtctctgcagccacctggaattgagagtgagaagagtgaaaagctctccagtttcccatctttgcagaaagatggtgccaaggaacctgaaaggaaggagcagcctctacaaaggcatcccagcagcatccctccgccccctctgacggccaaagacctgtccagcccggctgccaggcagcattgcagttccccaagccacgcttctggcagagagccgggggccaagcccagcactgcagagcccagctcgagcccccaggaccctcccaagcctgttgctgcgcacagtgaaagcagcagccacaagccccggcctggccctgacccgggccctccaaagactaagcaccccgaccggtccctctcctctcagaaaccaagtgtcggggccacaaagggcaaagagcctgccactcagtccctcggtggctctagcagagaggggaagggccacagtaagagtgggccggatgtgtttcctgctaccccaggctcccagaacaaagccagcgatgggattggccagggagaaggtgggccctctgtcccactgcacactgacagggctcctctagacgccaagccacaacccaccagtggtgggcggcccctggaggtgctggagaagcctgtgcatttgccaaggccgggacacccagggcctagtgagccagcggaccagaaactgtccgctgttggtgaaaagcaaaccctgtctccaaagcaccccaaaccatccactgtgaaagattgccccaccctgtgcaaacagacagacaacagacagacagacaaaagcccgagtcagccggccgccaacaccgacagaagggcggaagggaagaaatgcactgaagcactttatgctccagcagagggcgacaagctcgaggccggcctttcctttgtgcatagcgagaaccggttgaaaggcgcggagcggccagccgcgggggtggggaagggcttccctgaggccagagggaaagggcccggtccccagaagccaccgacggaggcagacaagcccaatggcatgaaacggtccccctcagccactgggcagagttctttccgatccacggccctcccggaaaagtctctgagctgctcctccagcttccctgaaaccagggccggagttagagaggcctctgcagccagcagcgacacctcttctgccaaggccgccgggggcatgctggagcttccagcccccagcaacagggaccataggaaggctcagcctgccggggagggccgaacccacatgacaaagagtgactccctgccctccttccgggtctccaccctgcctctggagtcacaccaccccgacccaaacaccatgggcggggccagccaccgggacagggctctctcggtgactgccaccgtaggggaaaccaaagggaaggaccctgccccagcccagcctcccccagctaggaaacagaacgtgggcagagacgtgaccaagccatccccagccccaaacactgaccgccccatctctctttctaatgagaaggactttgtggtacggcagaggcgggggaaagagagtttgcgtagcagccctcacaaaaaggccttgtaacggggagggcccaggggcaggactgtggagacccgtcctgaacgggcgactgtgtcttgactacctttcaaaaccagcactgtgtgggaatgtccgccaggcagagctcggagcctcattgagacaggggagagagaaagacaaagaggggaccttcttccagatgccttcccagttgtaaccggtaaaactgttaccagatagtgtttgtac

SEQ ID NO: 185040 - DNA, 7304 bp, Artificial Sequence
  derived and/or modified sequence
atggatgaatccagcatcttgcgccgaaggggcctgcagaaggagctttccctaccaagacgcggtagcctaattgactcacagaagtggaactgtctagtcaagaggtgcagaacctctaaccggaaaagcctcatcggcaacggacagagccccgcattgcctagaccacattctcctctgagcgctcatgcaggtaattcaccccaggacagccctcggaacttcagccccagcgctagcgcacatttctcatttgctcgcaggacggacggtagacgctggagtctggccagcttgccaagctcgggctatgggacaaatacccccagctccacagtttcctcctcctgctccagccaagagaaactgcaccagctcccttatcagcctactccagacgaactgcactttctgtccaagcacttctgcaccacggagagcatcgccaccgagaacaggtgccgtaatacacccatgcgccctcgctctcggagtttgtccccgggtaggagtccagcgtgttgtgaccacgagattatcatgatgaatcacgtttataaggagagattccccaaggcaacagcccaaatggaagagcgcctcaaggagattataactagctattcccctgacaatgtcctccctctcgccgatggcgtcttgagcttcactcaccatcagataatagaacttgccagggattgtctcgacaagtcacatcagggcctgatcactagccgctacttcctcgaactgcagcacaaactggataagttacttcaggaagcccacgataggtcagagagtggcgagcttgcgtttatcaagcagctggtccggaaaatcttgatcgtgatcgcccgtcccgctcggttgctggagtgtttagaatttgatcccgaggagttctattacctgttagaggccgctgaggggcatgctaaagaggggcagggcattaagaccgacatccctcggtatattatatcccagctggggttgaataaggatcccctggaggagatggcccatctgggcaattatgacagcggcacagcagagacaccagaaacagatgaatctgtgtcttcctccaatgcctccctaaagctccgacgtaagccacgcgagagtgatttcgaaaccatcaaactgatttccaacggggcttacggggcagtgtattttgttcgccacaaagagtcaaggcagcgattcgccatgaaaaaaataaataagcaaaacctgattctgcgcaatcagatacagcaggccttcgtagaacgtgatattctcacatttgcggaaaacccattcgtggtgtctatgtattgttccttcgagacaagaaggcacctgtgcatggtcatggaatacgtcgagggaggcgattgtgccacactgatgaaaaatatgggccctctgcccgtggacatggcgaggatgtattttgcagaaaccgtgctagcactcgagtacctccacaactacggtatcgtccatcgtgaccttaagccagataacctactagttacctcgatggggcacatcaaattaaccgattttggattgtccaaagtcggtttgatgagcatgacaacaaatctctatgaaggccatatcgaaaaagacgccagagagttcctggacaaacaggtgtgtggcacccccgaatatattgcccctgaggtgatccttagacaaggatacggaaagccagtggattggtgggcaatgggaataatactctatgaatttctcgtcggatgcgtgcctttcttcggcgacacgccggaggaactcttcggtcaggtgatatcagacgagatcaactggcctgaaaaggacgaagcccctccccctgacgcacaggatttgattaccttgctgctgcgacagaacccactcgaacgcctcggcacagggggtgcctatgaggtgaagcagcacagattcttcagaagcttggattggaactctctcctgcgccagaaagctgagttcattcctcagctcgaatctgaagatgataccagttattttgatacccggtccgaaaaatatcatcacatggaaactgaagaagaggatgacactaacgatgaagatttcaacgtggaaattcgacagttcagtagctgttcacaccgattctcgaaggtgttttcaagtattgaccgtatcacacagaattccgctgaagagaaggaggattccgttgacaagactaaatccactaccctgccctccacagaaacattaagttggtcaagtgaatactcagagatgcagcagttgagcacaagtaatagctcagacacagagtcaaaccggcataagttgagttccggcttgctcccaaaactggctatatccacggagggtgaacaggacgaagccgcttcgtgtcccggtgacccacatgaggagcctggcaagcccgctctgccgcctgaggagtgtgcccaggaggagccggaagtgacaacacctgcaagtactatcagcagttctaccctgtctgtcgggagcttttctgagcacctcgatcagattaacggacgatccgaatgcgtggacagtactgacaacagtagcaaaccgtcatccgagccggcttctcatatggctagacagcggctggagagcaccgagaagaagaagataagcggcaaagtaaccaagagtctctctgcaagtgccctctctctaatgattcccggtgacatgtttgcagtttcacctcttggctcaccaatgtccccgcattccctgagttccgacccaagttcttctcgggatagtagtccttctcgggacagcagtgccgcaagtgcgtcccctcaccaaccaatcgttatccacagctccggtaaaaactacgggtttaccattcgagccatcagggtgtatgtcggggattctgatatctacacagtgcatcacattgtttggaatgttgaggagggcagccccgcttgtcaagcgggacttaaggcaggcgatctgatcacacatatcaacggagaaccagtccatggacttgtgcacactgaggtgatcgagctcctgttgaaatcaggcaataaggtatccattaccacaacacccttcgagaacacctccattaagacaggcccagcaagacggaacagctataagtcaagaatggtaagaaggagtaagaagtcaaaaaaaaaagagagtctcgagaggcggaggtccctttttaaaaaactggccaaacaaccgtcacctctgttacatacttcccgcagctttagctgcctgaacagatccctgagttccggtgagtcactgcctggatccccaacccactccttaagtccaagatctcccaccccgtcatacagatctacacccgactttccatccggtactaatagctcccagtcatcttccccttcatcgtccgcacctaattcaccagcgggttctggacatatcagaccaagcacgctgcatgggctggcccctaagctgggcggtcagcgatatcgatctgggcgtcgaaagagtgctggaaacatcccactcagtcccctggccaggacaccttcacctaccccccagcctacttcgcctcagcgatctccttccccactgctcggtcacagcctagggaacagtaagattgctcaggcgtttccttccaaaatgcatagccccccaaccatcgtacgtcacatcgttcgacccaaatctgctgaaccgcctagatcaccactcctgaaacgagtgcaaagcgaagagaagctgtcgccatcatacggaagtgacaaaaaacacctctgttccaggaagcactcacttgaagttacgcaggaagaagtgcagagggaacagagccaacgggaggccccactgcaaagcttggatgaaaacgtatgtgatgtacctccactaagtcgagccagacccgtggaacagggctgcttaaaacgcccagtttcaagaaaagtggggagacaggagtccgttgacgatctggatcgcgataagctcaaagcgaaggtcgtggtcaaaaaagcggatggatttcccgaaaagcaggagtcccatcagaagtcccatgggccagggtcagatctggagaattttgcattgttcaaactggaagaacgggagaagaaagtgtaccctaaggctgttgaaagaagcagcacctttgagaacaaagcctcaatgcaggaggctccccctttaggcagcctgcttaaagacgcactccataaacaagctagtgtgagggcctccgagggagcaatgagtgacggcagagtgcccgcagaacaccgccaaggagggggagatttcaggcgggcacctgctcctgggacactccaagatggactctgtcactcactcgatcgaggcataagcgggaaaggtgagggcacggagaagtcttcgcaggcaaaggagctcctgcgttgtgaaaagctcgatagtaagctggcgaacatcgattatctacggaagaagatgagtctcgaggacaaagaggataatttatgtcccgtgctgaaacccaaaatgacagccggaagccacgagtgtctcccaggcaacccagtcagaccgactgggggacagcaggagcctccccctgcatctgagagcagagcttttgtgagcagtacccatgctgctcaaatgagcgccgtgtccttcgtccctctgaaggctcttacaggcagggtcgacagcgggacagagaaacccggactggtggctcctgagagcccggtgaggaagagcccatcggagtacaaactggaaggcagatctgtctcatgtcttaaaccgatagaggggactctcgacatcgctcttctgtcaggacctcaggcctctaaaacagagctccctagtcccgagagtgcccagagtccatccccaagcggcgatgtcagggcctcggtcccacccgtactgccctcctctagcggcaagaagaatgacacaacctcagccagggagctgtctcccagctccttgaaaatgaataaatcctatttgctcgagccttggttccttccacccagcaggggtctccagaactcccctgcggtcagcctgcccgaccctgaattcaaacgagatcgtaaagggcctcacccgaccgccagatctccaggtaccgttatggaaagcaatccacagcagagagaagggagcagccccaagcatcaggaccacacaacagatccgaagctgctgacctgcctcggtcagaatctgcactctccagacctcgctcgacccagatgtcctctccccccagaagcctctcccagtcgggagaagcctggcctgagagagtcttctgaacgagggcctccaaccgctaggtcagagcgctccgctgccagagccgacacatgccgtgaaccctctatggagctttgtttccctgaaactgccaaaacatccgacaatagcaaaaatttactgtccgtgggacgaacacatccagatttctacactcaaacccaggcaatggaaaaagcctgggcacctggcggtaagacaaatcataaagatgggccaggcgaggctcgtcccccaccgcgagacaactcatcactgcactctgccggaattccctgtgaaaaagagctcgggaaggtgcgcaggggcgtcgagcctaaaccagaggccttgttggccaggcggagcctccagcccccagggatcgaatcggagaagtctgagaagttatcatcatttccgtccctgcagaaggatggtgctaaagagcctgagcgaaaggaacaacctctgcagagacaccccagtagcataccaccccctcctctgacagctaaggatttgtcgagcccagccgcaaggcagcactgctcttcacctagtcacgcctccggacgtgagccgggtgccaagccttccacagccgaaccgtcctccagcccccaggatccacccaagccggtagccgctcacagtgaatcctcctcccataaacccagacctgggccagatcccggaccccctaagaccaaacaccctgatcggtcgttgagttcacagaaaccgagtgtgggagcaacgaaggggaaggagccagctacacagtcccttgggggttcctccagagaagggaaaggacattctaagagcgggccagacgtgttcccggctacacccggatcgcagaacaaggccagcgacggcatcgggcagggggaaggcggtccatccgtgccactgcataccgatcgggctccgctggatgcaaaaccgcagcccactagtggcggacggcctcttgaagtgctcgaaaagcctgtccatctgcccagacctgggcacccgggtcccagtgaaccagccgaccaaaaactctccgccgtgggagaaaagcagaccctcagccctaaacatccgaagccctccaccgttaaagattgccctaccctttgcaaacagaccgacaacagacaaaccgacaaatctcccagccagcctgctgccaatactgaccgccgagccgaaggcaaaaagtgcacagaggcactgtatgcccctgccgagggagataaactggaggcaggactgagtttcgtgcactccgagaaccgattgaaaggggctgaaaggcctgccgcaggggtgggcaaagggttcccagaggcgagggggaaagggccaggacctcaaaaaccacccacagaggctgataagccaaatggcatgaaacgaagtccgtccgccactggccagtcatcattccgctctactgctttaccagagaagtcactaagctgttccagttcgtttcctgagacaagagccggtgtccgagaggcaagtgccgcatcaagcgatacaagctccgccaaggctgcaggtggtatgttagagctacccgctccaagcaatcgcgaccaccggaaggcccagcctgccggtgaagggaggacccacatgaccaagtcagacagcttacctagcttcagggtctccactctgcctctcgaaagtcaccacccagaccccaataccatgggaggtgcctcacaccgggacagagctctctcagtgactgctaccgtcggggaaaccaagggaaaggaccctgcccctgcacaacccccaccagcccgaaaacagaacgtgggaagggacgtcacaaaaccttctccagctcccaataccgaccggcctatctctctgagcaatgaaaaagatttcgtggtgaggcagagaaggggtaaagaatcgctgcgctcctcccctcataagaaggccttgta

SEQ ID NO: 185041 - DNA, 2883 bp, Artificial Sequence
  derived and/or modified sequence
atgccaaccgaaaagaaaatatcgagcgcttctgactgcattaatagcatggtggagggatcagagctgaagaaagtgaggagcaacagcagaatctatcacaggtattttctgctcgatgcggatatgcaatccctccgatgggaaccctccaagaaggacagtgagaaggctaagatagacatcaagtccattaaggaagtgcgcactggcaaaaataccgacattttccgaagcaacggtattagcgatcaaatttccgaggactgtgccttttctgtcatttatggagagaactacgaaagcctggacttggtcgccaacagcgccgatgtggctaatatttgggtgactggcctgcggtatctaatctcttacggcaaacatactctggacatgctggaatccagccaggacaacatgcgaactagctgggtttcccagatgttcagcgaaatcgatgttgacaatctgggccatattacgctgtgcaatgcagtccagtgcattcggaatctgaaccccggtctgaagacctccaaaattgaactcaaattcaaggaactgcataagtcaaaggacaaggccggcactgaggtcacaaaggaggagttcatcgaggtttttcatgagctgtgtacacggcccgaaatttatttcttattagtgcaattttcctccaataaggagtttttggacacaaaagacctgatgatgtttctggaggcagagcaaggcgtggctcatattaacgaagagatttccctggagatcatccacaaatacgaaccctccaaggaagggcaggagaaaggatggcttagtatagatggatttacaaactaccttatgtcccccgattgttatatattcgaccccgaacacaagaaggtgtgtcaggacatgaagcagcccctgtcacattattttatcaacagtagccacaatacctatctgatcgaggatcagttccgcgggcctagcgacatcacaggatacatccgtgccctgaagatgggctgccgtagtgtggaactggacgtgtgggatggccctgacaacgagcccgtgatctataccggtcacacgatgacttctcagatcgtgtttaggagcgtgatagatatcattaacaagtatgccttctttgcctccgagtaccctctcattttgtgcctcgagaatcattgctctatcaaacagcagaaggttatggtccagcacatgaaaaagctactaggcgacaagctgtacaccacttccccaaatgtcgaggaatcatatctgccatcccccgatgtgctcaagggcaagatcctcattaaggccaaaaaactgtcatctaactgttctggcgtggagggcgacgtaacagatgaagatgagggggccgagatgagccagcgaatgggcaaggaaaacatggaacagcccaacaatgttcccgtgaagaggttccaactgtgcaaggaattatcagagttggtgagcatatgtaaatctgtgcagttcaaggagtttcaggtttccttccaggtacagaagtattgggaagtctgcagctttaatgaagttctggcgtctaaatatgccaatgaaaaccccggggattttgttaactacaataagagattccttgcaagggtattcccgagccccatgagaatcgattctagcaatatgaatccacaagatttttggaagtgtggctgtcagatagtcgccatgaatttccaaactcccggcctgatgatggatctgaatatcggctggttcagacaaaatggtaattgcgggtatgtgctgaggcccgcgatcatgcgggaagaagtttccttctttagcgctaacacaaaggattccgtgccaggagtcagcccccaactgctccacattaagatcatttccgggcaaaacttccctaagccaaagggcagcggggcaaagggggacgttgtagatccctatgtttatgtggaaatccacggcatcccagcagactgcgccgagcagcggaccaagacagtacaccaaaacggagatgcacccatttttgatgaatccttcgaatttcagattaacctccccgagctcgctatggtgcgcttcgtcgtcttggacgatgattacatcggagacgagttcatcggccagtatacaatcccgttcgagtgcctacaaactggatatcgccacgtgcccctgcagtctctgacaggcgaggtgttagctcacgcctctctctttgtccatgtagcaatcaccaaccgacgaggcggcggtaagccccataaaagaggcctgtcagtacgtaaaggcaaaaagtctcgggagtacgcgagcttgcggaccttgtggatcaaaactgtggatgaggtgttcaaaaatgcacaacccccaattcgagacgccacagacttaagagagaacatgcagaatgcggtggtatccttcaaagagttgtgcggtttgagctccgttgccaatttaatgcagtgtatgttagctgtgtcaccacggttcttgggacccgataatactccactggtggtgctgaatctgtccgagcagtatcctacaatggaactacaaggaattgtgcccgaggtgctgaagaagatagtcactacttacgatatgatgattcagagcctgaaagccctgattgagaacgccgatgccgtttacgaaaaaatcgtgcactgtcaaaaggctgcaatggagttccacgaacaccttcacagcattggaaccaaggaagggctgaaagagaggaaattgcagaaagctgtggagagctttacatggaatatcactatcctcaagatcaggaagacaggccggaggtcaatatttgttccccagacacctattatggtgtag

SEQ ID NO: 185042 - DNA, 3006 bp, Artificial Sequence
  derived and/or modified sequence
atgcccacagagaagaaaatttcatccgcaagcgactgtatcaactctatggtcgagggttccgagctcaagaaggtccgctcgaatagtcggatctaccataggtatttcttgctggatgcggacatgcagtccctccgctgggagccttctaagaaggatagcgaaaaggccaagatcgacataaaaagcatcaaggaggttcgtactggcaagaatactgatatttttcggtctaacgggataagcgaccagatttcagaggactgtgcatttagcgtgatctatggggagaattatgaatccctcgatctagtcgccaattcggctgatgtcgccaacatctgggttaccggactgcggtatctcataagttacggaaaacacacacttgacatgctggaatcttcacaggacaacatgcggacaagttgggtgtcacagatgttcagcgagatcgatgtggataacctgggccacatcacattgtgcaacgcagtccaatgcattcgcaacttaaaccccgggcttaaaacatctaagatcgagttaaagttcaaggagctgcacaaatccaaagataaagctggaacagaagttacaaaagaggagtttatcgaggtctttcatgagctctgcactcgaccagagatttactttctcttagtacaattctccagtaacaaggaatttttggacaccaaggatttgatgatgtttctggaggccgaacaaggggttgcccatataaacgaggagatcagtctggaaatcattcataagtatgagccatctaaggagggacaggaaaaagggtggttgtccattgatgggtttaccaactacttaatgagtccagactgttacatcttcgacccagagcataagaaagtctgccaggacatgaagcagcctttaagtcattatttcataaatagctctcataacacctacctgatcgaagatcaattccgcggcccatcggacattaccggctacatccgggctctcaagatggggtgtcggagtgtagaactcgacgtatgggacgggccggataatgagccagtgatttacactggtcacactatgacctctcagatcgttttcaggagcgtcatagacattattaacaaatacgccttcttcgcctccgagtatccccttatcctgtgcctggaaaatcactgtagcataaagcagcagaaggtgatggtgcagcatatgaaaaaactgcttggagacaaactctataccacttcccctaatgtggaagaaagctaccttccttctcccgacgttctgaagggcaagattctaattaaagccaagaagctcagtagtaattgttctggggtggagggagatgttacagatgaggacgagggagcagaaatgagtcagcggatgggtaaggaaaacatggaacaacctaacaatgtccctgtgaagagatttcagctttgtaaagaactgagtgagctggtttccatatgtaaatccgtacagtttaaagagttccaggtctccttccaagttcagaagtactgggaggtttgctcatttaatgaagtccttgcatccaagtacgccaacgagaaccctggcgattttgtaaattacaataagcgcttcttggctcgtgtgtttccttctcctatgcggatcgattcaagtaatatgaacccacaggatttctggaagtgcggctgccagatagtggcgatgaattttcagacccctggacttatgatggacctcaatattgggtggtttcggcaaaatggtaattgtggctacgtcttaaggccagcgattatgagagaggaggtaagcttcttttctgcaaataccaaagattccgtccccggggtctctccacagctcctgcacattaaaattatcagtgggcaaaactttcctaagccaaaggggtctggggccaaaggtgacgtggtggatccctacgtctatgtggagatacacggcatccccgccgattgtgccgagcagcgaacaaagaccgtgcatcagaatggcgacgcccctattttcgacgagagttttgagttccagatcaatcttcccgaacttgctatggtgcggttcgtggtcctcgacgatgactatatcggggacgagtttataggccagtatactatccctttcgagtgtctgcagaccgggtacaggcacgtacctttacagagccttacaggcgaggtcctcgcccatgcatcactctttgtgcacgtggcgatcaccaaccgtaggggcggggggaagcctcacaagagggggttgtcagtgcgcaaagggaaaaagtcccgcgagtacgccagcctgcggacgctatggatcaagaccgttgacgaagtgttcaagaacgcccaaccacctatcagagacgcaactgacctgcgggaaaatatgcagaatgccgtggtcagttttaaagaactgtgtggactgtcatccgtggcaaacctcatgcagtgtatgctggctgtcagcccgaggttcctcggtcccgataacaccccactagttgtattgaatctgagtgaacagtaccctactatggaactccagggcatcgtgcctgaagtgctgaaaaaaatcgtgactacttatgacatgatgatccagtcgctgaaggctcttattgagaacgccgacgctgtctacgaaaagatagtccactgtcaaaaagcagctatggaattccatgagcacctgcattccattggtacaaaagaaggactgaaggaaagaaagctgcagaaggcagtagagtcatttacatggaacatcactatcctgaagggacaggctgaccttctgaagtacgccaaaaacgagacccttgaaaatcttaaacagatccactttgctgccgtctcatgcggcctgaacaaacctggaacggagaacgccgacgttcagaaaccaaggcggagcctcgaggtcattcccgagaaagcaaacgatgaaactggagagtag

SEQ ID NO: 185043 - DNA, 3006 bp, Artificial Sequence
  derived and/or modified sequence
atgcccacagaaaagaaaatttcgtccgcatccgactgcataaacagcatggtagagggctcagagcttaagaaggtgcgatccaactctaggatttatcacagatacttcttgctggacgccgacatgcagagtctgaggtgggaaccgagcaaaaaggactcagaaaaggccaagatcgatatcaagagtattaaagaggtccggaccggcaagaatacagacattttcaggagcaatgggatctctgatcaaatttctgaggattgcgccttctctgtgatctacggagagaattacgagtccttggacctggtggcaaacagcgccgacgtggctaacatctgggtcaccggcctgcggtacctcatatcttacgggaagcatacactcgacatgctggaatctagccaagacaatatgaggacaagttgggtttcacagatgttctctgaaatcgatgtcgacaacctgggccacatcaccctctgtaatgccgttcagtgtattagaaacctgaaccctggactgaagactagtaagatcgagttgaaattcaaggagctacataaaagcaaggacaaagcaggcaccgaggtcacgaaagaggagttcatcgaagtcttccatgagttgtgtacaagaccggagatttacttcctgcttgtccagttctcatccaacaaggagtttctggataccaaggacctcatgatgttcttagaagcggagcaaggcgtcgctcacattaatgaggaaatctctcttgaaataatccacaaatacgagccaagtaaggagggtcaggaaaagggatggctgagtatcgacggattcacaaactatctaatgtcccccgattgctacatttttgacccagagcacaagaaagtgtgtcaggacatgaaacagccattatcgcactattttatcaattcttctcataacacctatcttattgaggatcaattcagaggaccttcggacattaccggttacattagagccctgaagatgggatgccgaagcgtcgaactggatgtgtgggacgggccagacaatgagccagtgatttatacaggccatacaatgacgagtcagatcgtcttccgctctgtcatcgacataatcaataaatacgcattctttgcttccgaatatcctttaatactgtgcctggagaaccactgctccattaagcaacagaaagtaatggtgcagcatatgaagaagttgcttggagataagctatatacaacttcacccaacgttgaagaatcttacttaccgtcacccgatgttctgaaaggaaagatcctgattaaagccaaaaagctgagcagcaactgctcaggggtcgaaggagacgtgacagatgaggacgaaggcgctgagatgtcacagagaatgggtaaagagaacatggagcagcccaataatgtccccgtaaagagattccagctgtgcaaggagctctccgaactcgtcagcatctgcaagtctgtgcaattcaaagaattccaggtcagttttcaagtccagaagtattgggaagtgtgctcgtttaatgaggtcttggcttccaaatatgccaacgagaacccaggagactttgtaaactataataagaggttcttagccagagtctttccttctcccatgcgcatcgacagttcaaacatgaacccccaagacttctggaagtgcgggtgtcagattgttgcaatgaatttccagaccccaggacttatgatggaccttaatataggctggtttcggcagaacggaaattgcggctacgtattgcgaccggcgatcatgcgggaagaggtgtcctttttctcagccaataccaaggactctgtgcctggagtgtcgcctcaattgctccacataaaaattattagtggacagaactttcccaagccgaaaggatccggcgccaaaggcgatgttgtggatccctacgtttacgtcgaaatccacggtatccctgccgactgcgctgagcagaggacgaagaccgtccaccagaatggagatgcaccaatattcgacgagtcatttgagttccagattaatctaccggagctggctatggtccggtttgtggtcctggatgatgactacatcggggatgaattcattgggcagtacaccattccattcgagtgcctgcagacaggctaccgccacgtgcccctgcaatctctaactggagaagttctagcacacgcaagcctctttgtgcacgtcgcaatcactaacagaagggggggcggcaaacctcacaagagaggactctccgtccgaaaaggaaaaaaaagtcgagaatacgcatccttacggaccctatggatcaagacagtggatgaagtgttcaagaacgcgcaaccaccgattcgtgatgcgactgatctcagagagaatatgcagaacgcggtggtgagcttcaaggagctctgcggactctccagtgtggccaatctaatgcagtgcatgctcgcagtcagccccaggttcttggggccggataacacgccgctcgtagtgctcaatctgagcgagcagtaccccacaatggagttgcaaggaattgtgccagaggttctgaaaaaaatcgtgactacatacgatatgatgattcagagtctcaaggcattaatcgaaaatgcggatgcagtgtacgagaaaatcgtacactgtcagaaagccgccatggaatttcacgaacacctacactccatcgggaccaaggaaggtctaaaggagaggaagttacagaaagccgttgaaagtttcacttggaacatcactatactaaaagggcaggctgatttgctgaaatacgccaaaaatgaaacactcgaaaatctgaagcagatccatttcgcagctgtatcctgcgggttgaacaaacccggtactgaaaacgccgatgtgcagaaacctcggcgaagtctggaagtcatcccagaaaaggccaatgacgaaacgggcgagtag

SEQ ID NO: 185044 - DNA, 2883 bp, Artificial Sequence
  derived and/or modified sequence
atgcccacagagaagaagatcagcagcgccagtgactgcatcaacagcatggtggagggcagcgagctgaagaaggtgcgcagcaacagccgcatctaccaccgctacttcctgctggatgctgacatgcagagcctgcgctgggagcccagcaagaaggacagcgagaaggccaagattgacatcaagagcatcaaggaggtgaggacaggcaagaacacagacatcttccgcagcaatggcatcagtgaccagatcagcgaggactgtgccttcagcgtcatctacggggagaactatgagagcctggacctggtggccaacagcgcagatgtggccaacatctgggtgacaggcctgcgctacctgatctcctatggcaagcacaccctggacatgctggagagcagccaggacaacatgaggacctcctgggtgtcccagatgttttctgaaattgatgtggacaacctgggccacatcaccctgtgcaatgctgtgcagtgcatccggaacctgaaccctggcctgaagaccagcaagattgagctgaagttcaaggagctgcacaagagcaaggacaaggccggcacagaggtgaccaaggaggagttcatcgaggtgttccacgagctgtgcaccaggcctgagatctacttcctgctggtgcagttcagcagcaacaaggagttcctggacaccaaggacctgatgatgttcctggaggccgagcagggcgtggcccacatcaatgaggagatcagcctggagatcatccacaagtatgagcccagcaaggagggccaggagaagggctggctgagcattgatggcttcaccaactacctgatgagcccagactgctacatctttgatcctgagcacaagaaggtgtgccaggacatgaagcagcccctgagccactacttcatcaacagcagccacaacacctacctgattgaggaccagttccggggccccagcgacatcaccggctacatccgggccctgaagatgggctgccgctctgtggagctggatgtgtgggatggccctgacaatgagcccgtcatctacacaggccacaccatgaccagccagatcgtgttccgcagcgtcatcgacatcatcaacaagtatgccttctttgccagcgagtaccccctcatcctgtgcctggagaaccactgcagcatcaagcagcagaaggtgatggtgcagcacatgaagaagctgctgggggacaagctgtacaccaccagccccaacgtggaggagagctacctgcccagcccagatgtgctgaagggcaagatcctgatcaaggccaagaagctgagcagcaactgcagcggcgtggagggagatgtgacagatgaagatgaaggagctgagatgagccagaggatgggcaaggagaacatggagcagcccaacaacgtgcctgtgaagcgcttccagctgtgcaaggagctgtctgagctggtgtccatctgcaagtctgtgcagttcaaggagttccaggtgtccttccaggtgcagaagtactgggaggtgtgcagcttcaatgaggtgctggccagcaaatatgccaatgaaaatcctggggactttgtgaactacaacaagcgcttcctggcccgggtcttccccagccccatgagaattgacagcagcaacatgaacccccaggacttctggaagtgtggctgccagatcgtggccatgaacttccagaccccaggcctgatgatggacctgaacatcggctggttccggcagaatggaaactgtggctacgtgctgcggcctgccatcatgagggaggaggtgtccttcttcagcgccaacaccaaggacagcgtgcctggggtgagcccccagctgctgcacatcaagatcatcagcggccagaacttccccaagcccaagggcagcggggccaagggagatgtggtggacccctacgtgtatgtggagatccacggcatcccagctgactgtgccgagcagaggaccaagacagtgcaccagaatggagatgcccccatctttgatgagagctttgagttccagatcaacctgcctgagctggccatggtgcgctttgtggtgctggatgatgactacatcggagatgagttcatcggccagtacaccatcccctttgagtgcctgcagacaggctaccgccacgtgcccctgcagagcctgactggagaggtgctggcccacgccagcctgtttgtgcacgtggccatcaccaacagaagaggaggcggcaagccccacaagaggggcctgtctgtgaggaagggcaagaagagccgggagtatgccagcctgcggaccctgtggatcaagacagtggatgaggtgttcaagaatgcccagccccccatcagagatgccacagacctgcgggagaacatgcagaatgctgtggtgtccttcaaggagctgtgtggcctgagctctgtggccaacctgatgcagtgcatgctggccgtgagcccccgcttcctgggccctgacaacacccccctggtggtgctgaacctgtctgagcagtaccccaccatggagctgcagggcatcgtgcctgaggtgctgaagaagatcgtgaccacctatgacatgatgatccagagcctgaaggccctgattgaaaatgctgatgctgtgtatgagaagatcgtgcactgccagaaggccgccatggagttccacgagcacctgcacagcatcggcaccaaggagggcctgaaggagaggaagctgcagaaggctgtggagagcttcacctggaacatcaccatcctgaagatcaggaagacaggccgccgcagcatctttgtgccccagacccccatcatggtgtag

SEQ ID NO: 185045 - DNA, 3006 bp, Artificial Sequence
  derived and/or modified sequence
atgcccacagagaagaagatcagcagcgccagtgactgcatcaacagcatggtggagggcagcgagctgaagaaggtgcgcagcaacagccgcatctaccaccgctacttcctgctggatgctgacatgcagagcctgcgctgggagcccagcaagaaggacagcgagaaggccaagattgacatcaagagcatcaaggaggtgaggacaggcaagaacacagacatcttccgcagcaatggcatcagtgaccagatcagcgaggactgtgccttcagcgtcatctacggggagaactatgagagcctggacctggtggccaacagcgcagatgtggccaacatctgggtgacaggcctgcgctacctgatctcctatggcaagcacaccctggacatgctggagagcagccaggacaacatgaggacctcctgggtgtcccagatgttttctgaaattgatgtggacaacctgggccacatcaccctgtgcaatgctgtgcagtgcatccggaacctgaaccctggcctgaagaccagcaagattgagctgaagttcaaggagctgcacaagagcaaggacaaggccggcacagaggtgaccaaggaggagttcatcgaggtgttccacgagctgtgcaccaggcctgagatctacttcctgctggtgcagttcagcagcaacaaggagttcctggacaccaaggacctgatgatgttcctggaggccgagcagggcgtggcccacatcaatgaggagatcagcctggagatcatccacaagtatgagcccagcaaggagggccaggagaagggctggctgagcattgatggcttcaccaactacctgatgagcccagactgctacatctttgatcctgagcacaagaaggtgtgccaggacatgaagcagcccctgagccactacttcatcaacagcagccacaacacctacctgattgaggaccagttccggggccccagcgacatcaccggctacatccgggccctgaagatgggctgccgctctgtggagctggatgtgtgggatggccctgacaatgagcccgtcatctacacaggccacaccatgaccagccagatcgtgttccgcagcgtcatcgacatcatcaacaagtatgccttctttgccagcgagtaccccctcatcctgtgcctggagaaccactgcagcatcaagcagcagaaggtgatggtgcagcacatgaagaagctgctgggggacaagctgtacaccaccagccccaacgtggaggagagctacctgcccagcccagatgtgctgaagggcaagatcctgatcaaggccaagaagctgagcagcaactgcagcggcgtggagggagatgtgacagatgaagatgaaggagctgagatgagccagaggatgggcaaggagaacatggagcagcccaacaacgtgcctgtgaagcgcttccagctgtgcaaggagctgtctgagctggtgtccatctgcaagtctgtgcagttcaaggagttccaggtgtccttccaggtgcagaagtactgggaggtgtgcagcttcaatgaggtgctggccagcaaatatgccaatgaaaatcctggggactttgtgaactacaacaagcgcttcctggcccgggtcttccccagccccatgagaattgacagcagcaacatgaacccccaggacttctggaagtgtggctgccagatcgtggccatgaacttccagaccccaggcctgatgatggacctgaacatcggctggttccggcagaatggaaactgtggctacgtgctgcggcctgccatcatgagggaggaggtgtccttcttcagcgccaacaccaaggacagcgtgcctggggtgagcccccagctgctgcacatcaagatcatcagcggccagaacttccccaagcccaagggcagcggggccaagggagatgtggtggacccctacgtgtatgtggagatccacggcatcccagctgactgtgccgagcagaggaccaagacagtgcaccagaatggagatgcccccatctttgatgagagctttgagttccagatcaacctgcctgagctggccatggtgcgctttgtggtgctggatgatgactacatcggagatgagttcatcggccagtacaccatcccctttgagtgcctgcagacaggctaccgccacgtgcccctgcagagcctgactggagaggtgctggcccacgccagcctgtttgtgcacgtggccatcaccaacagaagaggaggcggcaagccccacaagaggggcctgtctgtgaggaagggcaagaagagccgggagtatgccagcctgcggaccctgtggatcaagacagtggatgaggtgttcaagaatgcccagccccccatcagagatgccacagacctgcgggagaacatgcagaatgctgtggtgtccttcaaggagctgtgtggcctgagctctgtggccaacctgatgcagtgcatgctggccgtgagcccccgcttcctgggccctgacaacacccccctggtggtgctgaacctgtctgagcagtaccccaccatggagctgcagggcatcgtgcctgaggtgctgaagaagatcgtgaccacctatgacatgatgatccagagcctgaaggccctgattgaaaatgctgatgctgtgtatgagaagatcgtgcactgccagaaggccgccatggagttccacgagcacctgcacagcatcggcaccaaggagggcctgaaggagaggaagctgcagaaggctgtggagagcttcacctggaacatcaccatcctgaagggccaggccgacctgctgaagtatgccaagaatgagaccctggagaacctgaagcagatccactttgctgctgtgtcctgtggcctgaacaagccaggcacagaaaatgctgatgtgcagaagcccaggaggagcctggaggtgattcctgagaaggccaatgatgaaacaggagagtag

SEQ ID NO: 185046 - DNA, 2883 bp, Artificial Sequence
  derived and/or modified sequence
atgcccaccgagaagaagatcagcagcgccagcgactgcatcaacagtatggtggaggggtccgagctgaagaaagtacgatccaacagtaggatttaccaccgctacttcttactggacgcagatatgcaaagtctcagatgggaaccgagtaaaaaggatagtgaaaaggcaaagatcgacattaaaagcatcaaggaggtgcgaacgggaaagaatacagatatcttcaggtccaacggaattagtgaccagatcagtgaagattgcgcgtttagcgtgatttacggcgaaaattatgaaagcctagacttagttgcaaactcagccgacgtggccaatatatgggtaaccggcctgcgatatctgattagctacggcaagcatactctggatatgttggagtcatcacaggataacatgcggaccagctgggtgtcccagatgttctcagagatagacgtggacaacctgggtcacatcaccttgtgcaatgctgttcagtgcatccgtaacctgaatcctggtctaaaaaccagcaaaatcgagctaaagttcaaagagttgcacaaatctaaggataaggcaggcacagaagttacaaaggaagaatttatcgaggtctttcatgaactgtgcaccagacctgagatttactttctcctcgtgcagttttcatcaaataaagagtttcttgatactaaggatctgatgatgtttctcgaggcggagcagggtgtggcccacattaacgaagagatctccctcgaaataattcacaagtacgagccgtcgaaagagggacaagagaaaggctggctgtctatcgatgggttcaccaactatctgatgtccccggattgctatatttttgatcctgagcataagaaagtgtgccaggacatgaaacagccactgtcccattactttattaacagttcccataacacatacctcatagaagaccagtttaggggaccgtcagatattactggctacattagggccctgaagatgggctgccgttctgtcgagttggacgtgtgggatggccccgacaatgaacctgtaatttataccggacatactatgacctctcagattgtttttcggagtgttatcgatatcattaacaagtatgcattttttgcctccgagtacccactgattctgtgtctcgaaaaccactgctccattaaacagcagaaagtgatggtacagcacatgaaaaaacttctaggggataaactttacaccaccagccccaatgtggaggaatcttacctgccctcccctgatgtcctgaaaggaaaaattctgataaaagccaagaagctcagctctaattgttcgggcgtggagggtgatgtgaccgatgaggatgagggggccgaaatgagtcaacgaatgggcaaggagaatatggagcaacccaacaacgtaccagtgaagaggttccagttatgcaaggagctgtctgagctcgtcagcatttgtaagtctgttcaatttaaagaattccaggtgagcttccaggtacaaaagtactgggaggtgtgctccttcaatgaggtgcttgcctcaaagtatgccaatgagaatcctggggattttgtaaattacaataagaggtttctcgcaagagtgttcccgtctcccatgaggattgactctagcaacatgaatccacaagatttttggaagtgtggatgccagatcgtggctatgaatttccaaacccctggtcttatgatggatctgaacatcgggtggtttagacagaacggtaattgtggatatgtgctgcggcctgctataatgcgagaggaggtgagtttcttttccgccaataccaaggactcagtcccgggcgtaagtccccagcttttgcacatcaagatcatcagcggccaaaacttcccaaaacctaaaggatctggagctaaaggcgatgtggtggacccttatgtgtatgtagagattcatggcattcctgcagattgtgccgagcagcgcaccaagaccgtacaccagaacggcgatgccccaattttcgacgagtctttcgaattccagatcaaccttccggagttagccatggtgcggttcgtggtcttagatgacgactacatcggcgacgagttcatcggacagtacaccatcccatttgagtgtctgcagaccggttataggcatgtccctctccaatccctcaccggagaagtcctagctcatgcttccctctttgtgcatgtggccataaccaatcgcagaggaggcggcaaaccccacaagcgcgggctcagcgttcggaaaggcaagaagtcgcgggagtacgccagtctgagaacactctggatcaagacagtggatgaagtattcaagaatgcccagccaccgattcgggacgccactgatctccgggagaatatgcagaacgctgtcgtttcgttcaaggaactctgcggactgagcagcgttgctaaccttatgcagtgtatgctggccgtgtctccacgtttcctgggccctgataatacaccactggttgtgctgaatttgagcgaacagtatcctaccatggaattgcagggcatcgtgccagaggtgttaaagaagattgtgacaacctacgacatgatgatccagagcctgaaggcgttaattgagaacgctgacgccgtctacgaaaagattgtacactgccagaaggcagccatggaatttcacgaacacttgcactccatcgggacaaaggagggtctcaaagagcgaaaattacaaaaagccgttgaaagcttcacatggaacattactatcctcaaaatcaggaagaccggaaggaggtccattttcgtgccgcagacgccaatcatggtttag

SEQ ID NO: 185047 - DNA, 3006 bp, Artificial Sequence
  derived and/or modified sequence
atgcccaccgagaagaagatcagcagcgccagcgactgcatcaactctatggtagagggatccgagttgaaaaaagttcgatccaacagccgtatctaccataggtacttcttactcgacgctgacatgcagtccctgagatgggagccttccaagaaagattctgagaaagctaaaatagacatcaagtcgataaaggaagttcggaccggcaagaacacagatattttccgatccaatggaatatctgaccagatctctgaggactgcgcgttttccgtgatctacggggaaaactatgaaagcctggacctagtagccaatagtgcagatgtggccaatatttgggtgactggacttcggtatttgataagctatggtaagcacacccttgacatgctcgaaagcagccaggacaatatgcggacatcctgggtgagccagatgttttccgagatcgacgtggataacctagggcatatcacgctctgtaatgccgttcagtgcatcagaaaccttaatccaggcctaaagacctccaagattgaactgaagttcaaagagctgcataaatccaaggacaaggcaggcactgaagtgactaaagaggaattcattgaggtctttcacgaactctgtactcgacccgaaatatatttcctcctcgtgcagtttagcagtaacaaggagttcctggacacaaaggacttgatgatgttccttgaggcagagcagggggtggcacatattaacgaggagattagccttgagataattcacaaatatgagccaagcaaggagggacaggagaaagggtggctctctatcgacgggttcaccaactacttgatgtctccagactgttacattttcgaccctgaacataagaaagtgtgccaggacatgaagcagccattatcacactacttcattaactctagccacaatacctatctgatcgaagaccagttccgtggaccaagcgacattacggggtacatccgcgctctgaagatgggctgtaggtctgtggagctggacgtgtgggatggccctgacaacgaacctgttatttacactgggcatactatgacttctcagattgtcttcagatccgtgattgacataattaataaatacgcgttttttgcaagtgaataccctttgatcttgtgtttggaaaaccactgttccattaagcaacagaaggtgatggtgcagcatatgaagaaactgctcggagacaaactgtacaccacttcgccaaacgtggaggagtcgtacctgcccagtcctgatgtgctgaagggcaagattcttatcaaggccaagaagctctctagcaattgctctggggtggaaggtgatgtgaccgacgaggacgagggagctgagatgagccagaggatggggaaggagaatatggaacagccaaacaacgtcccggtgaagcggttccagctgtgcaaagagcttagcgaattagtttcaatttgcaaaagcgtgcaattcaaagagttccaggtgagctttcaagtccaaaagtattgggaagtgtgctcattcaacgaagtactggcgtccaaatatgccaatgagaaccccggtgatttcgtcaattataacaagcggttcctagcccgggtctttccttccccaatgcggatcgactcttccaacatgaatcctcaggatttctggaaatgcggctgccagatcgtcgcaatgaacttccagacccctggattgatgatggatctgaacattggttggttcagacagaatggcaactgtggctacgtactgcgacccgccataatgcgcgaggaagtgtccttctttagtgctaatacaaaggacagtgttcccggagtttcccctcaactcttgcatattaagatcatctccggacagaatttcccaaagcctaaaggcagcggtgcgaaaggggacgtcgtcgatccatacgtttatgtcgagattcatggaattcccgccgattgtgctgaacaaaggacaaagacagtgcaccagaacggcgatgctccaatttttgatgagagcttcgaatttcagattaacctcccagagctggcaatggtccgctttgtggtgcttgacgatgattacatcggcgatgaattcatcgggcaatacactattccctttgaatgtctccagactggatatcgacacgtccccttgcaatcgttgaccggagaagttctggcccacgcatccctctttgtacacgtggcaattacaaatcgccggggcggaggcaaacctcataaaagaggcctgagtgtgaggaaaggcaagaagtctagagaatatgccagtctccgcaccctctggattaagacagtggatgaagtgtttaaaaacgcccagcctcctattagggatgcaactgatctgcgtgaaaatatgcagaatgccgtggttagctttaaggagctttgtggtctgagcagcgtcgcgaatctaatgcaatgcatgttagccgtttctcctcgctttctgggacccgacaatactccgcttgttgtcctgaatttgtctgagcagtatcccactatggaactgcagggaatcgtgcccgaggtgctgaaaaaaattgttacaacctatgatatgatgatccagagtttgaaagcactgatcgaaaatgccgatgccgtatatgagaaaattgttcattgccagaaagctgcaatggaatttcatgaacacctgcactccattggtactaaggagggactgaaagagaggaagttgcagaaggccgtggagagcttcacctggaacataaccattctgaagggccaagccgatttgctgaaatatgcaaagaacgagacgctcgaaaatctgaaacagattcacttcgccgcagtctcctgcgggctcaataagccaggaacggagaatgccgacgtacagaaacctcgccgctcgctggaagtgattcccgagaaagccaacgacgagacaggggagtag

SEQ ID NO: 185048 - DNA, 3006 bp, Artificial Sequence
  derived and/or modified sequence
atgcccaccgagaagaagatcagcagcgccagcgactgcatcaactctatggtagaagggagcgaactcaagaaggtaagaagtaattccaggatttaccatagatatttcttactggatgcagatatgcagtccctgcggtgggagccatctaagaaggatagcgaaaaagctaaaatcgatattaagagtatcaaggaggttcgcacgggtaagaataccgacatattccggtccaatggaatctccgatcagataagtgaagactgtgctttcagtgtgatatatggggagaactatgaaagtctggatctcgttgccaacagtgccgacgtggcaaatatctgggtcacgggcctgaggtacctgataagttacggtaagcacaccctcgatatgcttgagagcagtcaggacaacatgcgcacttcgtgggtctcccagatgttctccgaaattgatgtcgacaatctcggacatatcacactgtgtaatgctgtgcaatgtatacgcaacttgaaccccggattaaagacctccaaaattgagctgaagttcaaagagcttcacaagagtaaggataaggcagggaccgaggtcactaaggaggagttcatcgaggtcttccatgagctgtgcaccagaccagaaatttactttctgttagtgcagttctccagtaataaggaatttctggacacaaaagatttgatgatgtttcttgaagctgaacaaggcgtggcacatatcaacgaggaaatttcgcttgagataatccacaaatatgagcctagcaaggagggtcaggagaagggctggctgtccattgacggattcacgaactatttgatgagtcctgattgctatatcttcgatcccgagcataaaaaggtctgccaggacatgaaacagcccctgagccactactttattaactcctcacacaacacttatctgatcgaagatcaattcaggggtccctctgacattactggttatatccgcgcactgaaaatggggtgcagaagcgtcgaactggatgtttgggatggccccgataatgaaccagtcatttataccggacatacaatgacctcccagattgtatttcgtagtgttatcgacataatcaataagtacgcttttttcgcaagtgagtatccactcattctctgtctggaaaaccattgttccattaaacaacagaaggtcatggtgcaacatatgaaaaagctcctgggtgacaaactgtatacaacctcccctaacgtcgaggagtcatacctgccctctcctgacgtgctaaaaggcaaaatcttgataaaggcaaaaaagctgtcttctaactgttcgggcgtggaaggcgacgtcactgatgaggacgagggcgcagagatgtcccaaaggatgggcaaggaaaacatggagcaacctaacaacgttccagtcaaaaggttccagctctgcaaagagctgtccgagcttgtgtcaatttgcaagtcagttcagttcaaggaattccaggtgtcatttcaagtccagaaatattgggaagtgtgcagcttcaacgaagtcctagcatccaagtacgctaatgaaaaccccggggatttcgtgaattacaacaaacggttcctagcccgtgtgtttccctcccccatgcgtatagattcctctaacatgaaccctcaagacttctggaaatgcggttgccagatcgtggccatgaacttccagacacctgggctgatgatggacttgaatattggttggttccgtcaaaacggcaattgcggctatgttctgagacccgccatcatgagagaggaggtgtctttcttttctgccaacactaaggactctgttcccggcgtgagcccacagctactgcacatcaaaatcattagtggtcaaaactttcctaagcctaaaggatctggtgctaagggtgatgtggtagacccatacgtgtatgtggaaatccatggaatcccggcagattgcgcagagcagaggacgaaaacagtgcaccagaatggcgatgcccctatttttgacgagtctttcgaattccagataaaccttcctgaactggcaatggttaggttcgtggtgttagacgacgactacattggggatgaattcattggtcagtataccatccccttcgagtgcctgcagacaggatacagacacgttcctctgcagagtcttaccggtgaagtgttggcacatgcctccctgttcgtgcacgtggccatcacaaatcgccgaggcgggggaaagccccacaaacgaggattgtccgtccggaaaggcaaaaagtccagggagtacgcttctcttcgcactctttggatcaagaccgtggacgaagtgttcaagaacgcacagccccctatccgtgatgccaccgacctgagagagaacatgcagaatgcagtcgtgagcttcaaggagctgtgcggtctgagtagtgtggctaatctcatgcagtgtatgctggccgtgtctccacgctttttgggaccagataatactcctttggtcgtcttgaacctttctgagcaatatcccaccatggaactccagggtattgtccctgaggtgctgaagaagatagttacaacttacgacatgatgatccagagcctgaaggctctcatcgagaacgcagacgccgtttacgagaagatcgttcactgccagaaagccgcaatggaatttcacgagcacctgcattctatcggcacaaaagaagggctaaaagagcgcaagcttcaaaaggccgtagagagctttacgtggaatatcacgattctgaaggggcaagccgacctcctgaagtatgctaaaaacgagacactggagaacctgaagcagatccactttgctgcagtgtcctgtgggttgaataagcctggcactgaaaatgcagacgtccagaagcctcggcggtcactcgaggtgattcccgagaaagccaatgatgagacaggggagtag

SEQ ID NO: 185049 - DNA, 2883 bp, Artificial Sequence
  derived and/or modified sequence
atgccaactgagaaaaagatctcttcagcctctgattgcatcaacagcatggtggagggatccgagcttaagaaggttaggagcaacagccgcatctaccatagatacttcctgctggatgccgacatgcaatcgctccggtgggagccctccaaaaaagacagcgagaaggctaaaattgatataaagtcaattaaggaagtacgcactgggaagaacactgatatctttaggagcaatggcatctcagatcaaatatccgaggactgtgcttttagcgtcatctatggggagaactatgagagccttgatttagttgcgaacagcgcagatgtggctaacatttgggtgactgggctgaggtaccttatttcatatggtaagcataccttagacatgctggaatcgagccaggataacatgagaacctcttgggtctcccaaatgtttagcgaaatcgatgttgataacctggggcacatcaccttatgcaacgccgtacagtgtatccgcaacctgaacccagggctgaagactagtaagatcgaattgaagtttaaggaattgcacaaatccaaagacaaggccggaacagaggtgacaaaggaagaatttatcgaggtgttccacgagctctgcacacgcccagaaatatattttcttctagtgcaattttcctctaacaaggaatttctcgatacaaaagatcttatgatgttcttagaggccgagcaaggcgtcgcccacatcaacgaggaaataagtctggagatcatccataagtacgagcccagcaaggaaggtcaggagaaaggatggctttcaatcgatggtttcaccaattatctgatgagcccagattgctatatattcgatcccgaacataaaaaagtgtgccaggacatgaagcagcccctttctcattattttatcaactccagtcataatacctacctcatagaggatcagtttaggggaccatctgatattaccggatacatccgggctctgaaaatggggtgccgctctgtggagttggacgtttgggacgggccagataacgaaccagtgatatacacgggacacacaatgacatcgcagattgtgttcagatcagtgattgacattatcaacaaatatgctttcttcgcaagtgagtatcccctgatactgtgtttagaaaatcattgttctattaagcaacagaaagtcatggttcagcacatgaaaaaacttctgggagataaactgtatactactagccctaatgttgaggagagttacttgccctctcccgacgtgttaaaggggaaaatcctgatcaaagccaaaaaactcagttctaactgttctggtgtcgagggtgacgttaccgacgaagacgaaggggctgagatgtctcagcggatgggcaaagagaatatggagcaacccaataatgtgcccgtgaagcgcttccagctgtgcaaggaactctcagagctggtctccatttgtaagagtgtacaatttaaagagttccaggtgtcttttcaagtccagaaatactgggaggtttgttcctttaatgaagtgctggccagcaaatacgccaacgaaaaccccggtgactttgtgaactataataagcgcttcctggcccgtgtgtttccgtcacctatgagaatcgatagcagcaacatgaacccccaggacttttggaagtgcggatgtcagatcgttgcaatgaacttccagacccctgggctgatgatggatctgaacattgggtggtttcgacagaacggcaattgcggctacgtcctgcggccagccatcatgagggaggaggtgtctttcttttccgccaataccaaggatagcgtgccaggggtgtctccccagctgcttcacataaaaataatatctggccagaattttcccaagcccaaggggagcggcgctaagggcgacgtggtggatccctatgtgtacgttgaaatccacgggatccccgctgactgtgcagagcagcgtaccaagactgtgcatcagaacggcgatgctccaattttcgatgagtctttcgaattccagatcaatctgccagagcttgctatggtgcgattcgtggttctggacgacgactacattggtgacgagtttataggccagtacacgattcctttcgaatgtctccagactggctacaggcacgttcctctgcaatctcttacaggcgaagtgctggctcacgctagcctgttcgtacacgtggctattactaaccggcgtggaggtggaaaaccccataagcgaggtttaagcgtccggaaaggaaaaaaatcacgggaatacgctagtctgaggacactgtggatcaagaccgtggacgaagttttcaagaatgctcagccccctatacgcgatgcaacagatttgcgagagaacatgcagaacgctgtcgttagcttcaaggagctgtgcggtttgtcaagtgtggcaaatctgatgcaatgtatgctcgcagtctcaccaagatttctgggacccgataataccccgttagtggttctcaaccttagcgaacaatacccaactatggaacttcaaggcatcgtgccagaggtgctaaaaaaaatagtaactacgtatgatatgatgattcagagcctgaaagccttgattgagaatgccgacgccgtgtacgagaagatcgtgcactgtcagaaagccgcaatggaattccacgaacacctgcactcaatcgggacaaaggagggcttgaaggagcgaaaactgcagaaggcagttgaaagcttcacttggaacattacaattctgaagatcaggaaaaccggacgacgaagcatttttgtgccacagaccccaatcatggtgtag

SEQ ID NO: 185050 - DNA, 3006 bp, Artificial Sequence
  derived and/or modified sequence
atgccaaccgaaaagaagatctctagcgcctctgattgcatcaatagcatggtcgaaggcagcgaactcaagaaggtgcggagcaacagtcggatctaccatcgctacttcctcctcgacgctgacatgcagtcactacgttgggagcccagtaaaaaggactcagagaaggcgaagatcgatattaagagtatcaaagaggtgaggacgggcaagaacaccgatatatttcgatccaacgggatctccgaccagatcagtgaagattgcgccttttcagttatttatggggaaaactacgaaagcctggatctcgtggccaacagcgctgacgtggccaacatctgggtgaccggacttcgatacctgatttcgtacggcaaacacacactggacatgctggaatcgagtcaggataatatgcgcacctcttgggtcagtcagatgttcagcgagatcgatgtggacaaccttggccatatcaccctgtgcaacgctgtacagtgcattcgcaatttaaatcctggcctcaaaacatcgaaaattgagctgaagttcaaggagctgcataagagcaaggacaaggccggtaccgaggtgactaaggaggagttcatagaggtttttcatgagttatgcaccaggccggagatttactttctattggtgcagttttccagcaacaaggagtttctcgacactaaggacctcatgatgtttctcgaagccgagcagggggtagcccatataaatgaggaaatctctctggaaattatccacaagtatgagccctccaaggaggggcaggaaaaagggtggcttagcatcgacgggtttactaattacttaatgagccccgattgctatattttcgatcctgagcataaaaaagtgtgccaggatatgaagcagcccctctcacactacttcatcaactcttctcataacacatacctgattgaagatcagtttcggggaccgagcgacattaccggctacattagagccctcaaaatgggctgccggtcagtcgagcttgacgtatgggatggcccagataacgaaccagtgatctatactggccacaccatgacaagtcaaattgtgttcaggagtgtgattgacataattaacaaatacgcattctttgcctcggagtaccctctcatcttgtgcctcgaaaaccactgtagcatcaagcagcagaaggttatggtgcagcacatgaagaaacttctcggcgataagctgtatactacgagcccaaatgtcgaggaatcctatcttccttcccctgacgtgcttaagggaaagatcctcatcaaagctaagaagctgtcatctaactgcagcggtgtggagggtgacgtgacagatgaggatgaaggggctgaaatgtcccagagaatggggaaggagaatatggaacaaccaaataatgtcccagtgaaacgatttcagctgtgcaaggaactgtctgagttagtatccatttgtaagtccgtccagtttaaagaattccaggtttcattccaggtccagaagtactgggaagtttgctcctttaatgaagtcctggctagcaaatatgcaaatgaaaatcctggagattttgtgaactacaacaagagatttctggcaagggtattcccctctcctatgagaattgattcctcaaatatgaacccccaggatttctggaagtgtggctgtcagattgtggcaatgaactttcagactcctggcttaatgatggacctcaatataggctggttccgtcagaatgggaattgtggctatgtactgcgcccagctatcatgcgagaggaagtctcttttttctccgccaatactaaagatagtgtgcccggagtttctcctcaactactgcacataaagatcattagcggccagaatttccccaaaccgaaaggatcaggcgcaaagggagacgtcgtagatccatacgtctatgtggaaatacatggaattcctgcagattgcgcagaacagcgaaccaagaccgtgcatcaaaacggagatgccccaatcttcgacgaaagtttcgagtttcaaatcaatttgccagaactcgcaatggttcgcttcgtagtgctggacgacgattatatcggtgacgagttcattgggcagtacaccattcctttcgaatgcctgcaaactggataccgacacgtgccactccagtccctcactggtgaagtgctggctcacgcctctctttttgtccatgttgcaatcactaacagacggggaggcggaaagccccataagcgcggattgtccgtgcggaaaggcaagaaatctagggagtatgccagcctgcgcacgttatggattaagaccgttgatgaagtcttcaagaatgcccagccgccaattagagatgccactgacctgagggagaacatgcagaatgctgtggtgtctttcaaggagctgtgtggcttaagctctgtcgctaacctgatgcagtgcatgctggccgtgtctcccaggttcctaggaccagataacacacctctcgtggtactcaatctgtcagagcaataccctacaatggagctgcaaggtattgttcctgaagtgttaaaaaaaattgtgactacctacgatatgatgattcagagccttaaagcccttatcgagaatgcagatgccgtctacgaaaaaatagtgcactgtcagaaagccgcaatggaattccatgagcaccttcatagtataggtactaaggaaggcctgaaagagcgcaagttgcagaaggccgttgagtcctttacatggaacataaccattctgaagggccaagcagatctcctaaaatatgcaaaaaacgagaccctagaaaacctcaagcagatccactttgctgccgtctcctgcggactgaataaacccggtactgagaacgcggacgtgcagaaaccccgtcgcagtctggaagttatcccagagaaggccaatgacgaaactggggaatag

SEQ ID NO: 185051 - DNA, 3006 bp, Artificial Sequence
  derived and/or modified sequence
atgccaacagagaaaaagatcagctctgccagtgactgtatcaattctatggtcgaagggtcagaactcaaaaaggtgcggtctaattcacgaatatatcacagatatttcctgctcgacgctgatatgcagagtctacggtgggaaccatctaaaaaagacagtgagaaggcaaagatcgatatcaagtcgattaaggaggtgcgaaccggaaaaaacactgatatcttcaggtccaatgggatcagcgaccagatcagtgaagattgcgcttttagcgtgatctatggtgagaactacgagagcttagacttggtcgcaaacagtgctgacgtagccaacatatgggtcactggccttaggtacctcataagctacggaaaacacactctcgacatgttggaatcctcgcaggataacatgcggaccagctgggtaagccagatgttttccgagatagatgtagataatctgggccatataacactgtgcaacgccgtgcagtgtataagaaatttaaacccagggctgaaaacatccaagatcgaacttaaatttaaggaactgcacaaatcaaaagacaaggccggaacagaagtgacaaaggaggaattcattgaagtttttcacgaactctgcaccaggcctgaaatctactttctgctggtacagttctcgtctaacaaagagtttcttgatactaaggacctgatgatgtttctggaggccgagcaaggggtagctcatattaacgaggaaatcagcctcgagattattcacaaatacgagccttcaaaagaaggccaggagaaaggctggctcagcattgacggctttactaattatttaatgagcccagactgttacatttttgaccctgagcacaagaaggtctgccaggacatgaagcaacccctgagtcactattttatcaatagcagtcataatacatacctgatcgaggatcaatttagggggccttctgacattacgggatatatacgcgcattaaaaatgggctgccgcagcgtcgagctggatgtctgggacggacctgataacgagcccgtgatctacaccggtcacacaatgactagccagattgtcttcaggagtgtaatcgatataatcaacaaatacgccttttttgcgtccgaataccctctgatcctgtgccttgagaatcactgctctatcaagcaacaaaaggtgatggtgcagcatatgaaaaagctccttggcgataagctgtatacaaccagccctaacgttgaagagtcctacttgccttcccccgacgttctgaagggcaaaatcctgataaaggccaaaaagctcagcagtaattgcagcggagtggaaggagatgtcactgatgaggatgagggtgctgaaatgtctcagagaatggggaaagagaacatggagcaacccaataatgtgccagtgaagaggtttcaactgtgcaaagagctatcagagcttgtgagcatctgtaagagtgttcagttcaaagaatttcaggtttccttccaggtccagaagtattgggaagtctgctccttcaatgaagtgctggccagcaaatacgcaaacgagaatcctggcgactttgtaaactacaacaagcggtttctggccagggtattcccgagccctatgagaatcgacagctcaaatatgaatccacaggacttctggaagtgtggatgtcagatcgtcgcaatgaatttccaaactcctggacttatgatggacctgaacatcggttggtttagacagaacggtaattgcgggtatgttcttcggccagccatcatgagggaggaggtttcattcttttccgcgaataccaaagatagcgtgccaggagtcagtccacagctcctccacataaagatcatcagcggccaaaattttccaaaacccaaaggcagtggggcaaagggagacgtcgttgacccttacgtctatgtcgaaattcacggtattcccgcagactgcgcagagcaaagaacaaagacggtgcatcaaaatggagacgcccctatctttgacgaatcctttgaattccaaattaatctcccggaattggctatggtgcggtttgtggtgctggacgatgattatataggtgacgaattcataggacagtacactatccccttcgagtgtctgcagacaggctatagacatgtccctctgcagtcactcactggcgaggtgctagcccacgcatctctcttcgtgcacgtggctattaccaacagaagaggaggtggcaaaccacacaaacgcggtctgagtgtccgtaaaggaaaaaagtcccgggagtacgcttccctgcggactctgtggataaaaacagtcgatgaggtgttcaagaatgcccagccccctattcgggatgcaaccgacctcagagaaaatatgcagaatgccgtggtgtcatttaaagaactgtgcggcctgagctctgtagccaaccttatgcaatgcatgctggccgtttctcctcgattcctgggtcctgataacaccccacttgttgttctaaacctctccgagcagtaccctacaatggagttgcagggtattgttcccgaggtgctgaaaaagatagttaccacatacgacatgatgatccaaagcctcaaagctctaattgaaaacgctgatgctgtgtatgagaagatcgtgcattgccagaaagcagctatggaatttcatgaacacctgcattctatcggcactaaggagggccttaaggagcggaagctacagaaggcagtcgagtcattcacctggaacattactattttgaagggccaggctgacctgctgaagtacgctaagaacgagactctcgagaaccttaagcaaatccattttgcagctgtgtcttgcggcctcaacaagcccggaaccgagaacgccgatgtccaaaaacccaggcggtcattagaggtgattcctgagaaggcaaatgacgagaccggtgaatag

SEQ ID NO: 185052 - DNA, 2883 bp, Artificial Sequence
  derived and/or modified sequence
atgcccaccgagaagaagatcagcagcgccagcgactgcatcaacagcatggtggagggcagcgagctgaagaaggtgagaagcaacagcagaatctaccacagatacttcctgctggacgccgacatgcagagcctgagatgggagcccagcaagaaggacagcgagaaggccaagatcgacatcaagagcatcaaggaggtgagaaccggcaagaacaccgacatcttcagaagcaacggcatcagcgaccagatcagcgaggactgcgccttcagcgtgatctacggcgagaactacgagagcctggacctggtggccaacagcgccgacgtggccaacatctgggtgaccggcctgagatacctgatcagctacggcaagcacaccctggacatgctggagagcagccaggacaacatgagaaccagctgggtgagccagatgttcagcgagatcgacgtggacaacctgggccacatcaccctgtgcaacgccgtgcagtgcatcagaaacctgaaccccggcctgaagaccagcaagatcgagctgaagttcaaggagctgcacaagagcaaggacaaggccggcaccgaggtgaccaaggaggagttcatcgaggtgttccacgagctgtgcaccagacccgagatctacttcctgctggtgcagttcagcagcaacaaggagttcctggacaccaaggacctgatgatgttcctggaggccgagcagggcgtggcccacatcaacgaggagatcagcctggagatcatccacaagtacgagcccagcaaggagggccaggagaagggctggctgagcatcgacggcttcaccaactacctgatgagccccgactgctacatcttcgaccccgagcacaagaaggtgtgccaggacatgaagcagcccctgagccactacttcatcaacagcagccacaacacctacctgatcgaggaccagttcagaggccccagcgacatcaccggctacatcagagccctgaagatgggctgcagaagcgtggagctggacgtgtgggacggccccgacaacgagcccgtgatctacaccggccacaccatgaccagccagatcgtgttcagaagcgtgatcgacatcatcaacaagtacgccttcttcgccagcgagtaccccctgatcctgtgcctggagaaccactgcagcatcaagcagcagaaggtgatggtgcagcacatgaagaagctgctgggcgacaagctgtacaccaccagccccaacgtggaggagagctacctgcccagccccgacgtgctgaagggcaagatcctgatcaaggccaagaagctgagcagcaactgcagcggcgtggagggcgacgtgaccgacgaggacgagggcgccgagatgagccagagaatgggcaaggagaacatggagcagcccaacaacgtgcccgtgaagagattccagctgtgcaaggagctgagcgagctggtgagcatctgcaagagcgtgcagttcaaggagttccaggtgagcttccaggtgcagaagtactgggaggtgtgcagcttcaacgaggtgctggccagcaagtacgccaacgagaaccccggcgacttcgtgaactacaacaagagattcctggccagagtgttccccagccccatgagaatcgacagcagcaacatgaacccccaggacttctggaagtgcggctgccagatcgtggccatgaacttccagacccccggcctgatgatggacctgaacatcggctggttcagacagaacggcaactgcggctacgtgctgagacccgccatcatgagagaggaggtgagcttcttcagcgccaacaccaaggacagcgtgcccggcgtgagcccccagctgctgcacatcaagatcatcagcggccagaacttccccaagcccaagggcagcggcgccaagggcgacgtggtggacccctacgtgtacgtggagatccacggcatccccgccgactgcgccgagcagagaaccaagaccgtgcaccagaacggcgacgcccccatcttcgacgagagcttcgagttccagatcaacctgcccgagctggccatggtgagattcgtggtgctggacgacgactacatcggcgacgagttcatcggccagtacaccatccccttcgagtgcctgcagaccggctacagacacgtgcccctgcagagcctgaccggcgaggtgctggcccacgccagcctgttcgtgcacgtggccatcaccaacagaagaggcggcggcaagccccacaagagaggcctgagcgtgagaaagggcaagaagagcagagagtacgccagcctgagaaccctgtggatcaagaccgtggacgaggtgttcaagaacgcccagccccccatcagagacgccaccgacctgagagagaacatgcagaacgccgtggtgagcttcaaggagctgtgcggcctgagcagcgtggccaacctgatgcagtgcatgctggccgtgagccccagattcctgggccccgacaacacccccctggtggtgctgaacctgagcgagcagtaccccaccatggagctgcagggcatcgtgcccgaggtgctgaagaagatcgtgaccacctacgacatgatgatccagagcctgaaggccctgatcgagaacgccgacgccgtgtacgagaagatcgtgcactgccagaaggccgccatggagttccacgagcacctgcacagcatcggcaccaaggagggcctgaaggagagaaagctgcagaaggccgtggagagcttcacctggaacatcaccatcctgaagatcagaaagaccggcagaagaagcatcttcgtgccccagacccccatcatggtgtag

SEQ ID NO: 185053 - DNA, 3006 bp, Artificial Sequence
  derived and/or modified sequence
atgcccaccgagaagaagatcagcagcgccagcgactgcatcaacagcatggtggagggcagcgagctgaagaaggtgagaagcaacagcagaatctaccacagatacttcctgctggacgccgacatgcagagcctgagatgggagcccagcaagaaggacagcgagaaggccaagatcgacatcaagagcatcaaggaggtgagaaccggcaagaacaccgacatcttcagaagcaacggcatcagcgaccagatcagcgaggactgcgccttcagcgtgatctacggcgagaactacgagagcctggacctggtggccaacagcgccgacgtggccaacatctgggtgaccggcctgagatacctgatcagctacggcaagcacaccctggacatgctggagagcagccaggacaacatgagaaccagctgggtgagccagatgttcagcgagatcgacgtggacaacctgggccacatcaccctgtgcaacgccgtgcagtgcatcagaaacctgaaccccggcctgaagaccagcaagatcgagctgaagttcaaggagctgcacaagagcaaggacaaggccggcaccgaggtgaccaaggaggagttcatcgaggtgttccacgagctgtgcaccagacccgagatctacttcctgctggtgcagttcagcagcaacaaggagttcctggacaccaaggacctgatgatgttcctggaggccgagcagggcgtggcccacatcaacgaggagatcagcctggagatcatccacaagtacgagcccagcaaggagggccaggagaagggctggctgagcatcgacggcttcaccaactacctgatgagccccgactgctacatcttcgaccccgagcacaagaaggtgtgccaggacatgaagcagcccctgagccactacttcatcaacagcagccacaacacctacctgatcgaggaccagttcagaggccccagcgacatcaccggctacatcagagccctgaagatgggctgcagaagcgtggagctggacgtgtgggacggccccgacaacgagcccgtgatctacaccggccacaccatgaccagccagatcgtgttcagaagcgtgatcgacatcatcaacaagtacgccttcttcgccagcgagtaccccctgatcctgtgcctggagaaccactgcagcatcaagcagcagaaggtgatggtgcagcacatgaagaagctgctgggcgacaagctgtacaccaccagccccaacgtggaggagagctacctgcccagccccgacgtgctgaagggcaagatcctgatcaaggccaagaagctgagcagcaactgcagcggcgtggagggcgacgtgaccgacgaggacgagggcgccgagatgagccagagaatgggcaaggagaacatggagcagcccaacaacgtgcccgtgaagagattccagctgtgcaaggagctgagcgagctggtgagcatctgcaagagcgtgcagttcaaggagttccaggtgagcttccaggtgcagaagtactgggaggtgtgcagcttcaacgaggtgctggccagcaagtacgccaacgagaaccccggcgacttcgtgaactacaacaagagattcctggccagagtgttccccagccccatgagaatcgacagcagcaacatgaacccccaggacttctggaagtgcggctgccagatcgtggccatgaacttccagacccccggcctgatgatggacctgaacatcggctggttcagacagaacggcaactgcggctacgtgctgagacccgccatcatgagagaggaggtgagcttcttcagcgccaacaccaaggacagcgtgcccggcgtgagcccccagctgctgcacatcaagatcatcagcggccagaacttccccaagcccaagggcagcggcgccaagggcgacgtggtggacccctacgtgtacgtggagatccacggcatccccgccgactgcgccgagcagagaaccaagaccgtgcaccagaacggcgacgcccccatcttcgacgagagcttcgagttccagatcaacctgcccgagctggccatggtgagattcgtggtgctggacgacgactacatcggcgacgagttcatcggccagtacaccatccccttcgagtgcctgcagaccggctacagacacgtgcccctgcagagcctgaccggcgaggtgctggcccacgccagcctgttcgtgcacgtggccatcaccaacagaagaggcggcggcaagccccacaagagaggcctgagcgtgagaaagggcaagaagagcagagagtacgccagcctgagaaccctgtggatcaagaccgtggacgaggtgttcaagaacgcccagccccccatcagagacgccaccgacctgagagagaacatgcagaacgccgtggtgagcttcaaggagctgtgcggcctgagcagcgtggccaacctgatgcagtgcatgctggccgtgagccccagattcctgggccccgacaacacccccctggtggtgctgaacctgagcgagcagtaccccaccatggagctgcagggcatcgtgcccgaggtgctgaagaagatcgtgaccacctacgacatgatgatccagagcctgaaggccctgatcgagaacgccgacgccgtgtacgagaagatcgtgcactgccagaaggccgccatggagttccacgagcacctgcacagcatcggcaccaaggagggcctgaaggagagaaagctgcagaaggccgtggagagcttcacctggaacatcaccatcctgaagggccaggccgacctgctgaagtacgccaagaacgagaccctggagaacctgaagcagatccacttcgccgccgtgagctgcggcctgaacaagcccggcaccgagaacgccgacgtgcagaagcccagaagaagcctggaggtgatccccgagaaggccaacgacgagaccggcgagtag

SEQ ID NO: 185054 - protein, 516 aa, Artificial Sequence
  derived and/or modified sequence
MTLLITGDSIVSAEAVWDHVTMANRELAFKAGDVIKVLDASNKDWWWGQIDDEEGWFPASFVRLWVNQEDEVEEGPSDVQNGHLDPNSDCLCLGRPLQNRDQMRANVINEIMSTERHYIKHLKDICEGYLKQCRKRRDMFSDEQLKVIFGNIEDIYRFQMGFVRDLEKQYNNDDPHLSEIGPCFLEHQDGFWIYSEYCNNHLDACMELSKLMKDSRYQHFFEACRLLQQMIDIAIDGFLLTPVQKICKYPLQLAELLKYTAQDHSDYRYVAAALAVMRNVTQQINERKRRLENIDKIAQWQASVLDWEGEDILDRSSELIYTGEMAWIYQPYGRNQQRVFFLFDHQMVLCKKDLIRRDILYYKGRIDMDKYEVVDIEDGRDDDFNVSMKNAFKLHNKETEEIHLFFAKKLEEKIRWLRAFREERKMVQEDEKIGFEISENQKRQAAMTVRKVPKQKGVNSARSVPPSYPPPQDPLNHGQYLVPDGIAQSQVFEFTEPKRSQSPFWQNFSRLTPFKK

SEQ ID NO: 185055 - protein, 478 aa, Artificial Sequence
  derived and/or modified sequence
MLITGDSIVSAEAVWDHVTMANRELAFKAGDVIKVLDASNKDWWWGQIDDEEGWFPASFVRLWVNQEDEVEEGPSDVQNGHLDPNSDCLCLGRPLQNRDQMRANVINEIMSTERHYIKHLKDICEGYLKQCRKRRDMFSDEQLKVIFGNIEDIYRFQMGFVRDLEKQYNNDDPHLSEIGPCFLEHQDGFWIYSEYCNNHLDACMELSKLMKDSRYQHFFEACRLLQQMIDIAIDGFLLTPVQKICKYPLQLAELLKYTAQDHSDYRYVAAALAVMRNVTQQINERKRRLENIDKIAQWQASVLDWEGEDILDRSSELIYTGEMAWIYQPYGRNQQRVFFLFDHQMVLCKKDLIRRDILYYKGRIDMDKYEVVDIEDGRDDDFNVSMKNAFKLHNKETEEIHLFFAKKLEEKIRWLRAFREERKMVQEDEKIGFEISENQKRQAAMTVRKLPFPQLSEARICSPKGFASVFNGTCCGES

SEQ ID NO: 185056 - DNA, 1551 bp, Artificial Sequence
  derived and/or modified sequence
atgactctcctgattacgggggactccatcgtttccgcggaggcggtttgggaccatgtgaccatggccaaccgcgaactggcgttcaaggcgggtgatgtcattaaggttctggacgcctccaacaaggactggtggtggggccagatagacgatgaagaggggtggtttcctgcatcgttcgttagactgtgggtgaaccaggaagacgaagtggaagagggcccttctgatgttcagaatggccacttagatcctaatagcgattgcttgtgcctgggacgcccgctgcagaatcgtgaccagatgcgcgccaatgtcatcaatgagattatgagcacagaaagacactacatcaaacaccttaaagatatctgtgaaggatatctaaaacagtgcagaaagagaagggatatgttctctgacgagcaactcaaggttatatttgggaacatcgaagatatctacaggttccagatgggcttcgtgagagatttggagaaacagtacaacaatgacgacccccacctttctgaaatcggaccctgcttcctggaacaccaggatggattttggatttatagtgagtactgcaataatcatcttgacgcatgcatggagctgtccaaactgatgaaggactcacggtaccagcatttttttgaagcatgccggctcctgcaacaaatgattgatattgccatagacggatttctcctcacacctgtgcagaagatttgcaagtaccctctccagctagccgagctactcaaatataccgcccaggaccactctgactatcgctatgttgccgctgccctggcagtaatgagaaatgtaacgcagcagatcaatgagcgcaagcggagactagagaatattgataagatcgcccagtggcaggcctctgtactagattgggagggcgaggatatcctcgaccggtcctcggaattgatctacacaggggagatggcctggatctaccagccatacggaagaaaccagcagagggtgttcttcctgtttgatcaccaaatggtgttatgcaagaaagaccttattcgtagggatatactgtactacaaagggaggatagatatggacaagtatgaagtggtggacatagaagacgggagggatgacgacttcaacgtttcaatgaagaatgcatttaaacttcacaataaggagacggaggagattcatctgttcttcgcgaaaaagctggaggagaagataaggtggctcagagcatttcgtgaggagcgtaaaatggtacaggaggatgagaagataggatttgagattagcgagaaccagaagaggcaggctgccatgactgtccggaaagtccccaagcaaaagggcgttaactcagccaggtccgtgccccctagctacccacctccacaagatccactcaatcatggacagtacttggttcccgacgggatcgctcagtcacaggttttcgagttcacagagccaaagaggtcacagagccctttctggcaaaatttttctagattaacaccattcaaaaagtag

SEQ ID NO: 185057 - DNA, 1488 bp, Artificial Sequence
  derived and/or modified sequence
atggccaaccgggaactggcttttaaggctggggacgtaatcaaggtgcttgatgcctctaacaaagactggtggtggggacaaatcgatgacgaagagggttggtttcccgcctcttttgtcagactctgggtgaatcaagaggatgaagttgaggaaggccctagcgatgtccagaatgggcatcttgatcctaattctgattgcctgtgtctcggacgcccattgcagaaccgggatcagatgcgggcgaatgtgatcaatgaaataatgtcaactgagcgtcattacatcaagcacctgaaggacatttgcgaagggtatttgaagcagtgccgcaaacgtcgggatatgttttccgatgagcaactgaaagtgatcttcgggaacatagaggatatctacagattccaaatgggttttgttagagatcttgaaaaacagtacaacaacgacgaccctcatctgagtgagattgggccctgcttcctggaacaccaggacgggttctggatttacagcgagtattgcaacaatcacctggatgcttgcatggaactgagcaaactgatgaaggacagcaggtatcagcacttttttgaggcctgtagactcctccagcaaatgatcgatattgcaatagatggctttctgcttacgccagtgcagaaaatctgcaagtaccctttacagctggctgagcttcttaagtacacagcccaagatcacagcgattaccggtatgtcgccgccgcattagccgtaatgcgcaatgtgactcagcagattaacgagcggaaacggaggcttgagaacatagacaaaattgcacagtggcaggctagcgtgctggactgggagggggaagacatcttggatcgcagctccgaattgatatacactggagagatggcctggatttatcagccttatggacggaaccagcagcgtgtgttctttttgttcgaccaccagatggtgctctgtaagaaagacttgataaggagagacatcctttattataagggtcgaatcgacatggataagtatgaggtcgttgacattgaagacggacgggacgacgacttcaacgtcagcatgaagaacgccttcaagctgcataataaagagaccgaggagatccatctatttttcgcgaagaaactggaagaaaagatcaggtggctgagggcctttagagaagagcgtaaaatggttcaggaagatgaaaagatcggttttgaaatatcagagaaccagaaacggcaggctgcgatgactgtccggaaggtgccgaaacagaaaggggtgaactcagctaggtccgtgccaccaagctacccacccccccaggaccctctaaaccatggccagtatctggttccggacggaatagcccagtctcaggtgttcgagttcacagaacccaaaagatctcagtccccgttttggcagaatttctcacgcctgactccctttaaaaaatag

SEQ ID NO: 185058 - DNA, 1551 bp, Artificial Sequence
  derived and/or modified sequence
atgaccctgctgatcaccggggacagcatcgtgtctgctgaggccgtgtgggaccacgtgaccatggccaaccgggagctggccttcaaggctggagatgtgatcaaggtgctggatgccagcaacaaggactggtggtggggccagattgatgatgaggagggctggttccctgccagctttgtgcggctgtgggtgaaccaggaggatgaggtggaggagggccccagtgatgtgcagaatggccacctggaccccaacagcgactgcctgtgcctgggccggcccctgcagaacagagaccagatgagggccaacgtcatcaatgagatcatgagcacagagcggcactacatcaagcacctgaaggacatctgtgagggctacctgaagcagtgcaggaagaggcgggacatgttcagtgatgagcagctgaaggtgatctttggaaatattgaggacatctaccgcttccagatgggctttgtgcgggacctggagaagcagtacaacaatgatgacccccacctgtctgagatcggcccctgcttcctggagcaccaggacggcttctggatctacagcgagtactgcaacaaccacctggatgcctgcatggagctgagcaagctgatgaaggacagccgctaccagcacttctttgaggcctgccgcctgctgcagcagatgattgatattgccattgatggcttcctgctgacccctgtgcagaagatctgcaagtaccccctgcagctggccgagctgctgaagtacacagcccaggaccacagcgactaccgctacgtggccgccgccctggccgtgatgagaaatgtgacccagcagatcaatgaaaggaagaggcggctggagaacatcgacaagatcgcccagtggcaggcctctgtgctggactgggagggggaggacatcctggacaggagcagcgagctgatctacaccggggagatggcctggatctaccagccctacggcaggaaccagcagagggtcttcttcctgtttgaccaccagatggtgctgtgcaagaaggacctgatccggcgggacatcctgtactacaagggcagaattgacatggacaagtatgaggtggtggacattgaagatggaagagatgatgacttcaacgtgtccatgaagaatgccttcaagctgcacaacaaggagacagaggagatccacctgttctttgccaagaagctggaggagaagatccgctggctgcgggccttccgggaggagaggaagatggtgcaggaggatgagaagattggatttgagatcagcgagaaccagaagaggcaggccgccatgacagtgaggaaggtgcccaagcagaagggcgtgaacagcgcccggtctgtgcccccatcctaccccccaccccaggaccccctgaaccacggccagtacctggtgcctgatggcatcgcccagagccaggtgtttgagttcacagagcccaagaggagccagagccccttctggcagaacttcagccggctgacccccttcaagaagtag

SEQ ID NO: 185059 - DNA, 1488 bp, Artificial Sequence
  derived and/or modified sequence
atggccaaccgggagctggccttcaaggctggagatgtgatcaaggtgctggatgccagcaacaaggactggtggtggggccagattgatgatgaggagggctggttccctgccagctttgtgcggctgtgggtgaaccaggaggatgaggtggaggagggccccagtgatgtgcagaatggccacctggaccccaacagcgactgcctgtgcctgggccggcccctgcagaacagagaccagatgagggccaacgtcatcaatgagatcatgagcacagagcggcactacatcaagcacctgaaggacatctgtgagggctacctgaagcagtgcaggaagagaagagacatgttcagtgatgagcagctgaaggtgatcttcggcaacatcgaggacatctaccgcttccagatgggctttgtgcgggacctggagaagcagtacaacaatgatgacccccacctgtctgaaattggcccctgcttcctggagcaccaggacggcttctggatctacagcgagtactgcaacaaccacctggatgcctgcatggagctgagcaagctgatgaaggacagccgctaccagcacttctttgaggcctgccgcctgctgcagcagatgattgacatcgccattgatggcttcctgctgacccctgtgcagaagatctgcaagtaccccctgcagctggccgagctgctgaagtacacagcccaggaccacagcgactaccgctacgtggccgccgccctggccgtgatgagaaatgtgacccagcagatcaatgaaaggaagaggcggctggagaacatcgacaagatcgcccagtggcaggcctctgtgctggactgggagggggaggacatcctggacaggagcagcgagctgatctacacaggagagatggcctggatctaccagccctatggaagaaaccagcagagggtcttcttcctgtttgaccaccagatggtgctgtgcaagaaggacctgatcagaagagacatcctgtactacaagggcagaattgacatggacaagtatgaggtggtggacattgaagatggaagagatgatgacttcaacgtgtccatgaagaatgccttcaagctgcacaacaaggagacagaggagatccacctgttctttgccaagaagctggaggagaagatccgctggctgcgggccttccgggaggagaggaagatggtgcaggaggatgagaagattggatttgagatcagcgagaaccagaagaggcaggccgccatgacagtgaggaaggtgcccaagcagaagggcgtgaacagcgcccggtctgtgccccccagctaccccccaccccaggaccccctgaaccacggccagtacctggtgcctgatggcatcgcccagagccaggtgtttgagttcacagagcccaagaggagccagagccccttctggcagaacttcagccggctgacccccttcaagaagtag

SEQ ID NO: 185060 - DNA, 1551 bp, Artificial Sequence
  derived and/or modified sequence
atgaccctgctgatcaccggcgacagcatcgtgagcgccgaggccgtttgggatcatgtgactatggcaaaccgtgagcttgccttcaaggccggcgacgtcattaaggtactggacgcttcaaacaaggattggtggtggggccagattgacgacgaggaaggttggttccctgcctctttcgtaagactctgggttaatcaagaagatgaagtggaggaaggcccgtccgatgtacaaaacggacaccttgatcctaactccgactgcctgtgtttggggcgccctctgcagaacagagatcagatgcgcgcgaacgtgattaacgagattatgagcacggaacgacattacataaagcatctcaaggatatctgcgaggggtacctcaaacagtgccgaaagcgcagagacatgttttcggacgagcagttgaaggtgatatttggcaacatcgaagacatctacagatttcagatggggtttgtgagggacctggagaagcagtacaataatgacgatccccacctgtccgaaatcggcccctgtttcctggaacaccaggacggattctggatctattctgaatactgcaataaccatctcgatgcttgtatggaactatctaaattaatgaaagattccaggtaccagcatttttttgaagcgtgccgtctactccaacagatgattgacatagctatcgatggattcctgctcacccctgtccagaagatttgtaagtaccctcttcaactagcagagcttctcaagtataccgctcaggaccattctgattaccgatacgtcgctgctgctcttgcagtgatgcggaacgtgacgcaacaaattaacgaacgcaagaggaggctcgagaatatcgataagatcgctcaatggcaggccagcgtcttagactgggagggcgaagacattctggatcggagttctgagctaatttatactggggagatggcttggatctaccaaccgtatggacgaaatcagcagcgcgtattttttctgtttgatcaccagatggtgttatgcaagaaggacctgattcgtcgggatattctctactacaaagggcggattgatatggataagtatgaggtagtcgacatcgaagatgggcgagatgacgattttaatgtgtccatgaagaatgctttcaagctgcacaataaggagaccgaggaaatacaccttttttttgctaaaaagctagaggaaaaaatccgttggctccgggcctttagagaggagcgcaaaatggtgcaagaagacgagaaaatcggcttcgaaattagcgagaatcagaagcggcaagccgcaatgacagtccggaaggtccctaagcagaaaggtgtcaattccgctcggtcagtacctcctagttatcctcctcctcaggatcccctgaaccacggacagtatctagtccctgacggcatcgcacaatcccaggtcttcgagtttactgaacccaaaagatctcagtctccattctggcaaaacttttccaggctcactccttttaagaagtag

SEQ ID NO: 185061 - DNA, 1488 bp, Artificial Sequence
  derived and/or modified sequence
atggccaaccgggagctggccttcaaggccggcgacgtgatcaaggtgttggatgcctctaacaaggattggtggtgggggcagatcgatgacgaagaaggctggttccctgctagctttgtgcgattatgggtgaaccaagaagatgaggtcgaggaggggccgtcagatgttcagaacggacacctagatccaaattctgactgtttatgtttgggcaggcctctgcagaacagggatcaaatgagggccaatgttatcaacgagataatgagtacggagcggcactatattaaacacctcaaagatatttgtgaaggctacctgaaacaatgtaggaagcggagggatatgttcagcgacgagcaacttaaggtaattttcggcaatattgaagatatatacaggttccagatgggatttgtgagggatctcgagaaacagtacaacaacgacgacccacatctgtctgagatagggccttgttttcttgagcaccaggacggtttctggatctactcggagtattgtaataatcatcttgatgcctgcatggaactcagcaaactcatgaaggattctcgctatcaacacttttttgaggcctgtaggctgctgcagcagatgatcgacatcgcaatagacggctttctgctgactcctgtgcagaagatctgcaagtaccctcttcagttggcagagcttctcaagtacacagcacaagaccactcggactatcgatatgtcgcagcagccctggccgttatgagaaacgttacacagcagatcaatgagcggaaaagaagactggaaaacatcgataaaattgctcagtggcaagcttctgtgctcgactgggagggcgaagacattctcgatcggagtagcgaactgatttatacaggcgagatggcgtggatttatcagccgtacggtcggaaccagcagagggttttttttctatttgaccaccagatggtgctctgtaagaaggatctcattcgaagagatatcttatattataagggccgtatcgatatggacaagtacgaggtagtggacatcgaggatggcagagatgatgactttaatgtctccatgaagaacgcattcaagttgcacaacaaagaaacagaagaaatccacctgttttttgccaagaagctcgaagaaaaaatcaggtggctgagagcattcagggaagagcgcaaaatggttcaagaggacgagaagataggctttgagatttcagagaatcaaaagcgccaggcggctatgacagttcggaaagtcccaaagcagaagggcgtcaattccgcgaggtcagtgcccccatcatatccacccccccaggaccccctgaaccacggtcagtacttggttccagacggaatcgcccagtcgcaagtgttcgaatttacggaaccaaagagaagtcagagtccattctggcaaaatttcagccgattaaccccattcaaaaagtag

SEQ ID NO: 185062 - DNA, 1551 bp, Artificial Sequence
  derived and/or modified sequence
atgactctgttgatcaccggcgactcgatcgtttcagctgaggccgtctgggaccacgtaacaatggctaaccgggagttagcatttaaggcgggtgacgtaatcaaggtgctggacgcttctaacaaagattggtggtgggggcaaatcgatgacgaagagggatggttccccgcttcttttgttcggctctgggtgaaccaggaagacgaggtggaggaaggccctagcgacgtgcagaacggccatcttgaccctaacagcgattgcctgtgcctgggtagaccacttcaaaacagggaccagatgcgggctaatgttatcaatgaaataatgagcaccgaaagacactacatcaagcatctgaaggacatctgcgaaggttacctgaaacagtgtcgcaagaggagggatatgttctcagacgaacaactaaaagtgattttcggaaatatcgaagatatttaccgcttccagatgggatttgtaagagacctcgaaaaacagtataataacgatgaccctcacctgtctgaaatcggtccatgcttcctggagcaccaggatgggttttggatttacagcgagtactgcaacaaccaccttgacgcatgtatggaactgtccaagctaatgaaagactccagataccagcattttttcgaggcttgtaggttgttgcagcagatgatcgatatcgccatagacggttttttgttgacaccagtccagaaaatctgcaagtatccccttcaactggccgaactactgaagtacaccgctcaagaccactccgattaccgatatgttgccgctgctctcgcagtgatgcggaacgtgactcagcaaataaatgagcggaaaaggaggctcgaaaatatagacaagatcgcacagtggcaggcaagcgtgctggattgggagggtgaggacattttggaccggtcctcagaactgatttacactggagagatggcttggatttatcagccctatggacggaatcagcagcgcgtgttcttcctttttgaccaccaaatggttctctgcaaaaaggatcttattcgcagagacatactgtactacaaggggcgtatcgatatggacaagtatgaagtggttgacattgaggacgggagagacgacgattttaatgtctctatgaagaacgcctttaaacttcataacaaagagacagaagaaattcacttgttttttgccaaaaaactggaggaaaagattaggtggctaagagccttccgcgaagagcggaagatggtccaggaggatgaaaagatcggtttcgaaatcagtgagaaccagaagcgacaggcggcaatgacggttcggaaagtgccaaagcagaagggcgtgaactcggcccgttccgttcccccaagctacccacccccacaggaccccctgaaccacggccagtacctggtcccagatggaattgcacagagccaagtctttgagtttacagaaccaaaaagatcccagagtcctttttggcagaatttttcacgactcaccccatttaaaaagtag

SEQ ID NO: 185063 - DNA, 1488 bp, Artificial Sequence
  derived and/or modified sequence
atggctaacagagaattggcttttaaagctggcgatgtgataaaggtgcttgatgcctcgaataaggattggtggtggggccagattgacgatgaagagggctggtttcccgctagcttcgtcagattatgggtgaaccaggaagatgaagtggaggagggtccatcagacgtgcagaatgggcacttagatcccaactcagactgcctctgccttggcaggccactgcagaacagagaccagatgagagccaatgttatcaatgaaattatgtctacagagaggcactacattaagcatctgaaagatatctgcgaaggctatctgaagcagtgtaggaaaagaagggatatgttcagtgacgaacagttgaaggtcatttttggcaacattgaagatatatacagattccagatgggctttgtgagggatctagaaaagcagtataataacgatgatcctcacctaagtgaaattggaccatgttttctcgaacaccaggacggattttggatctacagtgaatactgcaataaccacctggacgcctgcatggagttgtctaaacttatgaaagattcccggtatcagcattttttcgaggcctgccggttactgcagcaaatgattgacatcgccattgacgggtttcttctgacacccgtgcagaaaatctgcaagtaccccttacaactggccgagctactcaaatacacggctcaagaccattccgattacagatacgtcgccgctgcccttgctgtcatgagaaacgtcacccagcagatcaatgaaaggaaacgacgactcgagaacatcgataaaatagcacagtggcaggcttctgtcttggattgggagggcgaagacatcttggacagatcctcagagctaatctacaccggcgaaatggcatggatctatcaaccgtacggacgtaatcagcaacgtgtattcttcctgttcgaccatcagatggttctctgcaaaaaggacctgatccgtcgggacatcctatactacaaaggcagaattgatatggacaaatatgaggttgtagacattgaagacggccgagacgacgacttcaatgtctccatgaagaacgctttcaagttgcacaataaggagacagaagagattcaccttttcttcgccaaaaagctcgaggaaaaaatccgttggctgagagcttttagggaagagagaaagatggtacaagaagacgaaaagatcgggttcgagattagtgagaaccaaaagagacaggccgcaatgaccgtgcgcaaggttccaaaacagaaaggggtgaacagcgcccgaagcgttcccccttcctacccccctccgcaggacccactgaatcatgggcagtatctggttcccgacggaatcgctcagtctcaggtattcgagttcacagaacctaagcggagccagtcacctttctggcagaacttctccagactgacaccatttaagaaatag

SEQ ID NO: 185064 - DNA, 5413 bp, Artificial Sequence
  derived and/or modified sequence
gaagagggatagggccagcaaggcagggatcgaacgagtgtctggcagccgggagcccagcgaagagagcgagcaagcttaggaaaacgagcgaagtaaagggagtaggggagactgagactgaccggtagccaggcaggcggacggacgcacgcccggacagactgagcaggcgccggagaaccactcacaggttccccccgcctttccctttgaaagctaggattttgcctttcccgtggcgcccgagagagaatgctggactctgccgacttcagcgcaagctaagatttctcagctagggacaaacgatcagcccaatcctgagaaggggggaaccaagcaccccgtccccatccccctcccctcccccgactaaactcgggcgccaaacccagcccttctctaaccaccctacttcctcctctcctttctagcatggtggctgtatggacagtctgacagaacagagactgacatctcccaatctgccggccccccacctggaacactacagtgttctgcattgcaccatgaccctggatgtgcaaactgtagtcgtttttgccgtgattgtagtcctcctgcttgtcaatgtcatactcatgtttttcctgggaacgcgctgaatggagtccagccacctgagctgtcgcgaactctcgctttgatttcatcccgagagccaccgagaaaaaaaaaaaatcacagacagagacagggaaagagagagaaagaacaagctttcttactcaggggggaaaacgttttgagcttcaacatggcctcgctgtgatatgtatgacgttgctgatcactggagattccatcgttagtgctgaggcagtatgggatcacgtcaccatggccaaccgggagttggcatttaaagctggcgacgtcatcaaagtcttggatgcttccaacaaggattggtggtggggccagatcgacgatgaggagggatggtttcctgccagctttgtgaggctctgggtgaaccaggaggatgaggtggaggaggggcccagcgatgtgcagaacggacacctggaccccaattcagactgcctctgtctggggcggccactacagaaccgggaccagatgcgggccaatgtcatcaatgagataatgagcactgagcgtcactacatcaagcacctcaaggatatttgtgagggctatctgaagcagtgccggaagagaagggacatgttcagtgacgagcaactgaaggtaatctttgggaacattgaagatatctacagatttcagatgggctttgtgagagacctggagaaacagtataacaatgatgacccccacctcagcgagataggaccctgcttcctagagcaccaagatggattctggatatactctgagtattgtaacaaccacctggatgcttgcatggagctctccaaactgatgaaggacagccgctaccagcacttctttgaggcctgtcgcctcttgcagcagatgattgacattgctatcgatggtttccttttgactccagtgcagaagatctgcaagtatcccttacagttggctgagctcctaaagtatactgcccaagaccacagtgactacaggtatgtggcagctgctttggctgtcatgagaaatgtgactcagcagatcaacgaacgcaagcgacgtttagagaatattgacaagattgctcagtggcaggcttctgtcctagactgggagggcgaggacatcctagacaggagctcggagctgatctacactggggagatggcctggatctaccagccctacggccgcaaccagcagcgggtcttcttcctgtttgaccaccagatggtcctctgcaagaaggacctaatccggagagacatcctgtactacaaaggccgcattgacatggataaatatgaggtagttgacattgaggatggcagagatgatgacttcaatgtcagcatgaagaatgcctttaagcttcacaacaaggagactgaggagatacatctgttctttgccaagaagctggaggaaaaaatacgctggctcagggctttcagagaagagaggaaaatggtacaggaagatgaaaaaattggctttgaaatttctgaaaaccagaagaggcaggctgcaatgactgtgagaaaagtccctaagcaaaaaggtgtcaactctgcccgctcagttcctccttcctacccaccaccgcaggacccgttaaaccacggccagtacctggtccccgacggcatcgctcagtcgcaggtctttgagttcaccgaacccaagcgcagccagtcaccattctggcaaaacttcagcaggttaacccccttcaaaaaatgatacctacagggaggcagataattttaaaataaagtaaataaaattatatttatagatggaccttttttcggagaagcactgttgaaatttatacacacacacacacacagagacccttgagtacacatacacacacacacacacagacacacacacacacacacacacacacacacacacagagagataaggaacaaaagtgttttctgttgttttggggaagtgaaatatgtggttggtaggaagaggtaccaatgacttccaaacatgtgattccgtcttaaaagttttccatttttaccctgtcccccttccctttgctttcagaagttgacatttctattcattgcttttcttgttaagataatctctttactcccctgtgagtgattcactgccttgtcattattacgatagatgtgtttgtattgttttttttctgatgatactgatgttgatgaatttttaattttatttgatgtggtagagttgggaggtttcagggttttttcccctcttttactttccattgaggaagggaatgagctcctttctcctctccttcagccaatcattatcaaatgttccttcagccctgcagttgccccaaataaccttttttcagcatcctctgtcctcagtcatgccagtctggacatgctctgttgtgccctgtgacaaaactgctcagtattcctattgcttttactgtgttttaggtactgtgaagggatcaaaaaaccaaacagaagcaagggagtatcagactatgatgatgctggagtggacttctgttcagggaacattttgcattcaggctgtttcttctatcactggggtttcccatgttgcagcacttctgggtcgttgcaattttgcatctaggagttagtttgatcgagttattctcttttttcaagtcacttttgttataggtctccccctaggcctgtctctcccttagcccaaaagatctgaactggaagcagaggttgagattctgcctcccaggagagggatttacctgccccctagtaccagataggtttagggcagtgatctctacagcaatcagttcagtgtcctggttgtccctgctcccatttacagatgtttgggcagcattgatagaagtatggaggggttcaagacagagcccacctgatcaagatcatcagctaccttcaaattattgacctggacagggtccaagtctgatagtaaccttttacaagaaagaacagggatgggaatggaaagagatagccttgatccacagtattgtacctgcattttctaccaccctaaaattgtgtgagacttctcccattgttaacagattgcatggacaatcttccctggcttctttctttccctctctctttcttctttctcctgccatcctagcacaggaggatttttggtattgatatagttaaagctgttctggcactcaaagaaggccgtgtttccaacatcctctcatcccaggacatttggggcaagtgagttaggggcccaggggcaattttccctctgaataacgtgtctgaggcagggatgctaccctcaggctcgcttttggccagctttttgcttgggaaaatctaacttctttcacaaggaggcaggcttcctatggatgttggagtacctgtttttcctccacacatagcccttttcatggatagaccttgaacaacaaaaagggtataagggaataaggatgaactctgctgtgaagagcaagccactgtagtgaggaatgtggagactgggagtctgtcctaaaccccatgggagaagacttcatcatgacaggacttcagcttaccaagcagcagccatagctgtgtggaggcttcagcatagctagcatgtttactgctctatgcctcctgatccagaccaggcattgcccagcctgggaatcttttctttgtgggaatcaaattacaagctatttaagtttatattccatcacaaccaagtcagacttgtattataagtcaaggatgagcctgatctggggagagggccggggctcgggactggccaccactgttcagcacatgacctaactacgtaagcctctttggcaagggtcctggtgcccagcacccaggctaaaatatcctgtctggcagagtgttttggtagctatgcaggcctcccttcagtgtacctctttttccaacttctcactcctccttactaggcttggccttgacatgcttcttcgagggttggcagcacaccgggaggggatgcttggacaagtttctgggcctacatttcttgactaggccctctcatttcctccctccttggggcttctgcccagggctccaggatcagggatattacttctcaacccgcacttctcctctactgaacccactggcatcacctgatgccactaatttgtgaacaacaagaaatcatttccccattggttggagtattccctcagcctatagcatcaaagcagaccagtggccaacagccccaaggggagcccaattaaatacctgggttcagtatcctaacctgttatgtcctgacagcaatggtaaccccagtaattctgtaatgttgtaatttccgcatggccctgagctcccttttcctcaactcagtgaggccaggatttgctctccaaaaggctttgctagtgtgttcaatgggacctgctgtggggagtcctaagacagacatctaattattctctctttttccccccctctctatgtgtatatttctaatggatctataagaacagcaacaagagagttctaacaattctagtgtgaagccaaatagtgatcttttagtgctttggggatggggtgggctggggtggatggatgggcaacagtgactttgattacccttgctgctctgcatttgccagtttattcttttgtttcttttatctgactgactctgtcaaacaagtgtcaaagttgtgtgttaaaaaatgtttaacaaaaaaaatgttgtaatgacacaaagccttatgaaaatatttatggagttcaataaaagaagtaaaaagaca

SEQ ID NO: 185065 - DNA, 2345 bp, Artificial Sequence
  derived and/or modified sequence
gggatagggccagcaaggcagggatcgaacgagtgtctggcagccgggagcccagcgaagagagcgagcaagcttaggaaaacgagcgaacatggtggctgtatggacagtctgacagaacagagactgacatctcccaatctgccggccccccacctggaacactacagtgttctgcattgcaccatgaccctggatgtgcaaactgtagtcgtttttgccgtgattgtagtcctcctgcttgtcaatgtcatactcatgtttttcctgggaacgcgctgaatggagtccagccacctgagctgtcgcgaactctcgctttgatttcatcccgagagccaccgagaaaaaaaaaaaatcacagacagagacagggaaagagagagaaagaacaagctttcttactcaggggggaaaacgttttgagcttcaacatggcctcgctgtgatatgtggtagcaggccatccagtgaaatgtggagcaggcagtaggaaatatgggactggaggtgagcgagaactgatgtcatgagaaggatgattcatctgaagaactaagtggagagaacaaaaagcaaaggtccctattgacttttgaatgcggcagtcaagggtttaagtgggaagcccacttctcaattttcccaggtagtctgactgtgttgccagcaatgcttgagtgagttatcttcaggaaaaagttctcatttttttgagcagaaagcagtaaaagcatcctatcaagcacaaagaaggctgatcactggagattccatcgttagtgctgaggcagtatgggatcacgtcaccatggccaaccgggagttggcatttaaagctggcgacgtcatcaaagtcttggatgcttccaacaaggattggtggtggggccagatcgacgatgaggagggatggtttcctgccagctttgtgaggctctgggtgaaccaggaggatgaggtggaggaggggcccagcgatgtgcagaacggacacctggaccccaattcagactgcctctgtctggggcggccactacagaaccgggaccagatgcgggccaatgtcatcaatgagataatgagcactgagcgtcactacatcaagcacctcaaggatatttgtgagggctatctgaagcagtgccggaagagaagggacatgttcagtgacgagcaactgaaggtaatctttgggaacattgaagatatctacagatttcagatgggctttgtgagagacctggagaaacagtataacaatgatgacccccacctcagcgagataggaccctgcttcctagagcaccaagatggattctggatatactctgagtattgtaacaaccacctggatgcttgcatggagctctccaaactgatgaaggacagccgctaccagcacttctttgaggcctgtcgcctcttgcagcagatgattgacattgctatcgatggtttccttttgactccagtgcagaagatctgcaagtatcccttacagttggctgagctcctaaagtatactgcccaagaccacagtgactacaggtatgtggcagctgctttggctgtcatgagaaatgtgactcagcagatcaacgaacgcaagcgacgtttagagaatattgacaagattgctcagtggcaggcttctgtcctagactgggagggcgaggacatcctagacaggagctcggagctgatctacactggggagatggcctggatctaccagccctacggccgcaaccagcagcgggtcttcttcctgtttgaccaccagatggtcctctgcaagaaggacctaatccggagagacatcctgtactacaaaggccgcattgacatggataaatatgaggtagttgacattgaggatggcagagatgatgacttcaatgtcagcatgaagaatgcctttaagcttcacaacaaggagactgaggagatacatctgttctttgccaagaagctggaggaaaaaatacgctggctcagggctttcagagaagagaggaaaatggtacaggaagatgaaaaaattggctttgaaatttctgaaaaccagaagaggcaggctgcaatgactgtgagaaaagtccctaagcaaaaaggtgtcaactctgcccgctcagttcctccttcctacccaccaccgcaggacccgttaaaccacggccagtacctggtccccgacggcatcgctcagtcgcaggtctttgagttcaccgaacccaagcgcagccagtcaccattctggcaaaacttcagcaggttaacccccttcaaaaaatgatacctacagggaggcagataattttaaaataaagtaaataaaatta

SEQ ID NO: 185066 - DNA, 1551 bp, Artificial Sequence
  derived and/or modified sequence
atgaccctgctgatcaccggcgacagcatcgtgagcgccgaggccgtgtgggaccacgtgaccatggccaacagagagctggccttcaaggccggcgacgtgatcaaggtgctggacgccagcaacaaggactggtggtggggccagatcgacgacgaggagggctggttccccgccagcttcgtgagactgtgggtgaaccaggaggacgaggtggaggagggccccagcgacgtgcagaacggccacctggaccccaacagcgactgcctgtgcctgggcagacccctgcagaacagagaccagatgagagccaacgtgatcaacgagatcatgagcaccgagagacactacatcaagcacctgaaggacatctgcgagggctacctgaagcagtgcagaaagagaagagacatgttcagcgacgagcagctgaaggtgatcttcggcaacatcgaggacatctacagattccagatgggcttcgtgagagacctggagaagcagtacaacaacgacgacccccacctgagcgagatcggcccctgcttcctggagcaccaggacggcttctggatctacagcgagtactgcaacaaccacctggacgcctgcatggagctgagcaagctgatgaaggacagcagataccagcacttcttcgaggcctgcagactgctgcagcagatgatcgacatcgccatcgacggcttcctgctgacccccgtgcagaagatctgcaagtaccccctgcagctggccgagctgctgaagtacaccgcccaggaccacagcgactacagatacgtggccgccgccctggccgtgatgagaaacgtgacccagcagatcaacgagagaaagagaagactggagaacatcgacaagatcgcccagtggcaggccagcgtgctggactgggagggcgaggacatcctggacagaagcagcgagctgatctacaccggcgagatggcctggatctaccagccctacggcagaaaccagcagagagtgttcttcctgttcgaccaccagatggtgctgtgcaagaaggacctgatcagaagagacatcctgtactacaagggcagaatcgacatggacaagtacgaggtggtggacatcgaggacggcagagacgacgacttcaacgtgagcatgaagaacgccttcaagctgcacaacaaggagaccgaggagatccacctgttcttcgccaagaagctggaggagaagatcagatggctgagagccttcagagaggagagaaagatggtgcaggaggacgagaagatcggcttcgagatcagcgagaaccagaagagacaggccgccatgaccgtgagaaaggtgcccaagcagaagggcgtgaacagcgccagaagcgtgccccccagctacccccccccccaggaccccctgaaccacggccagtacctggtgcccgacggcatcgcccagagccaggtgttcgagttcaccgagcccaagagaagccagagccccttctggcagaacttcagcagactgacccccttcaagaagtag

SEQ ID NO: 185067 - DNA, 1488 bp, Artificial Sequence
  derived and/or modified sequence
atggccaacagagagctggccttcaaggccggcgacgtgatcaaggtgctggacgccagcaacaaggactggtggtggggccagatcgacgacgaggagggctggttccccgccagcttcgtgagactgtgggtgaaccaggaggacgaggtggaggagggccccagcgacgtgcagaacggccacctggaccccaacagcgactgcctgtgcctgggcagacccctgcagaacagagaccagatgagagccaacgtgatcaacgagatcatgagcaccgagagacactacatcaagcacctgaaggacatctgcgagggctacctgaagcagtgcagaaagagaagagacatgttcagcgacgagcagctgaaggtgatcttcggcaacatcgaggacatctacagattccagatgggcttcgtgagagacctggagaagcagtacaacaacgacgacccccacctgagcgagatcggcccctgcttcctggagcaccaggacggcttctggatctacagcgagtactgcaacaaccacctggacgcctgcatggagctgagcaagctgatgaaggacagcagataccagcacttcttcgaggcctgcagactgctgcagcagatgatcgacatcgccatcgacggcttcctgctgacccccgtgcagaagatctgcaagtaccccctgcagctggccgagctgctgaagtacaccgcccaggaccacagcgactacagatacgtggccgccgccctggccgtgatgagaaacgtgacccagcagatcaacgagagaaagagaagactggagaacatcgacaagatcgcccagtggcaggccagcgtgctggactgggagggcgaggacatcctggacagaagcagcgagctgatctacaccggcgagatggcctggatctaccagccctacggcagaaaccagcagagagtgttcttcctgttcgaccaccagatggtgctgtgcaagaaggacctgatcagaagagacatcctgtactacaagggcagaatcgacatggacaagtacgaggtggtggacatcgaggacggcagagacgacgacttcaacgtgagcatgaagaacgccttcaagctgcacaacaaggagaccgaggagatccacctgttcttcgccaagaagctggaggagaagatcagatggctgagagccttcagagaggagagaaagatggtgcaggaggacgagaagatcggcttcgagatcagcgagaaccagaagagacaggccgccatgaccgtgagaaaggtgcccaagcagaagggcgtgaacagcgccagaagcgtgccccccagctacccccccccccaggaccccctgaaccacggccagtacctggtgcccgacggcatcgcccagagccaggtgttcgagttcaccgagcccaagagaagccagagccccttctggcagaacttcagcagactgacccccttcaagaagtag

SEQ ID NO: 185068 - protein, 3095 aa, Artificial Sequence
  derived and/or modified sequence
MVFESVVVDVLNRFLGDYVVDLDTSQLSLGIWKGAVALKNLQIKENALSQLDVPFKVKVGHIGNLKLIIPWKNLYTQPVEAVLEEIYLLIVPSSRIKYDPLKEEKQLMEAKQQELKRIEEAKQKVVDQEQHLPEKQDTFAEKLVTQIIKNLQVKISSIHIRYEDDITNRDKPLSFGISLQNLSMQTTDQYWVPCLHDETEKLVRKLIRLDNLFAYWNVKSQMFYLSDYDNSLDDLKNGIVNENIVPEGYDFVFRPISANAKLVMNRRSDFDFSAPKINLEIELHNIAIEFNKPQYFSIMELLESVDMMAQNLPYRKFKPDVPLHHHAREWWAYAIHGVLEVNVCPRLWMWSWKHIRKHRQKVKQYKELYKKKLTSKKPPGELLVSLEELEKTLDVFNITIARQTAEVEVKKAGYKIYKEGVKDPEDNKGWFSWLWSWSEQNTNEQQPDVQPETLEEMLTPEEKALLYEAIGYSETAVDPTLLKTFEALKFFVHLKSMSIVLRENHQKPELVDIVIEEFSTLIVQRPGAQAIKFETKIDSFHITGLPDNSEKPRLLSSLDDAMSLFQITFEINPLDETVSQRCIIEAEPLEIIYDARTVNSIVEFFRPPKEVHLAQLTAATLTKLEEFRSKTATGLLYIIETQKVLDLKINLKASYIIVPQDGIFSPTSNLLLLDLGHLKVTSKSRSELPDVKQGEANLKEIMDRAYDSFDIQLTSVQLLYSRVGDNWREARKLSVSTQHILVPMHFNLELSKAMVFMDVRMPKFKIYGKLPLISLRISDKKLQGIMELIESIPKPEPVTEVSAPVKSFQIQTSTSLGTSQISQKIIPLLELPSVSEDDSEEEFFDAPCSPLEEPLQFPTGVKSIRTRKLQKQDCSVNMTTFKIRFEVPKVLIEFYHLVGDCELSVVEILVLGLGAEIEIRTYDLKANAFLKEFCLKCPEYLDENKKPVYLVTTLDNTMEDLLTLEYVKAEKNVPDLKSTYNNVLQLIKVNFSSLDIHLHTEALLNTINYLHNILPQSEEKSAPVSTTETEDKGDVIKKLALKLSTNEDIITLQILAELSCLQIFIQDQKCNISEIKIEGLDSEMIMRPSETEINAKLRNIIVLDSDITAIYKKAVYITGKEVFSFKMVSYMDATAGSAYTDMNVVDIQVNLIVGCIEVVFVTKFLYSILAFIDNFQAAKQALAEATVQAAGMAATGVKELAQRSSRMALDINIKAPVVVIPQSPVSENVFVADFGLITMTNTFHMITESQSSPPPVIDLITIKLSEMRLYRSRFINDAYQEVLDLLLPLNLEVVVERNLCWEWYQEVPCFNVNAQLKPMEFILSQEDITTIFKTLHGNIWYEKDGSASPAVTKDQYSATSGVTTNASHHSGGATVVTAAVVEVHSRALLVKTTLNISFKTDDLTMVLYSPGPKQASFTDVRDPSLKLAEFKLENIISTLKMYTDGSTFSSFSLKNCILDDKRPHVKKATPRMIGLTVGFDKKDMMDIKYRKVRDGCVTDAVFQEMYICASVEFLQTVANVFLEAYTTGTAVETSVQTWTAKEEVPTQESVKWEINVIIKNPEIVFVADMTKNDAPALVITTQCEICYKGNLENSTMTAAIKDLQVRACPFLPVKRKGKITTVLQPCDLFYQTTQKGTDPQVIDMSVKSLTLKVSPVIINTMITITSALYTTKETIPEETASSTAHLWEKKDTKTLKMWFLEESNETEKIAPTTELVPKGEMIKMNIDSIFIVLEAGIGHRTVPMLLAKSRFSGEGKNWSSLINLHCQLELEVHYYNEMFGVWEPLLEPLEIDQTEDFRPWNLGIKMKKKAKMAIVESDPEEENYKVPEYKTVISFHSKDQLNITLSKCGLVMLNNLVKAFTEAATGSSADFVKDLAPFMILNSLGLTISVSPSDSFSVLNIPMAKSYVLKNGESLSMDYIRTKDNDHFNAMTSLSSKLFFILLTPVNHSTADKIPLTKVGRRLYTVRHRESGVERSIVCQIDTVEGSKKVTIRSPVQIRNHFSVPLSVYEGDTLLGTASPENEFNIPLGSYRSFIFLKPEDENYQMCEGIDFEEIIKNDGALLKKKCRSKNPSKESFLINIVPEKDNLTSLSVYSEDGWDLPYIMHLWPPILLRNLLPYKIAYYIEGIENSVFTLSEGHSAQICTAQLGKARLHLKLLDYLNHDWKSEYHIKPNQQDISFVSFTCVTEMEKTDLDIAVHMTYNTGQTVVAFHSPYWMVNKTGRMLQYKADGIHRKHPPNYKKPVLFSFQPNHFFNNNKVQLMVTDSELSNQFSIDTVGSHGAVKCKGLKMDYQVGVTIDLSSFNITRIVTFTPFYMIKNKSKYHISVAEEGNDKWLSLDLEQCIPFWPEYASSKLLIQVERSEDPPKRIYFNKQENCILLRLDNELGGIIAEVNLAEHSTVITFLDYHDGAATFLLINHTKNELVQYNQSSLSEIEDSLPPGKAVFYTWADPVGSRRLKWRCRKSHGEVTQKDDMMMPIDLGEKTIYLVSFFEGLQRIILFTEDPRVFKVTYESEKAELAEQEIAVALQDVGISLVNNYTKQEVAYIGITSSDVVWETKPKKKARWKPMSVKHTEKLEREFKEYTESSPSEDKVIQLDTNVPVRLTPTGHNMKILQPHVIALRRNYLPALKVEYNTSAHQSSFRIQIYRIQIQNQIHGAVFPFVFYPVKPPKSVTMDSAPKPFTDVSIVMRSAGHSQISRIKYFKVLIQEMDLRLDLGFIYALTDLMTEAEVTENTEVELFHKDIEAFKEEYKTASLVDQSQVSLYEYFHISPIKLHLSVSLSSGREEAKDSKQNGGLIPVHSLNLLLKSIGATLTDVQDVVFKLAFFELNYQFHTTSDLQSEVIRHYSKQAIKQMYVLILGLDVLGNPFGLIREFSEGVEAFFYEPYQGAIQGPEEFVEGMALGLKALVGGAVGGLAGAASKITGAMAKGVAAMTMDEDYQQKRREAMNKQPAGFREGITRGGKGLVSGFVSGITGIVTKPIKGAQKGGAAGFFKGVGKGLVGAVARPTGGIIDMASSTFQGIKRATETSEVESLRPPRFFNEDGVIRPYRLRDGTGNQMLQKIQFYREWIMTHSSSSDDDDDDDDDDESDLNH

SEQ ID NO: 185069 - DNA, 9288 bp, Artificial Sequence
  derived and/or modified sequence
atggtgttcgagagcgtggtggtggacgtgctgaacagattcctgggcgactacgtggtggacctggacaccagccagctgagcctgggcatctggaagggcgccgtggccctgaagaacctgcagatcaaggagaacgccctgagccagctggacgtgcccttcaaggtgaaggtgggccacatcggcaacctgaagctgatcatcccctggaagaacctgtacacccagcccgtggaggccgtgctggaggagatctacctgctgatcgtgcccagcagcagaatcaagtacgaccccctgaaggaggagaagcagctgatggaggccaagcagcaggagctgaagagaatcgaggaggccaagcagaaggtggtggaccaggagcagcacctgcccgagaagcaggacaccttcgccgagaagctggtgacccagatcatcaagaacctgcaggtgaagatcagcagcatccacatcagatacgaggacgacatcaccaacagagacaagcccctgagcttcggcatcagcctgcagaacctgagcatgcagaccaccgaccagtactgggtgccctgcctgcacgacgagaccgagaagctggtgagaaagctgatcagactggacaacctgttcgcctactggaacgtgaagagccagatgttctacctgagcgactacgacaacagcctggacgacctgaagaacggcatcgtgaacgagaacatcgtgcccgagggctacgacttcgtgttcagacccatcagcgccaacgccaagctggtgatgaacagaagaagcgacttcgacttcagcgcccccaagatcaacctggagatcgagctgcacaacatcgccatcgagttcaacaagccccagtacttcagcatcatggagctgctggagagcgtggacatgatggcccagaacctgccctacagaaagttcaagcccgacgtgcccctgcaccaccacgccagagagtggtgggcctacgccatccacggcgtgctggaggtgaacgtgtgccccagactgtggatgtggagctggaagcacatcagaaagcacagacagaaggtgaagcagtacaaggagctgtacaagaagaagctgaccagcaagaagccccccggcgagctgctggtgagcctggaggagctggagaagaccctggacgtgttcaacatcaccatcgccagacagaccgccgaggtggaggtgaagaaggccggctacaagatctacaaggagggcgtgaaggaccccgaggacaacaagggctggttcagctggctgtggagctggagcgagcagaacaccaacgagcagcagcccgacgtgcagcccgagaccctggaggagatgctgacccccgaggagaaggccctgctgtacgaggccatcggctacagcgagaccgccgtggaccccaccctgctgaagaccttcgaggccctgaagttcttcgtgcacctgaagagcatgagcatcgtgctgagagagaaccaccagaagcccgagctggtggacatcgtgatcgaggagttcagcaccctgatcgtgcagagacccggcgcccaggccatcaagttcgagaccaagatcgacagcttccacatcaccggcctgcccgacaacagcgagaagcccagactgctgagcagcctggacgacgccatgagcctgttccagatcaccttcgagatcaaccccctggacgagaccgtgagccagagatgcatcatcgaggccgagcccctggagatcatctacgacgccagaaccgtgaacagcatcgtggagttcttcagaccccccaaggaggtgcacctggcccagctgaccgccgccaccctgaccaagctggaggagttcagaagcaagaccgccaccggcctgctgtacatcatcgagacccagaaggtgctggacctgaagatcaacctgaaggccagctacatcatcgtgccccaggacggcatcttcagccccaccagcaacctgctgctgctggacctgggccacctgaaggtgaccagcaagagcagaagcgagctgcccgacgtgaagcagggcgaggccaacctgaaggagatcatggacagagcctacgacagcttcgacatccagctgaccagcgtgcagctgctgtacagcagagtgggcgacaactggagagaggccagaaagctgagcgtgagcacccagcacatcctggtgcccatgcacttcaacctggagctgagcaaggccatggtgttcatggacgtgagaatgcccaagttcaagatctacggcaagctgcccctgatcagcctgagaatcagcgacaagaagctgcagggcatcatggagctgatcgagagcatccccaagcccgagcccgtgaccgaggtgagcgcccccgtgaagagcttccagatccagaccagcaccagcctgggcaccagccagatcagccagaagatcatccccctgctggagctgcccagcgtgagcgaggacgacagcgaggaggagttcttcgacgccccctgcagccccctggaggagcccctgcagttccccaccggcgtgaagagcatcagaaccagaaagctgcagaagcaggactgcagcgtgaacatgaccaccttcaagatcagattcgaggtgcccaaggtgctgatcgagttctaccacctggtgggcgactgcgagctgagcgtggtggagatcctggtgctgggcctgggcgccgagatcgagatcagaacctacgacctgaaggccaacgccttcctgaaggagttctgcctgaagtgccccgagtacctggacgagaacaagaagcccgtgtacctggtgaccaccctggacaacaccatggaggacctgctgaccctggagtacgtgaaggccgagaagaacgtgcccgacctgaagagcacctacaacaacgtgctgcagctgatcaaggtgaacttcagcagcctggacatccacctgcacaccgaggccctgctgaacaccatcaactacctgcacaacatcctgccccagagcgaggagaagagcgcccccgtgagcaccaccgagaccgaggacaagggcgacgtgatcaagaagctggccctgaagctgagcaccaacgaggacatcatcaccctgcagatcctggccgagctgagctgcctgcagatcttcatccaggaccagaagtgcaacatcagcgagatcaagatcgagggcctggacagcgagatgatcatgagacccagcgagaccgagatcaacgccaagctgagaaacatcatcgtgctggacagcgacatcaccgccatctacaagaaggccgtgtacatcaccggcaaggaggtgttcagcttcaagatggtgagctacatggacgccaccgccggcagcgcctacaccgacatgaacgtggtggacatccaggtgaacctgatcgtgggctgcatcgaggtggtgttcgtgaccaagttcctgtacagcatcctggccttcatcgacaacttccaggccgccaagcaggccctggccgaggccaccgtgcaggccgccggcatggccgccaccggcgtgaaggagctggcccagagaagcagcagaatggccctggacatcaacatcaaggcccccgtggtggtgatcccccagagccccgtgagcgagaacgtgttcgtggccgacttcggcctgatcaccatgaccaacaccttccacatgatcaccgagagccagagcagccccccccccgtgatcgacctgatcaccatcaagctgagcgagatgagactgtacagaagcagattcatcaacgacgcctaccaggaggtgctggacctgctgctgcccctgaacctggaggtggtggtggagagaaacctgtgctgggagtggtaccaggaggtgccctgcttcaacgtgaacgcccagctgaagcccatggagttcatcctgagccaggaggacatcaccaccatcttcaagaccctgcacggcaacatctggtacgagaaggacggcagcgccagccccgccgtgaccaaggaccagtacagcgccaccagcggcgtgaccaccaacgccagccaccacagcggcggcgccaccgtggtgaccgccgccgtggtggaggtgcacagcagagccctgctggtgaagaccaccctgaacatcagcttcaagaccgacgacctgaccatggtgctgtacagccccggccccaagcaggccagcttcaccgacgtgagagaccccagcctgaagctggccgagttcaagctggagaacatcatcagcaccctgaagatgtacaccgacggcagcaccttcagcagcttcagcctgaagaactgcatcctggacgacaagagaccccacgtgaagaaggccacccccagaatgatcggcctgaccgtgggcttcgacaagaaggacatgatggacatcaagtacagaaaggtgagagacggctgcgtgaccgacgccgtgttccaggagatgtacatctgcgccagcgtggagttcctgcagaccgtggccaacgtgttcctggaggcctacaccaccggcaccgccgtggagaccagcgtgcagacctggaccgccaaggaggaggtgcccacccaggagagcgtgaagtgggagatcaacgtgatcatcaagaaccccgagatcgtgttcgtggccgacatgaccaagaacgacgcccccgccctggtgatcaccacccagtgcgagatctgctacaagggcaacctggagaacagcaccatgaccgccgccatcaaggacctgcaggtgagagcctgccccttcctgcccgtgaagagaaagggcaagatcaccaccgtgctgcagccctgcgacctgttctaccagaccacccagaagggcaccgacccccaggtgatcgacatgagcgtgaagagcctgaccctgaaggtgagccccgtgatcatcaacaccatgatcaccatcaccagcgccctgtacaccaccaaggagaccatccccgaggagaccgccagcagcaccgcccacctgtgggagaagaaggacaccaagaccctgaagatgtggttcctggaggagagcaacgagaccgagaagatcgcccccaccaccgagctggtgcccaagggcgagatgatcaagatgaacatcgacagcatcttcatcgtgctggaggccggcatcggccacagaaccgtgcccatgctgctggccaagagcagattcagcggcgagggcaagaactggagcagcctgatcaacctgcactgccagctggagctggaggtgcactactacaacgagatgttcggcgtgtgggagcccctgctggagcccctggagatcgaccagaccgaggacttcagaccctggaacctgggcatcaagatgaagaagaaggccaagatggccatcgtggagagcgaccccgaggaggagaactacaaggtgcccgagtacaagaccgtgatcagcttccacagcaaggaccagctgaacatcaccctgagcaagtgcggcctggtgatgctgaacaacctggtgaaggccttcaccgaggccgccaccggcagcagcgccgacttcgtgaaggacctggcccccttcatgatcctgaacagcctgggcctgaccatcagcgtgagccccagcgacagcttcagcgtgctgaacatccccatggccaagagctacgtgctgaagaacggcgagagcctgagcatggactacatcagaaccaaggacaacgaccacttcaacgccatgaccagcctgagcagcaagctgttcttcatcctgctgacccccgtgaaccacagcaccgccgacaagatccccctgaccaaggtgggcagaagactgtacaccgtgagacacagagagagcggcgtggagagaagcatcgtgtgccagatcgacaccgtggagggcagcaagaaggtgaccatcagaagccccgtgcagatcagaaaccacttcagcgtgcccctgagcgtgtacgagggcgacaccctgctgggcaccgccagccccgagaacgagttcaacatccccctgggcagctacagaagcttcatcttcctgaagcccgaggacgagaactaccagatgtgcgagggcatcgacttcgaggagatcatcaagaacgacggcgccctgctgaagaagaagtgcagaagcaagaaccccagcaaggagagcttcctgatcaacatcgtgcccgagaaggacaacctgaccagcctgagcgtgtacagcgaggacggctgggacctgccctacatcatgcacctgtggccccccatcctgctgagaaacctgctgccctacaagatcgcctactacatcgagggcatcgagaacagcgtgttcaccctgagcgagggccacagcgcccagatctgcaccgcccagctgggcaaggccagactgcacctgaagctgctggactacctgaaccacgactggaagagcgagtaccacatcaagcccaaccagcaggacatcagcttcgtgagcttcacctgcgtgaccgagatggagaagaccgacctggacatcgccgtgcacatgacctacaacaccggccagaccgtggtggccttccacagcccctactggatggtgaacaagaccggcagaatgctgcagtacaaggccgacggcatccacagaaagcacccccccaactacaagaagcccgtgctgttcagcttccagcccaaccacttcttcaacaacaacaaggtgcagctgatggtgaccgacagcgagctgagcaaccagttcagcatcgacaccgtgggcagccacggcgccgtgaagtgcaagggcctgaagatggactaccaggtgggcgtgaccatcgacctgagcagcttcaacatcaccagaatcgtgaccttcacccccttctacatgatcaagaacaagagcaagtaccacatcagcgtggccgaggagggcaacgacaagtggctgagcctggacctggagcagtgcatccccttctggcccgagtacgccagcagcaagctgctgatccaggtggagagaagcgaggacccccccaagagaatctacttcaacaagcaggagaactgcatcctgctgagactggacaacgagctgggcggcatcatcgccgaggtgaacctggccgagcacagcaccgtgatcaccttcctggactaccacgacggcgccgccaccttcctgctgatcaaccacaccaagaacgagctggtgcagtacaaccagagcagcctgagcgagatcgaggacagcctgccccccggcaaggccgtgttctacacctgggccgaccccgtgggcagcagaagactgaagtggagatgcagaaagagccacggcgaggtgacccagaaggacgacatgatgatgcccatcgacctgggcgagaagaccatctacctggtgagcttcttcgagggcctgcagagaatcatcctgttcaccgaggaccccagagtgttcaaggtgacctacgagagcgagaaggccgagctggccgagcaggagatcgccgtggccctgcaggacgtgggcatcagcctggtgaacaactacaccaagcaggaggtggcctacatcggcatcaccagcagcgacgtggtgtgggagaccaagcccaagaagaaggccagatggaagcccatgagcgtgaagcacaccgagaagctggagagagagttcaaggagtacaccgagagcagccccagcgaggacaaggtgatccagctggacaccaacgtgcccgtgagactgacccccaccggccacaacatgaagatcctgcagccccacgtgatcgccctgagaagaaactacctgcccgccctgaaggtggagtacaacaccagcgcccaccagagcagcttcagaatccagatctacagaatccagatccagaaccagatccacggcgccgtgttccccttcgtgttctaccccgtgaagccccccaagagcgtgaccatggacagcgcccccaagcccttcaccgacgtgagcatcgtgatgagaagcgccggccacagccagatcagcagaatcaagtacttcaaggtgctgatccaggagatggacctgagactggacctgggcttcatctacgccctgaccgacctgatgaccgaggccgaggtgaccgagaacaccgaggtggagctgttccacaaggacatcgaggccttcaaggaggagtacaagaccgccagcctggtggaccagagccaggtgagcctgtacgagtacttccacatcagccccatcaagctgcacctgagcgtgagcctgagcagcggcagagaggaggccaaggacagcaagcagaacggcggcctgatccccgtgcacagcctgaacctgctgctgaagagcatcggcgccaccctgaccgacgtgcaggacgtggtgttcaagctggccttcttcgagctgaactaccagttccacaccaccagcgacctgcagagcgaggtgatcagacactacagcaagcaggccatcaagcagatgtacgtgctgatcctgggcctggacgtgctgggcaaccccttcggcctgatcagagagttcagcgagggcgtggaggccttcttctacgagccctaccagggcgccatccagggccccgaggagttcgtggagggcatggccctgggcctgaaggccctggtgggcggcgccgtgggcggcctggccggcgccgccagcaagatcaccggcgccatggccaagggcgtggccgccatgaccatggacgaggactaccagcagaagagaagagaggccatgaacaagcagcccgccggcttcagagagggcatcaccagaggcggcaagggcctggtgagcggcttcgtgagcggcatcaccggcatcgtgaccaagcccatcaagggcgcccagaagggcggcgccgccggcttcttcaagggcgtgggcaagggcctggtgggcgccgtggccagacccaccggcggcatcatcgacatggccagcagcaccttccagggcatcaagagagccaccgagaccagcgaggtggagagcctgagaccccccagattcttcaacgaggacggcgtgatcagaccctacagactgagagacggcaccggcaaccagatgctgcagaagatccagttctacagagagtggatcatgacccacagcagcagcagcgacgacgacgacgacgacgacgacgacgacgagagcgacctgaaccactag

SEQ ID NO: 185070 - DNA, 9288 bp, Artificial Sequence
  derived and/or modified sequence
atggtttttgagtcagtcgtggtggacgtactaaacagattccttggcgattacgtagttgacctagatacatcacaactgagtctgggaatctggaagggcgcagtggcactgaagaacctccaaataaaggagaacgcgttatcgcagctcgatgtgccttttaaagtgaaagtgggccacatcggtaaccttaagttgatcattccatggaaaaatctctacacccagcctgtggaggctgtgctcgaggagatctacctgctgatcgtgccaagtagccggataaagtacgaccctctgaaagaagagaagcagctaatggaagccaagcagcaggaactcaaacgtatagaggaggccaaacagaaggtagttgaccaggagcagcacctgccagagaaacaagacaccttcgcagagaaactggtgacacaaataataaaaaacctgcaagtgaagatttctagcatccacatcagatatgaagacgatatcacgaacagggacaaacctctaagcttcgggatttccctccagaatctgagcatgcagaccacagaccaatattgggtcccgtgcttgcatgacgagacggagaaactagtgcgcaagttgattagacttgacaacctatttgcttactggaacgtaaaatcccagatgttctacctcagcgattacgacaattcgctggatgacctaaagaatggaatcgttaatgaaaatatcgtgccagagggctatgactttgtgttccgaccaattagcgccaatgcgaagctcgtgatgaatcggaggtctgacttcgacttctccgctcccaagataaacttggagatagagcttcacaacatcgcaattgaatttaataagccccagtacttctccattatggaactgctggaaagcgtggacatgatggcacagaacctgccttaccgaaaatttaaacccgacgttccgttgcaccaccatgctagagaatggtgggcttatgcgatccacggggtgctggaggttaatgtatgtccccgtctgtggatgtggtcatggaaacacatacggaaacatcgccagaaagttaagcaatacaaagagctgtataagaagaaattaactagcaaaaaaccccctggggagcttctcgtgtccctggaagaactcgagaagacactggacgtgttcaatattacaatcgcaagacaaacagcagaggtggaggtcaagaaggccgggtacaagatttacaaagaaggggtaaaagacccagaggacaacaaggggtggttcagttggctgtggtcgtggtcggagcaaaacacaaacgaacagcagcctgacgtgcagcccgagacactggaggaaatgctgacgcccgaggaaaaggctctcctgtatgaggcaatcggctacagtgagacagctgttgatcccactctcctgaagacctttgaggccctaaaattcttcgtacacctgaaatccatgtccatagtcctgagagagaatcaccagaagcctgagctcgtggatatcgtcattgaggaattctctacacttatagtgcagcggccaggtgctcaagcaatcaagttcgagactaagatcgactcattccacatcactggtttgcctgacaactctgaaaaaccacgcctacttagttcactcgacgatgccatgtcccttttccaaatcacattcgagatcaaccctctcgatgaaacggtcagccagagatgtatcatcgaggccgagcctctcgagatcatttacgacgcccgcaccgtcaacagtatcgtcgagttttttagaccgccaaaagaggttcatctggcccagctgacggccgcaacactcaccaagttggaagagttcagatccaagacagcaacaggcctattatacattattgaaacgcagaaagtgctggaccttaaaatcaatctgaaagcttcctatatcatcgtgcctcaagatggaattttttccccaacctctaatctacttttgctcgacttgggccacttaaaggtgacatccaagtcaaggtcagaactgcccgacgtcaagcagggggaagcaaacttgaaggaaataatggaccgggcgtatgactctttcgatatccagctaacctcggtgcagctgctgtacagcagagtcggggataactggcgagaagcacggaaactgagtgtgagcacccagcatattctggtgcccatgcactttaacctggagcttagtaaagcaatggtttttatggatgtgcggatgccaaaatttaaaatctacggcaaactgcctctcatatcattgcgaatcagcgacaaaaagttacagggcataatggaactgatagaatcaatccccaaacccgagcccgtgactgaggtatccgcgccagtgaaatccttccagatccagacctcaacatctctgggtacatcacagatctcacagaaaatcattcctttgttagaactgccctccgtgtcagaggacgattcggaggaagaattttttgacgccccatgctctcccctcgaggaacccttgcagttcccaactggagttaagagcattcgaacacgaaaactccaaaagcaggattgtagcgtgaacatgacaacattcaagattcgattcgaggtccctaaggtgctgatcgaattctaccatttagtcggggactgcgagctttctgtggtggagatacttgtgctgggtctaggggcagaaatcgagattcgtacttacgatctgaaggcaaacgccttccttaaggagttctgcctgaaatgtccagagtatctagacgagaacaagaagcctgtgtacttggtgacaacactcgacaacactatggaggacctgctcacgcttgagtatgtaaaagcggaaaagaacgtccctgacttaaaaagcacttataataacgttctccaactgatcaaagtgaactttagctcgctggatattcatctgcacaccgaggctctacttaacacaattaactacctgcacaatatactgccccagtccgaagaaaaatccgctcccgtatctacgaccgagaccgaggacaaaggagatgttatcaagaaactcgctctgaagctgtcgaccaacgaagacattataacccttcagatcttggccgaactgagctgtctgcaaatcttcatccaggaccagaaatgtaacatcagtgaaattaagatcgaaggtctcgatagtgaaatgatcatgaggcccagcgagaccgaaatcaatgctaaactaagaaacatcattgttctggattctgacataactgctatttataagaaagccgtgtacatcacagggaaagaggtgttcagctttaaaatggtgtcatacatggacgcaactgccggctctgcatatactgatatgaatgtcgttgatattcaagtgaatctaattgtgggttgcatcgaggttgtattcgtcacaaaattcctttatagcattctggcctttatcgataattttcaggctgcgaaacaagctctcgcggaggccaccgttcaggcagcagggatggccgcaacaggggtgaaggaattagcacagcggagcagtagaatggccctggacattaacatcaaggcgccagtggtcgtgattcctcagtctcctgtgagcgagaacgtctttgttgctgattttggtctcatcacaatgacgaacacgtttcatatgattactgaaagccagagctcgcctcctcctgtgatcgacctgatcactataaagctctctgaaatgagactgtacagaagcaggttcataaacgacgcatatcaggaagtgctggacttactcctccctcttaatctggaagtagtggtggagcggaacttatgttgggaatggtatcaggaagtaccttgttttaacgttaacgcccagctgaagcctatggaatttattctcagccaggaggatattacgacgatttttaaaactctgcacggcaacatatggtatgagaaggacggcagcgcttccccagccgttacaaaggatcagtactcagctactagtggcgtcaccacaaatgcaagccaccacagcgggggagcgactgtggtgactgctgctgttgtcgaggtccactcacgcgctcttctagttaagaccactttgaatatcagtttcaaaacagatgacctgaccatggtgctgtactctcctggacccaagcaggcatcattcacagatgtgcgagacccatccctaaaattggcggaatttaagttggaaaacataattagtacccttaagatgtacacagatggctccacattctccagcttttctctgaagaactgtattctcgatgacaagcgtccccatgtcaagaaggccacacctcgcatgatcggcctcacagtaggatttgataagaaggacatgatggacattaaataccgcaaggtccgagacgggtgcgtgaccgacgccgtcttccaagagatgtacatctgcgcatcagtcgagttcctgcagactgttgccaatgtgttcctcgaggcatacaccactggaaccgctgtggagacgtcagtccagacttggaccgcgaaagaagaagtgcccactcaagagtccgtcaagtgggaaatcaacgtcattattaagaaccctgagatcgttttcgtggcagacatgactaaaaatgacgcgcccgcactggtaattacaactcaatgcgaaatctgttacaagggcaatctcgaaaatagcacgatgacggccgccataaaagatctccaggtaagagcttgccccttcctgccggtaaagcgcaagggcaaaatcacaaccgtcctgcagccttgtgaccttttctaccaaacgacccagaagggcactgacccccaggttatcgatatgagtgtaaagtctctcacgctaaaggtctcacccgtcatcattaataccatgatcacaatcacgagcgccttgtataccacaaaagagaccataccagaggaaacagctagttctaccgcccatctgtgggagaaaaaagacacaaagacactcaagatgtggttcctcgaagagagcaatgagactgagaagatcgccccaacgaccgaactcgtgccaaagggcgaaatgatcaaaatgaacatcgactcgatctttattgtgttggaagcaggaatcggccaccgaacggtgcccatgttactagctaaatcccggtttagcggggagggcaaaaattggtcgagtctcatcaacttgcactgccagttggaactcgaggtacattattacaatgaaatgtttggagtttgggagcccctgctcgaaccacttgagattgatcagaccgaagactttcgaccatggaatctgggaatcaaaatgaagaagaaggcgaagatggctatagtggagagtgaccctgaggaggagaattacaaggtgcctgagtataagactgtgattagctttcactcgaaggatcagcttaacattactctgtccaagtgcggcttggtcatgctaaataatctggtcaaagccttcactgaagccgcaacagggtccagtgctgatttcgtcaaggatctagcgccgttcatgattctgaatagccttggactgaccatttcggtcagcccaagcgattctttttctgtgttaaacatcccaatggcaaagtcctacgtgctcaagaacggagagagcctgagcatggactatatacgtacaaaggacaacgatcacttcaacgctatgacatccttgtcatccaagctgttctttatcctgctgacccccgtcaaccatagtaccgcggacaaaatccccctgacgaaagtcggtcggcgtctatatacagtccgacaccgcgagtcaggagtggagaggagcattgtttgccagatcgacactgtggaagggtcaaaaaaggtcactatccggagccctgttcagatccgtaaccatttcagcgtgcccctttcagtatatgaaggagacaccctactggggaccgccagccctgaaaacgagttcaatatccccttgggcagctatcggtccttcatttttttgaagccagaggatgagaactatcagatgtgcgaaggcattgactttgaagaaatcattaaaaatgatggggcactgcttaagaaaaaatgccgaagtaagaacccatcaaaagagtccttccttattaatatcgtgcctgaaaaagacaacctgacctccctgtctgtctattcggaggacggttgggatctgccctatattatgcacctttggccccccatacttcttagaaatttgctgccctataagattgcctactacatagagggcatcgagaactccgtttttaccctgtcagaggggcactctgctcagatctgtactgctcagttgggaaaggcccgcttgcatctcaaactgttagactatctgaaccatgactggaagagtgagtaccatatcaaaccaaatcagcaggacatatcgttcgtaagttttacgtgtgtgacagaaatggagaagactgacctcgacatcgcggtccatatgacatataatacaggtcagacggtcgttgccttccacagtccgtactggatggtgaacaagactggtaggatgctgcagtacaaagctgacggcatccaccgaaagcatcccccaaattacaagaaaccagtattattctcctttcagcccaatcatttcttcaataacaacaaagtgcagctgatggtcacagattcagaactttccaaccagtttagcattgatacagtaggttcacacggcgcggtgaaatgcaaggggctcaagatggattaccaggtaggagtcacaatcgatttaagtagtttcaacatcaccagaattgtcacttttacgcccttttacatgatcaagaacaaatcaaagtaccatatctcggtcgcggaagagggcaacgacaagtggctgagccttgacctggaacagtgcattccattctggcccgagtatgcctcgtcaaagctgctgatacaggtggaaagaagcgaggacccccctaagcgcatctacttcaataaacaggaaaactgtattttgcttcgccttgacaatgaattaggcggcataattgcagaggtgaacctagctgagcacagtacggtgataactttcttagactaccatgatggggctgcaacattcctgctcatcaaccatactaagaacgagctggttcaatataaccagtcgtcactcagcgagattgaggatagcttgccaccggggaaagccgttttttacacctgggccgatcctgttggaagcaggcggctgaagtggcgatgtcgaaaatcccacggtgaagtgactcagaaagacgatatgatgatgccgattgacctgggagaaaaaaccatctacttagtctcattcttcgaggggctgcaaaggattatcctgtttacggaagatccacgggtgttcaaggtgacctacgagtccgaaaaagcggagttggcagaacaagagatcgcagtcgcacttcaagatgtaggaatctctctcgtcaataattacactaagcaggaggtcgcatacatcggcataacgagtagtgatgtcgtttgggagactaagcccaaaaagaaggctcgctggaagcccatgagtgtgaagcacacggagaagctagagagagagtttaaggagtatacagagagctccccttctgaggataaggtgattcaactggacaccaacgtgcccgtgcggttgacacctaccggccacaatatgaagattctgcagccacacgtgattgctctcaggagaaactacttaccagcactaaaggttgaatacaatactagcgcccaccagtctagcttccgcatccagatttaccgtattcagattcagaatcagatacacggtgctgtctttccatttgtcttctatcctgtcaagcctcctaaaagtgttacaatggacagtgctcccaagcctttcactgacgtgagtattgttatgcggtccgccggccactcccagatttctcgaatcaaatacttcaaagtcctaattcaggagatggatctaagactcgacctcggattcatttacgctctcacggacctcatgacagaagcagaagtcaccgaaaacacagaggttgagttattccataaggatattgaggccttcaaagaggaatacaagactgcttcactcgtggaccagagccaagtttccttgtacgagtattttcatatcagtcctataaagttgcatctttcagtttcgctgtcctccggtagagaggaggcgaaagatagcaagcagaacggcgggttaattcctgttcatagtctcaatctgctgctcaaaagtatcggagccacacttactgatgtgcaggatgtggttttcaagctggccttcttcgaactaaattaccagttccacaccaccagcgatttgcaatctgaagtgattagacactattcaaaacaggcgatcaagcagatgtatgtccttatcctgggactggacgtactcggcaacccattcggtcttattagggaattcagtgaaggcgtggaggcctttttctatgagccttaccagggcgccattcaggggcccgaggaattcgtggaaggcatggccctcgggctgaaagctttagtagggggcgccgttggtggcctggctggcgcagcatcaaagatcactggggccatggcaaaaggtgtcgccgcaatgactatggatgaggattaccagcagaaacgtagagaagctatgaacaagcagccagcaggattcagggagggaatcacacgcggcgggaaagggctggtgagtggctttgtgtcggggattaccggaatagtcaccaaaccaatcaagggcgctcagaaaggtggcgcggccggattttttaagggagtcggcaagggattagtgggagctgtggcgaggccgacgggaggcatcatagacatggcaagctccacgtttcaggggatcaaaagagccactgagacctctgaagtagagagcctgcgcccacccagatttttcaatgaggacggggtcatccgcccctatcggttgagggacgggaccggaaatcagatgctccagaaaattcagttttatcgggagtggatcatgacacactcttcaagctccgatgacgacgatgacgacgatgacgatgacgaatccgacctgaatcattag

SEQ ID NO: 185071 - DNA, 9288 bp, Artificial Sequence
  derived and/or modified sequence
atggtgtttgaatctgtggtggtggatgtgctgaaccgcttcctgggggactatgtggtggacctggacaccagccagctgagcctgggcatctggaagggagctgtggccctgaagaacctgcagatcaaggaaaatgccctgagccagctggatgtgcccttcaaggtgaaggtgggccacatcggcaacctgaagctgatcatcccctggaagaacctgtacacccagcctgtggaggccgtgctggaggagatctacctgctgattgtgcccagcagccgcatcaagtatgaccccctgaaggaggagaagcagctgatggaggccaagcagcaggagctgaagagaattgaggaggccaagcagaaggtggtggaccaggagcagcacctgcctgagaagcaggacacctttgctgagaagctggtgacccagatcatcaagaacctgcaggtgaagatcagcagcatccacatccgctatgaagatgacatcaccaacagagacaagcccctgagctttggcatcagcctgcagaacctgtccatgcagaccacagaccagtactgggtgccctgcctgcatgatgaaacagagaagctggtgaggaagctgatccggctggacaacctgtttgcctactggaatgtgaagagccagatgttctacctgagtgactatgacaacagcctggatgacctgaagaatggaattgtgaatgaaaacatcgtgcctgagggctatgactttgtgttccggcccatcagcgccaatgccaagctggtgatgaacagaagaagtgactttgacttcagcgcccccaagatcaacctggagattgagctgcacaacatcgccatcgagttcaacaagccccagtacttcagcatcatggagctgctggagagcgtggacatgatggcccagaacctgccctacaggaagttcaagccagatgtgcccctgcaccaccacgcccgggagtggtgggcctatgccatccacggcgtgctggaggtgaatgtgtgcccccggctgtggatgtggagctggaagcacatcaggaagcaccggcagaaggtgaagcagtacaaggagctgtacaagaagaagctgaccagcaagaagcccccaggagagctgctggtgtccctggaggagctggagaagaccctggatgtgttcaacatcaccatcgcccggcagacagctgaggtggaggtgaagaaggccggctacaagatctacaaggagggcgtgaaggaccctgaggacaacaagggctggttctcctggctgtggagctggagcgagcagaacaccaatgagcagcagccagatgtgcagcctgagaccctggaggagatgctgaccccagaggagaaggccctgctgtatgaggccatcggctacagcgagacagctgtggaccccaccctgctgaagacctttgaggccctgaagttctttgtgcacctgaagtccatgagcatcgtgctgcgggagaaccaccagaagccagagctggtggacatcgtgattgaggagttcagcaccctcatcgtgcagaggcctggggcccaggccatcaagtttgagaccaagattgacagcttccacatcaccggcctgcctgacaacagcgagaagccccggctgctgagcagcctggatgatgccatgagcctcttccagatcacctttgagatcaaccccctggatgaaacagtgtcccagcgctgcatcatcgaggccgagcccctggagatcatctatgatgccaggacagtgaacagcatcgtggagttcttccggccccccaaggaggtgcacctggcccagctgacagctgccaccctgaccaagctggaggagttccgcagcaagacagccaccggcctgctgtacatcatcgagacccagaaggtgctggacctgaagatcaacctgaaggccagctacatcatcgtgccccaggacggcatcttcagccccaccagcaacctgctgctgctggacctgggccacctgaaggtgaccagcaagagccgctctgagctgcctgatgtgaagcagggcgaggccaacctgaaggagatcatggaccgggcctatgacagctttgacatccagctgacctctgtgcagctgctgtacagccgggtgggggacaactggagggaggccaggaagctgtctgtgtccacccagcacatcctggtgcccatgcacttcaacctggagctgagcaaggccatggtgttcatggatgtgaggatgcccaagttcaagatctacggcaagctgcccctcatcagcctgcgcatcagtgacaagaagctgcagggcatcatggagctgattgagagcatccccaagccagagcctgtgacagaggtgtctgcccctgtgaagagcttccagatccagaccagcaccagcctgggcaccagccagatcagccagaagatcatccccctgctggagctgcccagcgtgtctgaagatgattctgaggaggagttctttgatgccccctgcagccccctggaggagcccctgcagttccccactggagtgaagagcatccgcaccaggaagctgcagaagcaggactgcagcgtgaacatgaccaccttcaagatccgctttgaggtgcccaaggtgctgattgagttctaccacctggtgggggactgtgagctgtctgtggtggagatcctggtgctgggcctgggcgctgagattgagatccgcacctatgacctgaaggccaatgccttcctgaaggagttctgcctgaagtgcccagagtacctggatgagaacaagaagcctgtgtacctggtgaccaccctggacaacaccatggaggacctgctgaccctggagtatgtgaaggccgagaagaatgtgcctgacctgaagagcacctacaacaacgtgctgcagctgatcaaggtgaacttcagcagcctggacatccacctgcacacagaggccctgctgaacaccatcaactacctgcacaacatcctgccccagagcgaggagaagagcgcccctgtgtccaccacagaaacagaggacaagggagatgtgatcaagaagctggccctgaagctgagcaccaatgaagacatcatcaccctgcagatcctggccgagctgagctgcctgcagatcttcatccaggaccagaagtgcaacatcagcgagatcaagattgagggcctggacagcgagatgatcatgaggccttctgaaacagagatcaatgccaagctgaggaacatcatcgtgctggacagcgacatcacagccatctacaagaaggctgtgtacatcaccgggaaggaggtgttctccttcaagatggtgtcctacatggatgccacagctggcagcgcctacacagacatgaatgtggtggacatccaggtgaacctgattgtgggctgcatcgaggtggtgtttgtgaccaagttcctgtacagcatcctggccttcatcgacaacttccaggccgccaagcaggccctggccgaggccaccgtgcaggccgccggcatggccgccactggagtgaaggagctggcccagaggagcagcaggatggccctggacatcaacatcaaggcccctgtggtggtgatcccccagagccctgtgtctgaaaatgtgtttgtggccgactttggcctcatcaccatgaccaacaccttccacatgatcacagagagccagagcagccccccacctgtgattgacctgatcaccatcaagctgtctgagatgaggctgtaccgcagccgcttcatcaatgatgcctaccaggaggtgctggacctgctgctgcccctgaacctggaggtggtggtggagaggaacctgtgctgggagtggtaccaggaggtgccctgcttcaacgtgaatgcccagctgaagcccatggagttcatcctgagccaggaggacatcaccaccatcttcaagaccctgcacggcaacatctggtatgagaaggatggcagcgccagccctgctgtgaccaaggaccagtacagcgccaccagcggcgtgaccaccaatgccagccaccacagcggcggggccaccgtggtgacagctgctgtggtggaggtgcacagccgggccctgctggtgaagaccaccctgaacatctccttcaagacagatgacctgaccatggtgctgtacagccctggccccaagcaggccagcttcacagatgtgcgggaccccagcctgaagctggccgagttcaagctggagaacatcatcagcaccctgaagatgtacacagatggcagcaccttcagcagcttcagcctgaagaactgcatcctggatgacaagaggccccacgtgaagaaggccacccccaggatgattggcctgactgtgggctttgacaagaaggacatgatggacatcaagtacaggaaggtgagagatggctgtgtgacagatgctgtgttccaggagatgtacatctgtgcctctgtggagttcctgcagacagtggccaacgtgttcctggaggcctacaccactggaacagctgtggagacctctgtgcagacctggacagccaaggaggaggtgcccacccaggagagcgtgaagtgggagatcaacgtcatcatcaagaaccctgagatcgtgtttgtggccgacatgaccaagaatgatgccccagccctggtgatcaccacccagtgtgagatctgctacaagggcaacctggagaacagcaccatgacagctgccatcaaggacctgcaggtgcgggcctgccccttcctgcctgtgaagaggaagggcaagatcaccaccgtgctgcagccctgtgacctcttctaccagaccacccagaagggcacagacccccaggtgattgacatgtctgtgaagagcctgaccctgaaggtgtcccctgtgatcatcaacaccatgatcaccatcaccagcgccctgtacaccaccaaggagaccatccctgaggagacagccagcagcacagcccacctgtgggagaagaaggacaccaagaccctgaagatgtggttcctggaggagagcaatgaaacagagaagatcgcccccaccacagagctggtgcccaagggggagatgatcaagatgaacatcgacagcatcttcatcgtgctggaggccggcatcggccacaggacagtgcccatgctgctggccaagagccgcttcagcggggagggcaagaactggagcagcctcatcaacctgcactgccagctggagctggaggtgcactactacaatgagatgtttggagtgtgggagcccctgctggagcccctggagattgaccagacagaggacttccggccctggaacctgggcatcaagatgaagaagaaggccaagatggccatcgtggagagtgaccctgaggaggagaactacaaggtgcctgagtacaagacagtcatctccttccacagcaaggaccagctgaacatcaccctgagcaaatgtggcctggtgatgctgaacaacctggtgaaggccttcacagaagctgccaccggcagcagcgctgactttgtgaaggacctggcccccttcatgatcctgaacagcctgggcctgaccatctctgtgagccccagcgacagcttctctgtgctgaacatccccatggccaagagctatgtgctgaagaatggagagagcctgtccatggactacatccgcaccaaggacaatgaccacttcaatgccatgaccagcctgagcagcaagctgttcttcatcctgctgacccctgtgaaccacagcacagctgacaagatccccctgaccaaggtgggcagaagactctacacagtgcgccaccgggagagcggcgtggagaggagcatcgtgtgccagattgacacagtggagggcagcaagaaggtgaccatccgcagccctgtgcagatccggaaccacttctctgtgcccctgtctgtgtatgaaggagacaccctgctgggcacagccagcccagaaaatgagttcaacatccccctgggcagctaccgctccttcatcttcctgaagccagaagatgagaactaccagatgtgtgagggcatcgactttgaggagatcatcaagaatgatggagccctgctgaagaagaagtgccgcagcaagaaccccagcaaggagagcttcctgatcaacatcgtgcctgagaaggacaacctgaccagcctgtctgtgtacagtgaagatggctgggacctgccctacatcatgcacctgtggccacccatcctgctgaggaacctgctgccctacaagatcgcctactacatcgagggcattgaaaattctgtgttcaccctgtctgagggccacagcgcccagatctgcacagcccagctgggcaaggcccggctgcacctgaagctgctggactacctgaaccacgactggaagtctgagtaccacatcaagcccaaccagcaggacatcagctttgtgtccttcacctgtgtgacagagatggagaagacagacctggacattgctgtgcacatgacctacaacacaggccagacagtggtggccttccacagcccctactggatggtgaacaagacaggccgcatgctgcagtacaaggcagatggcatccacaggaagcacccccccaactacaagaagcctgtgctcttctccttccagcccaaccacttcttcaacaacaacaaggtgcagctgatggtgacagacagcgagctgagcaaccagttcagcattgacacagtgggcagccacggggctgtgaagtgcaagggcctgaagatggactaccaggtgggcgtgaccatcgacctgagcagcttcaacatcacccgcatcgtgaccttcacccccttctacatgatcaagaacaagagcaagtaccacatctctgtggccgaggagggcaatgacaagtggctgagcctggacctggagcagtgcatccccttctggccagaatatgccagcagcaagctgctgatccaggtggagaggagtgaagatcctcccaagaggatctacttcaacaagcaggagaactgcatcctgctgcggctggacaatgagctgggcggcatcatcgccgaggtgaacctggccgagcacagcaccgtcatcaccttcctggactaccatgatggagctgccaccttcctgctgatcaaccacaccaagaatgagctggtgcagtacaaccagagcagcctgtctgaaattgaggacagcctgcccccaggcaaggctgtgttctacacctgggccgaccctgtgggcagccggcggctgaagtggcgctgcaggaagagccacggggaggtgacccagaaggatgacatgatgatgcccatcgacctgggggagaagaccatctacctggtgtccttctttgagggcctgcagaggatcatcctcttcacagaggaccccagggtcttcaaggtgacctatgagagcgagaaggccgagctggccgagcaggagattgctgtggccctgcaggatgtgggcatcagcctggtgaacaactacaccaagcaggaggtggcctacatcggcatcaccagcagtgatgtggtgtgggagaccaagcccaagaagaaggcccgctggaagcccatgtctgtgaagcacacagagaagctggagcgggagttcaaggagtacacagagagcagccccagcgaggacaaggtgatccagctggacaccaacgtgcctgtgcggctgacccccaccggccacaacatgaagatcctgcagccccacgtgattgccctgcggaggaactacctgcctgccctgaaggtggagtacaacaccagcgcccaccagagcagcttccgcatccagatctaccgcatccagatccagaaccagatccatggagctgtgttcccctttgtgttctaccctgtgaagccacccaagtctgtgaccatggacagcgcccccaagcccttcacagatgtgtccatcgtgatgaggtctgctggccacagccagatcagccgcatcaagtacttcaaggtgctgatccaggagatggacctgcggctggacctgggcttcatctatgccctgacagacctgatgacagaggccgaggtgacagagaacacagaggtggagctgttccacaaggacatcgaggccttcaaggaggagtacaagacagccagcctggtggaccagagccaggtgtccctgtatgagtacttccacatcagccccatcaagctgcacctgtctgtgtccctgagcagcggccgggaggaggccaaggacagcaagcagaatggaggcctcatccctgtgcacagcctgaacctgctgctgaagagcattggagccaccctgacagatgtgcaggatgtggtgttcaagctggccttctttgagctgaactaccagttccacaccaccagtgacctgcagagcgaggtgatccgccactacagcaagcaggccatcaagcagatgtatgtgctgatcctgggcctggatgtgctgggcaaccccttcggcctcatccgggagttcagcgagggcgtggaggccttcttctatgagccctaccagggcgccatccagggccctgaggagtttgtggagggcatggccctgggcctgaaggccctggtgggcggcgctgtgggcggcctggccggggccgccagcaagatcactggagccatggccaagggcgtggccgccatgaccatggatgaggactaccagcagaagagaagagaggccatgaacaagcagcctgctggcttccgggagggcatcacccggggcggcaagggcctggtgtctggctttgtgtctggcatcaccggcatcgtgaccaagcccatcaagggggcccagaagggcggggccgccggcttcttcaagggcgtgggcaagggcctggtgggcgctgtggcccggcccaccggcggcatcatcgacatggccagcagcaccttccagggcatcaagagggccacagagaccagcgaggtggagagcctgcggcccccacgcttcttcaatgaagatggagtcatccggccctaccgcctgagagatggcactggaaaccagatgctgcagaagatccagttctaccgggagtggatcatgacccacagcagcagcagtgatgatgatgatgatgatgatgatgatgatgaaagtgacctgaaccactag

SEQ ID NO: 185072 - DNA, 9288 bp, Artificial Sequence
  derived and/or modified sequence
atggtgttcgagagcgtggtggtggacgtgctgaaccggttcctgggtgactatgtagtagacctcgatacttctcaactgagtttgggcatctggaagggcgccgtcgccttgaagaaccttcagatcaaagaaaatgccctgagtcagctggatgtgcccttcaaagtgaaggtgggccatattggcaatctgaagcttataatcccttggaagaacctatatacccagccagtggaggccgtgctcgaagagatctatctgctaattgtgccaagctctcgcatcaagtacgatcccctgaaagaggagaagcaactgatggaagccaaacagcaggagttgaaacggatcgaagaagctaagcaaaaggtggtcgaccaggagcagcatctcccggagaaacaggacacctttgccgagaaacttgtcacccaaatcatcaagaacctgcaggtgaagatcagctcaatacatattcgttatgaagatgacataaccaaccgggacaagcctctatcattcggtattagtctccagaacctgtcgatgcagactaccgatcagtactgggtaccctgcttacacgacgagacggagaaacttgtgaggaagcttatccgcttagacaatctctttgcttactggaacgttaagagtcaaatgttctatctgtcagactatgacaatagcctcgatgatttgaaaaacgggattgtaaatgaaaacatcgtgcccgaaggatacgatttcgtttttcgccctatctcagcaaacgctaaactggtcatgaaccggcgctcagatttcgacttctcggcccctaagattaacctggaaattgagctgcacaatatcgccatcgagttcaacaagccacagtatttctccattatggagttgctagagtccgtggatatgatggcacagaacctgccttacaggaaattcaaacccgacgtgccgttacaccaccacgctcgggagtggtgggcttatgcgatccacggcgtgcttgaagttaacgtttgtccccgactgtggatgtggtcttggaagcacattcggaagcacagacaaaaggtaaaacagtacaaagaactgtacaaaaagaaactcacttctaagaagccccctggcgaactgctagtgagcctggaggaactggaaaagaccctcgacgtctttaatataactatcgcccgccagaccgccgaagttgaagtaaagaaggcaggttataagatttacaaagagggtgtcaaagaccccgaggacaataaagggtggttttcttggctgtggtcctggagtgagcagaatacaaacgaacagcaaccagacgtccagccagaaacactggaggagatgctgacaccagaagagaaggctctgctctacgaagccatcgggtatagcgagaccgccgtggaccccactctgctgaagacattcgaggctttgaagtttttcgtgcatctaaagtctatgtctatcgtcttaagagagaaccatcagaagcccgagctagtggatatcgtgatcgaggagttttccaccctgattgtgcagcggccaggggcccaagctatcaagtttgaaaccaagattgattctttccacattacaggacttcccgataactccgagaagccccggcttttgtcttctttggacgatgctatgtccctctttcagatcaccttcgaaattaaccccctggatgagactgtgtcccagagatgtatcattgaagctgaaccgctcgaaataatctacgacgccaggacagtgaatagtatcgtggagttttttcgccctcctaaagaagtgcacctggcgcagctgacagcggcaacactgactaaactcgaagagttccgctctaagacagccaccggtctactctatatcatcgaaacccagaaggtcctcgacttgaagatcaacttgaaggcatcatacatcatcgtacctcaggacggtattttttcgccaacctccaatcttctgctgctggatctaggtcatcttaaagtcacaagcaaaagcaggtccgaactgcctgatgtgaaacagggcgaagctaatctgaaggagatcatggacagggcatatgattcattcgacatccagctcacctctgttcagttgctgtatagcagggttggtgacaactggcgcgaggcccggaagttgagtgtgagcacgcagcacatacttgtccccatgcatttcaatttagagcttagcaaggccatggtgtttatggatgtgaggatgcctaaattcaagatctatggaaagctaccgctcattagcctgaggatcagcgataaaaaattgcagggcatcatggagctgatagagtccataccgaaaccagagccagtgaccgaggtgagtgctcctgtgaagtcctttcagattcagacatccacaagcctgggtacatcgcagatctctcagaagattattcccctgctggagctccccagtgtatccgaagacgactctgaggaagagtttttcgatgcaccttgctctccattagaagagcccctccaattccctactggtgtaaaatctattaggactcgtaaattacagaagcaggattgctctgtcaatatgacaacatttaagattcgcttcgaggtccctaaggtcctgatagagttttaccatcttgtgggagactgcgagttatctgtcgtggagatactagtcctagggcttggagctgagatcgagattagaacctacgatcttaaggccaacgcgtttttaaaggagttctgtttgaaatgcccagaatacctggatgagaacaagaaacccgtctacctggtgacaaccctggataacaccatggaggatcttctgacgttggagtacgtgaaggccgaaaagaacgtcccagacctgaagtccacctacaataatgtgctgcaactgatcaaggtcaacttttctagtctggatatccacctccacacagaagctttgctaaacactatcaattatctccataacatcctgcctcagtctgaagaaaagagcgctccagtgtcgacaacagagaccgaggacaagggcgacgtgatcaagaagttggcccttaagctgtctactaatgaagatatcattacactgcagatcctagcggagctaagttgtctgcagatttttattcaggaccagaaatgcaatatcagcgagatcaaaattgaaggactcgactctgaaatgatcatgcgcccttctgaaacggagattaacgctaagctgcggaacataattgtgctggattccgacatcacggccatctacaaaaaggccgtgtatatcacgggtaaggaagtgttttcctttaaaatggtcagctatatggatgctaccgccggctctgcctacacggacatgaacgtcgtggatattcaggtcaacctgatcgtgggctgcattgaggttgtgtttgtgacgaagtttctgtacagcattctggctttcatcgataactttcaggccgccaaacaggctctagctgaagccactgtccaggctgccgggatggccgccacgggcgttaaagagctcgcccagcgctcctcccgcatggcactcgacatcaacatcaaagcccctgtcgtggtaattccacagtccccagtgagcgaaaatgtcttcgtggcagactttggactaatcaccatgacaaacactttccacatgatcacagagagtcagagttcccccccacctgtgatcgatctgatcactataaaactctctgagatgcgattgtatcggagccgattcataaatgatgcataccaggaggttctggatctactgctgccactgaacctggaggtggttgttgagcgcaacctgtgctgggaatggtatcaggaagtgccctgcttcaacgtaaatgctcagttaaaaccaatggagttcatcctatcccaggaggatataacaaccattttcaaaacactgcatggtaacatctggtacgaaaaggatggatcagcctcgcccgcagtgactaaagaccaatatagcgctacctccggcgtgactaccaatgccagtcatcatagcggtggagccactgtcgttacagccgcggtcgtagaggtgcattcgcgggctttactggtaaagacgaccctcaatatttcttttaaaactgacgacctgaccatggtactatactcgccgggaccaaagcaggcaagttttactgatgtgcgggacccctctctcaagctcgccgagttcaagctggagaacatcataagcactttgaagatgtacaccgacggctcaacatttagctcattttcactgaaaaactgcatactggatgataagcgaccgcatgttaagaaggcaacccctaggatgatcggcttgacagtgggctttgacaagaaagatatgatggatattaagtaccggaaggtcagagacggttgcgtcacggacgctgttttccaggagatgtatatctgcgcctctgtggagtttttgcagaccgtagcaaatgtgtttctcgaggcctataccaccggcactgctgtggagacctccgtgcagacgtggactgccaaagaggaagtgcccacgcaggagtcagtcaagtgggagatcaacgtgatcattaagaacccagaaatagtgtttgtcgccgacatgaccaagaacgacgccccagcgctggtcattaccacgcagtgtgaaatctgttataaggggaatcttgagaactctaccatgaccgcagcaatcaaggacttgcaggtccgcgcttgtccgtttctccctgtgaagaggaagggcaagattaccactgtgctgcagccttgcgatctcttctaccagaccacgcagaaggggacagatcctcaggtcatcgacatgagcgtcaagtcactgacccttaaagtctctcccgtcatcataaacactatgattacaatcacatctgccctctacaccactaaggagaccataccagaggagactgcttcatcaacagcccacctgtgggagaagaaggataccaaaacactcaagatgtggttcttagaagagagtaacgaaactgagaaaattgctccaaccaccgaactggttccgaaaggcgagatgattaaaatgaacatcgattctatttttattgtcctcgaagccggaattgggcaccgcacagtgcccatgctgctagcgaaatccagatttagcggggaggggaagaattggtcctctctgattaacctgcactgtcagctcgagctagaagtacattactacaatgagatgttcggcgtttgggagccccttctggagccattggaaatagatcagactgaggatttccgcccctggaacttgggaataaagatgaaaaaaaaggcaaaaatggcaatagtggaaagcgatcccgaggaagagaactacaaagtacccgaatacaaaactgtgatttcattccactctaaggaccaactgaatatcactctcagcaagtgtgggctggtaatgttgaacaacctcgttaaggcattcactgaagccgcgacgggttctagcgccgattttgtgaaggacctggccccatttatgatactcaatagtctgggactcaccatcagcgtctctccatctgattctttctccgttctcaatatccccatggctaagagttacgtgttaaagaatggcgagtcactttcaatggattacattaggactaaagacaatgaccacttcaacgctatgacctctctgagtagtaagcttttcttcattctgcttactcccgtgaaccactccacagcagacaaaataccgctcaccaaagttggcaggcgcctttacaccgtgcggcaccgggagtccggcgttgagcgctccatcgtctgccagatcgacaccgtggaagggtccaagaaagtgacaatccgatcccccgtccaaatccggaatcatttcagtgtgcctctgtcagtgtacgagggcgatacactcctgggcaccgccagcccagaaaacgagtttaatatacctctcggctcttacagatcgttcatattcctgaagccagaagatgagaactaccagatgtgcgagggaattgactttgaggaaattattaagaacgatggggccttgctgaaaaagaaatgtagaagcaagaatccttccaaggaaagcttcctcattaacatcgtgcctgagaaggacaacctcaccagtttgagcgtgtactccgaggatgggtgggatctgccatatattatgcatctttggcctcctattctccttcggaatctgcttccgtacaagatcgcttactatatcgaaggcatcgagaacagtgtttttacactgtcagaaggacattcagctcagatttgcactgcgcagttggggaaggcccggttgcatctaaagctactcgactacctgaaccatgattggaaatcagagtatcacatcaaacctaaccagcaagatatttcttttgtgtccttcacctgcgtcacagaaatggaaaaaacagacctggacatcgccgtgcacatgacctacaacaccggccagactgtggtggcattccattccccgtactggatggttaacaagacaggacgcatgcttcagtacaaggctgacggtatccaccgcaagcaccctcccaactacaaaaagccggtgctctttagcttccagccaaaccatttcttcaacaataacaaggtccagcttatggttacagatagcgagttatcaaatcagtttagtattgatacagtgggatcacacggagctgtcaaatgtaaggggctgaagatggactaccaagttggagttactatcgacctgtcatcatttaacataactagaatcgtcaccttcactcccttttacatgatcaaaaacaaaagtaagtaccatatttccgtggccgaagaagggaatgacaaatggctaagtcttgacttggaacaatgtatccctttctggccagagtacgccagttccaaactgctcatccaggtggaacggagcgaggacccccctaagagaatctacttcaacaagcaagagaactgtattttactcagactcgataacgaattaggcgggatcatcgcagaagtgaacctcgctgaacattccacggttatcacgttcttggactatcacgacggagctgccaccttcttgttgattaatcacaccaaaaacgaactggtccagtataatcaatcttccctgagtgaaatcgaagactctctgccgcccggcaaagcagtattttatacgtgggcggatccagtcggctccagaaggctcaagtggcggtgccggaaaagccatggcgaggttacacagaaggatgatatgatgatgcctatcgatctgggcgaaaagaccatatatctcgtctctttctttgagggattacagcgcatcatattattcacagaagaccctagagtgttcaaagtgacctatgagagcgagaaggcggagctcgctgaacaggagatcgccgtggcgctgcaggacgtggggattagtttggttaacaattacaccaaacaggaagtcgcgtacattgggatcacctcctctgatgtcgtgtgggagacgaagcccaagaagaaagcccgctggaaacctatgagcgtgaagcatacagagaagcttgagcgcgagttcaaagaatacactgaatcttcccccagtgaagataaggtaatccagctggacactaacgtgcctgtccgcctgaccccgaccgggcataatatgaagattctgcaaccccatgtgatagcactgcgccgcaactatctccctgccttaaaggtcgagtacaataccagtgcccaccagtcaagtttccgaatacaaatttatcggattcaaatacaaaaccagatccacggtgcggtcttcccattcgtgttttaccccgtaaaacccccaaagtctgtcaccatggatagcgctcctaagccctttacagatgtgtctattgtgatgcggagcgccgggcattcccagattagcagaatcaagtattttaaggtgctcatccaggaaatggaccttcggctggaccttggcttcatatatgccctgacggatttaatgaccgaagcggaagtgacagagaatactgaggtggagctcttccataaggacatagaagctttcaaagaagagtataagaccgccagtctagtcgaccagtcacaggtctccctctacgaatattttcacatttcgcctatcaaactccacctgtcggtgtcactgagttcaggcagggaagaagcaaaagatagcaagcagaatgggggtctgatcccggtacactcattgaatctcttactaaaatctatcggagcaactcttacagatgttcaagatgtggtatttaaacttgctttcttcgaactcaactatcagttccacacaacaagcgacctgcagtctgaggtaatacgacactatagcaagcaggccatcaaacagatgtatgtgcttattctgggcctggacgtgttaggcaatccttttggtctcatcagagaatttagcgagggcgtcgaagcattcttctacgagccttaccagggggcgatccagggacccgaggaatttgtggaaggcatggcgttggggcttaaagccctcgttgggggggctgttggagggctcgccggggctgcctctaagataaccggggcaatggcaaaaggggtggcagcaatgacgatggatgaggattaccagcagaagaggcgcgaggctatgaataaacaaccagcaggcttccgggagggcatcactcgaggaggtaaagggttggtttcagggttcgtgtccggaattaccggcatcgttaccaagcccattaaaggcgcccagaaggggggcgcggccggcttttttaagggcgtcgggaaggggctcgtgggtgctgtggctcgacccacaggcgggatcatcgatatggccagtagcacatttcaggggatcaaaagagccactgagactagcgaagtggagtctcttagacccccccgattttttaacgaggacggcgtgatacgcccatatagactaagggacggcaccgggaaccagatgctacagaaaattcagttttatcgagagtggataatgacccactccagttcgagcgatgacgacgacgatgacgacgacgatgacgaatctgatctaaatcactag

SEQ ID NO: 185073 - DNA, 9287 bp, Artificial Sequence
  derived and/or modified sequence
atggttttcgagtctgtggtggtagacgtgctgaacagattcctgggggattacgtggtcgatctggacacctctcagttaagcctcggcatctggaaaggggctgttgcccttaagaatctgcagatcaaagaaaatgcgttaagtcagctggatgtccccttcaaggtgaaagtgggacacatcggtaatcttaagctcatcatcccctggaagaatctctacactcagcccgtggaagctgtgctggaggaaatatacctgctgatcgtcccatcctcccgcatcaaatacgatccactaaaggaggagaaacaactcatggaagcaaagcagcaggaactcaagcggatagaggaagccaagcaaaaggtagtggaccaagagcagcacctccccgaaaagcaggatacgttcgccgaaaagttagtcactcagatcatcaagaatctccaggtgaaaatcagctctatccacatcagatatgaggacgatatcacgaatcgcgataaacctctcagcttcggcatttctctccagaatctttccatgcagacgactgatcagtactgggtgccttgcctccacgatgaaacggaaaaattggtgcggaaacttattcgacttgataatctgtttgcatactggaacgtcaagagccagatgttttacctttcagactacgataactcgctggacgacttgaagaatggcatcgtgaatgagaatatcgtgccagagggatatgattttgtgttccgacccatttccgcaaatgccaagctcgtcatgaatagacgatccgattttgatttctcggcacccaagatcaacctggaaatcgagctccataacatcgcgatcgaatttaataagccgcagtactttagcattatggaacttctggagtccgtggatatgatggcacagaatctgccatataggaaattcaagcctgatgtacccttacatcatcatgcgagggagtggtgggcctacgcaattcatggggttctggaggttaatgtgtgtcctagactctggatgtggtcctggaagcatatccgtaagcatcgccagaaggttaaacagtacaaggagctctacaagaaaaaactcacctccaagaaaccgccaggggaacttctcgtcagcttagaggagctcgagaagacattagatgttttcaatatcacgatcgccaggcagaccgccgaagtggaggtgaagaaagctggatacaaaatctacaaagagggtgtaaaagacccagaggacaacaagggatggttctcctggttgtggtcttggagcgaacagaatactaatgagcagcagcctgatgtccaacccgagaccctcgaggagatgctcacaccagaagagaaggctcttctgtacgaggccatcggatactcggaaaccgccgtggatcctactctcctaaagactttcgaggctttaaaattctttgttcacctcaaatctatgagcattgtgctccgcgagaaccaccagaaacccgagctggtagacatagtaatcgaggagttttcaactctcatcgtgcagcggccaggagcccaggcgatcaagttcgagacaaaaatcgactcatttcacatcacagggctgcctgacaacagcgagaaaccgagactcttatcgtcattggatgatgcgatgtccctattccaaattacctttgaaataaatccactggatgagacggtgtcgcagcgttgcattatcgaagcggagccccttgagattatttatgatgcacgaactgtaaactccattgtcgagttctttaggccgccaaaggaggtgcaccttgcgcagcttacggcggctactctcactaagctggaggaatttcgtagtaagacagccaccgggctcctttatataatcgaaacacagaaggtgctggatcttaaaatcaatctgaaagcgagctacatcatagtcccacaggacggaattttttcgcccacaagcaatcttttactccttgacttaggacacttaaaggttacgtccaaaagtaggtcagagctcccagacgtaaaacagggagaagccaacttgaaagaaattatggacagagcctatgatagttttgatatccagctcacaagcgtgcaactgctctacagccgtgtgggcgataattggagagaagccagaaaactgtcggtgtcgacccaacatatcttggttccaatgcattttaacctagaactctcaaaggctatggtctttatggatgtcaggatgcccaaatttaagatttacggaaaactgccattgatctctctgcggattagcgataagaaactgcaggggattatggaactgatcgagagtattcccaagccggaacctgtgacagaagtctccgcccctgtcaaaagcttccaaatacagacctctacttctttaggcacctcacaaatctcccaaaagatcatacctctgctggagctgcctagcgttagtgaggatgacagcgaggaggagttcttcgatgcaccttgtagcccgctggaggaacctctccagtttcctactggtgtcaaatccattcggactagaaaactccagaagcaggactgctctgtcaacatgactacttttaaaattcgattcgaggttcccaaggtgttaatagaattttaccaccttgttggcgattgtgagctgtcagttgtcgaaatcctggtcctcgggttaggcgcagagattgaaatccgcacctatgatctgaaggccaacgcattcttaaaagaattttgcctgaaatgccctgagtaccttgatgagaacaagaaacctgtttacttagttaccacgctggacaacaccatggaagatctgctgacccttgagtatgtcaaagctgaaaaaaatgtccccgacctcaaatcaacatataacaacgtgctgcagctaattaaagttaacttcagttctctagatattcacttacataccgaggccctcttaaatactatcaattacctacataacatcttgccacagagcgaggagaaatcggcacctgtcagtaccaccgagaccgaggataaaggtgacgtgattaagaaacttgccttgaaacttagtacgaatgaggatatcatcacgctgcagatccttgccgaactgtcctgcctacaaatattcatacaagaccaaaagtgcaatatttctgagatcaaaatcgaaggtcttgacagcgaaatgatcatgaggccgtccgaaaccgagattaatgcaaagctcagaaatattatagtactggactctgatataaccgccatctataagaaggccgtgtatatcaccggcaaggaagtcttttcgttcaagatggtctcgtatatggacgctactgcgggtagtgcatatactgatatgaacgttgtcgacatccaggttaatttgatcgtgggatgcatcgaggtggtatttgtgacaaagttcctgtattccattctggcctttattgataactttcaggctgccaagcaggcgttagccgaggccaccgtgcaggctgcaggaatggcagccactggagttaaagagctggctcaacgctcatccagaatggccctcgacatcaatattaaagctccggttgtggtcattccccagtctcctgtaagtgaaaacgttttcgttgcagacttcgggctcatcacgatgacaaacacatttcacatgatcactgagtcccagagcagccctccacccgtcatcgacctgattaccataaaactctctgaaatgcgactgtaccgcagtcgatttattaacgacgcgtaccaggaggttctggacctgttgttgcccctcaacctggaggtggtcgtggagaggaacctgtgctgggagtggtatcaggaggtgccttgttttaacgtgaacgcacaactgaagcctatggagtttatactctcacaggaggatattactaccatatttaaaacactgcatggtaatatctggtacgagaaagacggtagcgcctcacccgcagtgactaaggatcagtactctgccaccagcggggtgacaacgaatgccagtcatcacagcggaggtgcaactgttgtgacagccgctgtcgtcgaggtccattcacgagccctactagtgaaaaccacgctgaatatttccttcaaaactgacgacctcacaatggtgctatacagcccaggcccaaagcaagccagttttacagacgttagggatccttcactgaaactcgccgaatttaaactcgaaaacattatctctacgctcaaaatgtacactgacggcagtaccttctcatcattctccctgaagaattgcatcttggacgataagagaccacacgtgaaaaaagccacacccagaatgattggtttgaccgtggggttcgataagaaggatatgatggacataaagtaccgcaaggtgcgcgatggctgtgtcactgatgccgtctttcaagagatgtacatctgtgcatccgtggaatttctccaaacagtggctaatgtctttttggaggcatacactaccggcaccgccgtggagaccagtgttcaaacctggactgccaaagaggaggtccctacccaggagtctgttaagtgggagatcaacgtcatcatcaagaacccagaaattgtcttcgtggcagatatgactaagaatgacgctccggcactcgtgatcacaacacagtgcgagatttgctataaaggaaacctagagaactctactatgacagcagccatcaaggacctgcaagtgagagcctgcccctttctcccagtgaaacgtaaaggcaagatcaccaccgttctccaaccctgtgatctgttttaccaaaccacacagaagggtacagacccccaggtgatagacatgtctgtgaaatcgctcactttaaaggtgagccccgtcataataaatacaatgattacaatcacttccgccttgtatacaaccaaagagacaatccctgaggaaacagcctcttccacagcacacctatgggagaagaaggacaccaagacactgaagatgtggtttctggaagaatcgaatgagacagagaaaattgctcctacgaccgaactggttcctaaaggcgaaatgatcaagatgaacatcgacagtatctttatcgtccttgaagcaggtatcggacatcggacagtgcccatgctactggcgaaatcccgtttttccggagagggaaagaactggagttcactgatcaatcttcactgccagctggagctagaggttcactactataacgaaatgttcggcgtttgggagcccttgctggagccactcgagatcgatcaaacagaggatttccgcccttggaacttgggcattaaaatgaagaagaaagctaagatggccatagtggagagcgatcctgaggaggaaaattataaggtacctgagtataaaacagttatatccttccactccaaggatcagttaaatattaccctttcaaagtgcggtcttgtgatgctgaataacctggtgaaggcttttacggaggccgcaacgggaagctccgccgatttcgtgaaggacctcgctcctttcatgatcctcaattccctcggcttgactatatccgtgtcgccctcagacagcttctctgtcctcaatataccaatggctaagagctacgttctcaagaacggggagtcactgtccatggactatatcagaacaaaggataatgatcactttaatgccatgaccagtcttagcagcaagctgtttttcatcctgcttacaccggttaatcactcaacagcggacaagattccactgacgaaagtgggcaggcgactatatacagtcaggcatagggagagcggcgtggagagaagtatcgtttgccagatcgatacagtcgaaggctctaaaaaagtcaccatacggagccccgttcagatcagaaatcatttctctgtgccgctctccgtttatgagggagataccctccttggtacggcttcccctgagaacgaattcaatatccctctgggtagctaccgaagcttcattttcctgaagccagaggacgaaaattaccaaatgtgtgaaggtatcgactttgaagaaattatcaagaacgatggcgctctcctgaagaagaaatgccgctcaaaaaatccaagcaaagagagctttctgatcaacatcgtgcctgagaaagacaatctgacgtccctttccgtttactccgaagatggatgggatctgccctacatcatgcatctgtggccgccaattctgctgcggaaccttcttccctacaaaatcgcctactatattgaaggcatcgagaatagcgtatttacattatcggagggccacagcgcacaaatctgcaccgctcagcttggaaaggcgagactgcacctgaaactgctggattatctcaatcatgactggaaatcagaataccacatcaaacctaaccaacaggatatctccttcgtttcatttacttgcgtgaccgagatggagaaaactgatttggacattgccgttcacatgacttacaataccggacaaactgtcgtcgcctttcattctccatactggatggtcaacaaaaccgggaggatgctgcagtataaagccgacgggatccaccgcaagcacccccctaactataagaaaccagttctgtttagttttcaacccaatcattttttcaataacaataaggtgcaactgatggtgactgactccgagctgtcaaatcagtttagcatcgacaccgtgggctcacatggtgcggttaagtgcaagggcctgaagatggattatcaggtcggggtcaccatcgatctctcatctttcaacattaccagaatcgttactttcaccccattttatatgatcaagaacaagtctaaataccatatcagcgtcgctgaggagggaaacgataagtggctgtccctggacctggagcagtgtatcccgttctggcctgagtacgcatcgtctaagctgttgattcaagtagaacgcagcgaagacccccctaagcggatttatttcaataaacaggaaaactgtattcttctgcgcctcgataacgagcttgggggtatcatcgctgaggtaaatctggctgagcattcaaccgtcataacctttttggattaccatgatggcgctgccaccttcctgcttatcaaccacacgaagaatgagctggtgcaatataaccagagtagcctctccgaaatcgaagactcactgccaccgggtaaagcagtgttttatacttgggccgacccagtgggatcacgtcgcctgaaatggagatgccgaaaaagccacggagaggtaactcagaaagacgacatgatgatgccgatcgatctgggcgaaaaaaccatttatctggtatccttcttcgaaggcctgcaacgcattattctgttcacagaggaccccagagtctttaaggtaacgtacgagtctgagaaggctgaactggccgaacaggagatcgcggtggctctccaggacgtgggaatcagccttgtcaacaattacacaaagcaagaggtggcatatatcgggatcactagcagcgatgtcgtttgggagactaagcccaaaaaaaaggccagatggaaacctatgtccgtaaagcatacggaaaaattagagcgtgagtttaaggaatataccgagagttcaccatccgaagacaaagtcatccaacttgacaccaatgtgcctgtgagactgacccccactgggcacaacatgaaaatattgcagccccacgtaattgccttgcgcagaaactatctgcctgctctaaaagtagagtacaacacctcggcacatcagtcaagctttagaattcagatttaccggattcagatacagaaccagatccacggcgctgtgtttccgttcgtcttttacccagtgaaaccacccaaatccgtgaccatggactccgcacctaagccctttaccgacgtgtcaattgtcatgcggtccgctgggcactcgcaaatctctaggatcaaatattttaaagttttgatccaggaaatggacctgcgacttgacctgggctttatttacgctcttaccgatttgatgactgaagctgaggttacggagaacaccgaggtagagctgtttcataaagatatcgaggctttcaaggaggagtataaaaccgcctctttggttgatcaatcccaggtgtcactttatgagtactttcacatatctccaatcaagctccacttgtccgtgtctctcagctctggacgggaggaagccaaagactccaagcagaatggagggctgataccagtgcactcactgaatcttctgctgaagagcataggtgccacactgacagacgtacaggacgttgttttcaagttggctttttttgaattgaattatcagtttcatacaaccagcgatctgcagtccgaagttatcaggcactactcaaagcaagccatcaaacagatgtatgtgctcatactcgggctcgacgtgctgggaaaccctttcggcctgatcagagagttttctgaaggcgtggaggctttcttttatgaaccttaccaaggggctatccaggggccagaggagtttgtcgaggggatggccctggggctcaaagcattggtgggcggtgcagtgggcggtttggccggagcagcatcaaaaatcacaggcgctatggcaaagggtgtggcagccatgaccatggatgaggattatcaacagaagcgcagggaagctatgaataaacagcccgctggtttcagagaagggattacccgaggcggaaagggattggtttccggctttgtcagtgggattaccggcattgtcactaagccaattaagggagcacagaagggcggagctgccggattttttaagggcgtcggcaaaggcttggttggagccgtcgctaggccaaccggaggaattattgatatggccagctccaccttccaaggtattaagagggcaacagaaacctcagaagtggaatctctacgcccacccagattttttaatgaagacggagtaatacgcccataccgcctgagggacggcaccggcaaccagatgctacagaagattcagttttacagagaatggataatgacccactccagtagtagtgatgacgacgatgacgacgatgacgacgatgaatcagacctcaatcacta

SEQ ID NO: 185074 - DNA, 9967 bp, Artificial Sequence
  derived and/or modified sequence
gcctccgtctctcgctgggctcgctagggctgcgcgttgggccagcgggggcgccgcagctgaagccgccccggagccggtgaaccgaattacctcgagggaggggcgtggggaaggcggcgggaggaggagcgcacgggccggctgccgtgcccaccacggctgaggaacatggttttcgagtcggtggtcgtggacgtgttgaaccggttcttgggggactatgtggtggacttggacacgtcccagctctctctgggcatctggaaaggagctgtggccctcaagaatcttcaaattaaagaaaatgccctgagtcaactggatgtaccatttaaagttaaagttggtcacataggtaatcttaaacttataattccatggaaaaacctttatactcaacctgttgaagccgtattggaagaaatttatttacttatagtgccttcttctagaataaaatatgatcctttaaaagaagagaaacaactcatggaagcaaagcaacaggaactgaaaagaatagaagaagcaaaacaaaaagtagttgatcaagaacaacatctgccggaaaaacaggacacttttgcagaaaaattagttacacagatcataaaaaatcttcaggtgaaaatttccagtatccatattcgttatgaagatgatatcacaaatcgggacaaaccgctgtcatttggtatttcccttcaaaatctgagcatgcagacaactgatcaatactgggttccatgtttacatgatgaaactgagaaactggttcgtaagttaatccgattggataacctgtttgcctattggaatgtgaagtctcagatgttttatcttagtgattatgataactccttggacgacttgaagaatggcattgtcaatgaaaatattgttccagaaggttatgattttgtatttcgtcccatatctgctaatgccaaacttgtgatgaatcgccgatctgattttgacttttctgcccccaaaataaacttggaaattgagttacataacatagcaattgaatttaataaaccacagtatttcagtattatggagcttcttgaatcagttgatatgatggcacaaaatctgccatataggaagttcaaacctgatgtgcctcttcaccaccatgccagagaatggtgggcttatgctatacatggcgttcttgaagtaaatgtttgccccaggttatggatgtggtcatggaagcatattagaaaacataggcaaaaagtgaagcaatataaagaactgtataaaaaaaagttaacaagtaagaagccacctggtgaacttctcgtgtctttggaggagttggaaaaaaccttggatgtctttaatataactatagctagacagacggcagaagttgaggtaaagaaagctggatacaaaatttacaaagaaggagtaaaagatccagaggataataaagggtggtttagctggctatggtcttggtcagaacaaaatactaatgaacagcaaccagatgttcaacctgaaactcttgaagaaatgttgacacctgaagaaaaagctttactctatgaagcaattggctatagtgaaacagcagttgatccaactttactaaaaacatttgaagccttgaagttttttgtccacttgaaaagtatgtctattgttctaagagaaaatcatcaaaaacctgagctggtagatattgtaatagaagaatttagcaccttaattgtgcaaagaccaggagcacaagcaataaaatttgaaactaaaatagattcatttcatattactggcttaccagataattcagaaaaaccccgcctcctgtcttcattggatgatgcaatgtcacttttccaaattacatttgagataaatccattagatgaaactgtttctcagaggtgtatcatagaagctgaacctttagaaatcatatatgatgcaaggacagtgaatagtatagtggaattcttcagacctccaaaagaggtacatctagcacagctcactgcagcaactttgacaaaactggaagaatttcgcagtaagacagcaacaggtctactgtatattattgaaacacagaaagttcttgatctcaaaattaatttgaaggcttcatatattattgtcccacaagatggaatttttagtcctacatcaaatctgcttcttttggaccttggtcatctaaaggtgacgagtaaaagtcgttctgaattaccagatgtgaaacaaggtgaggccaatcttaaagagataatggatagagcttatgattcatttgatattcaacttacaagtgtacagctgctttacagtagagttggtgataattggagagaagcacgaaaactcagtgtatctacccagcatattttggtacccatgcacttcaatttggaactgtctaaggccatggttttcatggatgtaaggatgcccaaattcaagatttatggaaagttacctcttatttctttacgaatctcagataaaaaactacaagggattatggaattgattgaaagcattccaaaacctgaaccagtaactgaagtatctgcccctgtcaaatcattccagattcaaacatctacttctttgggaacatcacagatttcacagaaaataattcctctcttggaacttccatctgtttctgaagatgattcagaggaggaattttttgatgcaccatgtagtcccttggaagaacctcttcagtttccaactggagttaaaagtattcgaaccagaaagttacaaaagcaggattgttcagtaaatatgactacatttaaaataagatttgaagtaccaaaggttttgatcgagttttatcaccttgttggagattgtgaactatctgtggtagaaattcttgttttaggattgggtgcagaaattgagattagaacatacgatttgaaagcaaatgcctttttgaaagagttctgcttaaaatgcccagaatacttggatgaaaacaagaaaccagtttatttggttacaaccctggataacacaatggaagacctgttaacgctggaatatgtaaaggctgaaaagaatgtacccgacttgaaaagtacctataacaatgttttacaattgattaaggtaaatttttcctctttggatattcatttacacactgaagcacttctgaatacaataaattatcttcataatatccttccgcaatcagaggaaaaatcagccccagtgtccactacagagactgaagacaaaggagatgtcattaaaaaattagctttaaaactatccacaaatgaagatatcattactttgcagattttagcagaattatcgtgtttacagatctttattcaagatcagaaatgtaacatttctgaaattaagattgaagggcttgattctgagatgattatgaggccttcagaaactgaaataaacgcaaagctaaggaatataattgttttagattctgatataacagctatatacaaaaaggctgtttatatcactggaaaagaagttttcagcttcaaaatggtttcttacatggatgcaactgctggttctgcatacacagatatgaatgtggttgacattcaggttaatttaatagttggttgcattgaagtagtttttgtcacgaaatttctatattctatattggcttttatagataattttcaggcagctaaacaagccttggctgaggcaactgttcaggcagctggaatggctgctactggtgtaaaagaactcgcacaaaggagttccagaatggcactggatattaacatcaaagccccagttgtggtcatcccgcagtctccagtttctgaaaatgtttttgttgctgattttggactaattacaatgacaaatacctttcatatgataacagagagccagagctctcccccacctgttattgatttgataacaataaagctgagtgaaatgcgactatacagatctcgatttattaatgatgcataccaggaagtactggatctactcctgccattaaatcttgaggttgtggttgaacgaaatttatgctgggagtggtaccaggaagttccttgttttaatgtaaatgctcagctgaaaccaatggagttcattcttagtcaagaagatataacaactatttttaaaacattgcatggcaatatatggtatgaaaaagatggtagtgcctcacctgctgtaacaaaagaccaatacagtgccactagtggagttactactaatgcttcacaccattcaggaggagcaactgtggtgacagctgctgtggtagaagtacattcacgtgccttactagttaagacaacactaaacataagcttcaaaactgatgatctcaccatggtgctgtatagtccaggtcctaaacaggcttcctttacagatgttcgtgatccttctctgaaacttgctgaatttaaattggagaatattataagtactttaaaaatgtatacagatggctcaacattttcttccttctcattaaaaaactgtattttagatgataaaagacctcatgtcaagaaagcaactcctcgaatgataggactgacagttggttttgacaaaaaagacatgatggatataaagtacaggaaagtcagagatggttgtgtgactgatgcggtctttcaagaaatgtatatttgtgcaagcgtagaatttctgcagactgttgcaaatgtctttcttgaggcctacaccacaggcactgctgtagaaaccagtgtgcaaacatggactgctaaggaagaagtacctacacaggaatcagtgaagtgggaaattaatgttattattaaaaatcctgaaattgtgtttgtagctgacatgacaaaaaatgatgctcctgctttagtcattacaacacaatgtgaaatttgctataaaggtaaccttgaaaatagtacaatgactgctgccattaaagatctccaagtgagagcctgcccgtttcttccagtcaagagaaaaggcaaaatcactactgttttgcagccctgtgacttgttttatcaaactactcagaaaggtacagatccacaagtgatcgatatgtcagtaaaatccctgacactaaaggtttcaccagttattataaatactatgattaccataacttcagcactgtatacaactaaggaaaccatcccagaagaaacggcttcttctactgcacatttatgggaaaagaaggatacaaagactttaaaaatgtggtttcttgaagaatcaaatgaaactgaaaaaatagctcccacaactgaattggtacccaaaggcgagatgataaaaatgaacattgattctatttttatagttcttgaggctggaattggtcatagaacagtacctatgcttctggcaaagtcacgtttttcaggggaaggcaaaaactggagttccctaataaatctgcactgtcagcttgagctagaagtgcattattataatgaaatgtttggtgtatgggagcctttgcttgaacccttagaaattgatcagactgaggattttagaccatggaatcttggtatcaagatgaaaaagaaagcaaaaatggccattgttgagtcagatcctgaagaagaaaactacaaagtgccagaatataaaactgtcatcagtttccattcaaaagaccaattaaacattacattatccaaatgtggtcttgtaatgttaaacaatttagtcaaggcatttacagaagctgccactggatcttcagctgacttcgtaaaggatctagcaccatttatgattttaaattcccttggacttactatttctgtttcgccaagtgattcttttagtgtactcaacattcctatggcaaaatcatatgtattgaaaaatggagaaagtttaagtatggattatatccgaaccaaggacaatgatcatttcaatgcaatgaccagcctaagcagcaaactcttcttcattcttcttacacctgttaaccattctactgctgataagattcctttaacaaaagtgggacgacgtctgtacactgtaagacacagagagtctggcgttgaaagatctattgtttgtcaaattgatacagtagaaggaagtaagaaggtcacaattcgctccccagtgcagataagaaatcatttttcagtcccactgtctgtttacgaaggggataccttattgggaactgcctcacctgaaaatgaattcaacataccattaggatcttaccgatcattcatttttctgaagccagaagatgagaactatcaaatgtgtgaaggaattgactttgaagagattataaaaaatgatggtgctcttctaaagaagaaatgtagatctaaaaacccttctaaggaatcatttctcattaatattgttccagaaaaagataatttaacatctctatcagtgtattcagaagatggttgggatttaccatacataatgcatttgtggccacctatcctgctccgaaatcttcttccttacaaaattgcttattatatagagggaattgaaaattcggtttttactctaagtgaaggacattcagcccagatttgtactgcacagttgggtaaagccaggctacatttaaaattacttgactatctcaatcacgattggaaaagtgaatatcacataaagcctaatcagcaagacattagttttgtcagttttacttgtgttacagaaatggaaaagactgatttagatattgctgtccatatgacttacaatactggtcagacagttgtggcatttcatagtccttattggatggtcaataaaactggccgcatgttacagtacaaagcagacggaattcatcgaaagcatccacctaattataaaaagccagttctcttttcttttcagccaaatcacttttttaataacaataaggttcaacttatggtaactgatagtgagttgtccaatcagttttcaattgatactgttggtagtcatggagctgttaaatgtaaaggcctgaaaatggactatcaagttggtgtcactatagacctgagcagttttaacattactagaattgtgacatttacccctttttatatgattaaaaacaaaagcaaataccatatatcagtggctgaagaaggaaatgataaatggctctctcttgatttggagcagtgtatccccttttggcctgagtatgcttctagtaaacttcttattcaagtcgaaaggagtgaagatcctcccaaaaggatatattttaacaagcaggaaaattgtattctattgcgtctagataacgagcttggaggtattatagcagaagtgaatttggccgagcattctacagttattacatttttagattatcatgatggagcagctacattcctcttaataaatcacacaaagaatgaacttgttcaatacaatcaaagttctctcagtgaaatagaagattccctccctcctggtaaagccgtgttttatacatgggctgatccggtgggctctagaaggctgaagtggagatgtagaaaaagccatggtgaagtaacacagaaggatgatatgatgatgcctatagatttgggggaaaagacaatatatttagtttcattctttgaaggtttacaacgcattattttattcactgaagatccaagggtatttaaagtaacatatgaaagtgagaaagcagagttagcagagcaagaaattgcagtggcattacaagatgttggaatttctcttgtcaacaattacacgaagcaagaagtagcctatataggcattacaagttctgatgtggtttgggaaacaaagcccaagaagaaggcaagatggaagccaatgagtgtaaagcacactgagaagttagagagagaatttaaggaatatactgaatcttctccttcagaagataaggttattcagttggacactaatgttccggttcgcctaacccctactggtcataacatgaaaattctgcagccgcatgtaatagctctacgaagaaattatcttccagcattaaaagtggaatataacacatctgcacatcaatcatcatttagaattcagatttacagaatacagatccaaaatcagatacatggtgctgtatttccctttgtgttttatcctgttaaacctccaaagtcggtcaccatggattcagcaccaaagccctttacagatgtcagtattgtcatgagatctgcaggacattcccagatatcacgtattaagtatttcaaagtattgattcaagaaatggatctcaggttagatcttgggtttatctatgctttaacagaccttatgacagaagctgaggtgactgaaaatacagaggttgagctttttcataaagatatagaagctttcaaagaagaatataaaacagcctcattagtagatcaatcacaagtcagcctctatgaatattttcatatatctcctatcaagttacatttaagtgtttcactgagttccggcagagaagaagctaaagattcaaaacaaaatggaggactgattccagttcattctttaaatcttttgctgaagagtattggtgccacactgacagatgtacaagatgtagtttttaagcttgcattttttgaactcaactatcagttccatacaacatccgatctacagtctgaagtcataagacactattcaaaacaggccattaagcagatgtatgtactcattcttggacttgatgttttgggaaatccatttggcttaattagagaattttctgaaggtgtagaagcatttttttatgaaccttaccagggagccatccagggtcctgaagagtttgtggaaggaatggcactaggacttaaggcactagttggtggagctgttggtggattggctggtgctgcctccaaaatcaccggtgctatggctaagggggtagcagctatgaccatggatgaagactaccaacagaagagaagagaagccatgaataagcaaccagctggttttagagaaggcatcactcgtggaggaaaaggcttagtttctggatttgttagtggcataacaggaattgttacaaaaccaatcaaaggagctcaaaaaggaggagcagctggtttctttaaaggtgttgggaaaggtttagtaggagcggtagcaaggccaactggaggcatcatagacatggctagcagtacatttcagggaataaaaagagctacagagacttctgaagtggagagtctgcgacctcctcggttcttcaatgaagatggagttatcagaccgtacaggttgagggatgggactggaaatcaaatgttacagaaaattcaattctacagggagtggattatgactcacagtagcagtagtgatgatgatgatgatgatgatgatgatgatgagtcagatctaaaccattaaaattcatatgttctttattttacttggaatgtttcattaacatgttttgtatgacttataccataatgcccatatgtccatttatagggaggtaaaacacattttcttttaaaatgttttcctacacattttcataaagcaaaataattgtattatttaagcacagaaaaaaatgtatcttacatccaaagtagggagggcatccaacatattatagatttgcttttatatattttatagctttgtattgcatagtttgtctttaagagttcaagttagacttaaatataattttgatgttcactggttttattttaaattgccttcttatttgttagcaaaatgcctttttttaatggtctctgtaaattttctgggctttaatgtaatgccactgtgtaaaaaaaaaggaagaaaatagtaatagccatttaatgttttatatttatcattttaaagatatttttgtcaaatttcttttaataataataaacatatgtaatctaaa

SEQ ID NO: 185075 - protein, 926 aa, Artificial Sequence
  derived and/or modified sequence
MVMADGPRHLQRGPVRVGFYDIEGTLGKGNFAVVKLGRHRITKTEVAIKIIDKSQLDAVNLEKIYREVQIMKMLDHPHIIKLYQVMETKSMLYLVTEYAKNGEIFDYLANHGRLNESEARRKFWQILSAVDYCHGRKIVHRDLKAENLLLDNNMNIKIADFGFGNFFKSGELLATWCGSPPYAAPEVFEGQQYEGPQLDIWSMGVVLYVLVCGALPFDGPTLPILRQRVLEGRFRIPYFMSEDCEHLIRRMLVLDPSKRLTIAQIKEHKWMLIEVPVQRPVLYPQEQENEPSIGEFNEQVLRLMHSLGIDQQKTIESLQNKSYNHFAAIYFLLVERLKSHRSSFPVEQRLDGRQRRPSTIAEQTVAKAQTVGLPVTMHSPNMRLLRSALLPQASNVEAFSFPASGCQAEAAFMEEECVDTPKVNGCLLDPVPPVLVRKGCQSLPSNMMETSIDEGLETEGEAEEDPAHAFEAFQSTRSGQRRHTLSEVTNQLVVMPGAGKIFSMNDSPSLDSVDSEYDMGSVQRDLNFLEDNPSLKDIMLANQPSPRMTSPFISLRPTNPAMQALSSQKREVHNRSPVSFREGRRASDTSLTQGIVAFRQHLQNLARTKGILELNKVQLLYEQIGPEADPNLAPAAPQLQDLASSCPQEEVSQQQESVSTLPASVHPQLSPRQSLETQYLQHRLQKPSLLSKAQNTCQLYCKEPPRSLEQQLQEHRLQQKRLFLQKQSQLQAYFNQMQIAESSYPQPSQQLPLPRQETPPPSQQAPPFSLTQPLSPVLEPSSEQMQYSPFLSQYQEMQLQPLPSTSGPRAAPPLPTQLQQQQPPPPPPPPPPRQPGAAPAPLQFSYQTCELPSAASPAPDYPTPCQYPVDGAQQSDLTGPDCPRSPGLQEAPSSYDPLALSELPGLFDCEMLDAVDPQHNGYVLVN

SEQ ID NO: 185076 - DNA, 2781 bp, Artificial Sequence
  derived and/or modified sequence
atggtgatggcggatgggccccggcatttgcagagaggccccgtgcgggtgggattctacgatatagagggaactctcggcaagggaaatttcgccgttgtgaagctggggcggcaccgtatcactaagaccgaggttgctatcaagatcattgataagtctcagcttgatgctgtcaacttggagaagatttaccgagaggtgcagatcatgaaaatgctggaccacccgcacataatcaaactgtatcaagtcatggagaccaagtccatgctctatctggtcactgagtatgcaaagaatggcgaaatctttgactaccttgctaatcatggcaggctcaatgagagcgaggcgcggcgcaaattttggcaaatactgtcagcggtcgattactgtcacggacgcaaaattgtccacagggatctgaaggctgaaaacctcttattggataataatatgaacataaagattgccgatttcggtttcggcaacttcttcaagagcggagagctgctagcaacctggtgcggatcccccccttatgccgccccagaggtgtttgaagggcagcagtatgaaggtccccagttggatatttggtccatgggtgttgtgctgtacgtgctagtgtgcggggctctgcctttcgacggccccacgctgccaattttgcgccagcgtgtgctcgaaggaaggttcagaattccatattttatgtcagaagactgcgagcaccttattagacgcatgctggtcctcgacccttctaagcgtctgaccatcgcccagataaaggagcataaatggatgctgattgaagtgcccgttcagagacctgtcttatacccgcaggaacaggaaaatgaaccttctataggggagttcaacgagcaggtgcttaggctcatgcacagcctgggtattgaccagcaaaaaactatcgaatcgttacagaacaagagctataaccatttcgccgctatttactttctgcttgtggagcggctgaaaagccacagatctagcttccccgtggaacagagactggacggcaggcaacgacgcccaagcaccatcgccgagcagaccgtagccaaagcccagacagtgggactccctgtgacaatgcactctccaaatatgagactcctgcggtcagcgctgctcccgcaggcctcgaacgttgaggcatttagttttccagcctctggctgccaggccgaggctgcttttatggaagaggaatgtgtggacacaccaaaagtgaacggttgcctactggaccccgtgcccccagttctcgttcgaaagggatgccagtccctgccatcaaacatgatggagacttccattgatgagggactggaaaccgagggcgaggccgaggaagatcccgcacacgcttttgaggcctttcagtccacacggtcaggacaaagacgtcacaccctatccgaggtcactaatcagctggttgtgatgccgggggccggcaaaatcttcagcatgaatgattccccttccctggattctgtggactctgagtatgatatgggttcagtacaacgcgatctcaatttccttgaagacaatcctagcctcaaggatatcatgctggcaaatcagccctctccgcgaatgactagccctttcatcagccttaggccgaccaatcccgccatgcaggccttgagcagccaaaagcgggaggtccacaacagaagtcccgtaagctttagggagggaagacgggccagcgatacttccctgactcaggggattgttgcttttaggcagcatctgcagaatctggcccgcaccaaagggattttggagctgaataaggtccagctgttatacgagcagattgggccagaagcagacccaaacctggctcccgcagcaccccagcttcaggatttagccagctcatgcccgcaagaagaggtctcccagcaacaggagtctgtgagcactctgccagccagcgttcaccctcagttgtctccacgccaaagcttagaaacacagtacttgcagcacaggctgcaaaaaccatctctgctttccaaggcccaaaatacatgccagctgtactgtaaggagccacctagatccctggaacagcagctgcaagaacatcgattgcagcagaagcggctctttctgcagaagcagagccagctccaggcttactttaaccaaatgcagatagctgaaagcagttacccacagccaagccagcagctgccactgcctcgccaggagacacctccccccagtcagcaggcccctcctttcagtctcacgcaaccactctccccagttctggaaccttccagcgaacaaatgcagtattcgcccttcctaagccagtaccaggagatgcagttgcagccgctgcctagcaccagtggaccccgcgccgcccctcctctacccactcagctgcagcagcaacagcctccgccacccccacctcctccacctcctcgacagccaggggccgctcctgctccactccagttctcttatcaaacttgtgagctgccttccgccgccagtcctgcccccgactatcccacgccgtgccagtatccagtggatggcgcgcagcagagcgacctaactgggcccgattgcccccgatcaccaggtttgcaggaagcaccgtcatcctacgaccccctcgccttgagcgaattgcccgggctctttgactgtgagatgctggatgctgtcgatccccagcataacggctacgtgcttgtcaattag

SEQ ID NO: 185077 - DNA, 2781 bp, Artificial Sequence
  derived and/or modified sequence
atggtgatggctgatggccccaggcacctgcagaggggccctgtgcgggtgggcttctatgacatcgagggcaccctgggcaagggcaactttgctgtggtgaagctgggccgccaccgcatcaccaagacagaggtggccatcaagatcatcgacaagagccagctggatgctgtgaacctggagaagatctaccgggaggtgcagatcatgaagatgctggaccacccccacatcatcaagctgtaccaggtgatggagaccaagtccatgctgtacctggtgacagaatatgccaagaatggagagatctttgactacctggccaaccacggccgcctgaatgaaagtgaggcccggaggaagttctggcagatcctgtctgctgtggactactgccacggcaggaagatcgtgcaccgggacctgaaggccgagaacctgctgctggacaacaacatgaacatcaagattgctgactttggatttggaaacttcttcaagtctggagagctgctggccacctggtgtggcagccccccctatgctgcccctgaggtgtttgagggccagcagtatgagggcccccagctggacatctggagcatgggcgtggtgctgtatgtgctggtgtgtggggccctgccctttgatggccccaccctgcccatcctgcggcagagggtgctggagggccgcttccgcatcccctacttcatgtctgaggactgtgagcacctgatccggaggatgctggtgctggaccccagcaagaggctgaccatcgcccagatcaaggagcacaagtggatgctgattgaggtgcctgtgcagaggcctgtgctgtacccccaggagcaggagaatgagcccagcattggagagttcaatgagcaggtgctgcggctgatgcacagcctgggcatcgaccagcagaagaccatcgagagcctgcagaacaagagctacaaccactttgctgccatctacttcctgctggtggagcggctgaagagccacaggagcagcttccctgtggagcagaggctggatggccggcagaggcggcccagcaccatcgccgagcagacagtggccaaggcccagacagtgggcctgcctgtgaccatgcacagccccaacatgaggctgctgcggagcgccctgctgccccaggccagcaatgtggaggccttctccttccctgccagcggctgccaggccgaggccgccttcatggaggaggagtgtgtggacacccccaaggtgaatggctgcctgctggaccctgtgccccctgtgctggtgaggaagggctgccagagcctgcccagcaacatgatggagaccagcattgatgagggcctggagacagaaggagaggccgaggaggaccctgcccacgcctttgaggccttccagagcaccaggagcggccagaggaggcacaccctgtctgaggtgaccaaccagctggtggtgatgcctggggccggcaagatcttctccatgaatgacagccccagcctggacagcgtggacagtgaatatgacatgggctctgtgcagagggacctgaacttcctggaggacaaccccagcctgaaggacatcatgctggccaaccagcccagccccaggatgaccagccccttcatcagcctgcggcccaccaacccagccatgcaggccctgagcagccagaagcgggaggtgcacaacagaagccctgtgtccttccgggagggccggcgggccagtgacaccagcctgacccagggcatcgtggccttccggcagcacctgcagaacctggcccggaccaagggcatcctggagctgaacaaggtgcagctgctgtatgagcagatcggccctgaggccgaccccaacctggccccagctgccccccagctgcaggacctggccagcagctgcccccaggaggaggtgtcccagcagcaggagagcgtgtccaccctgcctgcctctgtgcacccccagctgagcccccggcagagcctggagacccagtacctgcagcaccggctgcagaagcccagcctgctgagcaaggcccagaacacctgccagctgtactgcaaggagccccccaggagcctggagcagcagctgcaggagcaccggctgcagcagaagaggctcttcctgcagaagcagagccagctgcaggcctacttcaaccagatgcagattgctgagagcagctacccccagcccagccagcagctgcccctgccccggcaggagaccccaccacccagccagcaggccccacccttcagcctgacccagcccctgagccctgtgctggagcccagcagcgagcagatgcagtacagccccttcctgagccagtaccaggagatgcagctgcagcccctgcccagcaccagcggcccccgggccgccccacccctgcccacccagctgcagcagcagcagcccccacctcctcctcctcctcctccaccccggcagcctggagctgccccagcccccctgcagttctcctaccagacctgtgagctgcccagcgctgccagccctgccccagactaccccaccccctgccagtaccctgtggatggagcccagcagagcgacctgaccggccctgactgccccaggagccctggcctgcaggaggcccccagcagctatgaccccctggccctgtctgagctgcccggcctgtttgactgtgagatgctggatgctgtggacccccagcacaacggctacgtgctggtgaactag

SEQ ID NO: 185078 - DNA, 2781 bp, Artificial Sequence
  derived and/or modified sequence
atggtgatggccgacggcccccggcacctgcagcggggccccgtgagggttggattttatgatattgagggcactttaggcaagggcaactttgccgtcgtgaagctgggtcgccacagaattaccaaaaccgaagtggccatcaagataatagacaaatcgcagctggatgctgtcaacttggagaaaatctacagagaggtgcagattatgaaaatgctggaccatccgcacattataaagttataccaggtgatggagacaaagtccatgctctacttagtaactgagtatgcgaagaatggagagatttttgactatcttgctaatcacggcagacttaacgaatcagaagcaagacggaagttttggcaaatcctgtccgctgtagattactgtcatgggcgcaaaatcgtccaccgcgacctgaaagccgaaaatctcttactcgataacaacatgaacatcaaaatcgctgactttgggttcggtaacttcttcaaatccggggagttgctggcaacttggtgtgggagcccaccttatgcagcccccgaggtcttcgagggtcagcagtacgagggaccccaacttgatatatggtcaatgggcgtcgttctttatgttcttgtatgtggagccctgccttttgacggtcccaccctgcccattttgcgccagcgggtgttggaaggcaggttccgtatcccctattttatgtcggaagattgcgaacatctaatccgtagaatgttggtgctcgacccttctaagcgcctgacaatcgcgcaaatcaaggagcataagtggatgctcatcgaggttccggtgcagcgtccagtactgtacccacaggaacaggaaaacgagccaagtattggcgaattcaacgagcaagtactgaggttgatgcatagcctcggcatcgatcagcaaaagactatcgaatcgctgcagaacaaatcatataatcatttcgctgccatctacttcctgctcgtggaaagactcaaatcacatcgctcctcattccccgtggagcagagactagatgggagacagcggagacccagcaccatcgccgagcagaccgtagcaaaggctcagaccgtgggcttgcccgtcaccatgcactcccccaatatgcggttactgaggtcagccctgctgccacaggctagtaacgtggaggccttttcgtttccagccagcggctgtcaagccgaagctgcgtttatggaggaagaatgtgttgacacccctaaggtgaacggatgcctacttgatccggtgcctcccgtgctcgtccggaagggctgtcagtcactgccctcaaacatgatggagaccagtatcgacgagggactggagacagagggggaagcggaggaggatcctgcacacgctttcgaggcgtttcagagcacgcgttccggacagcggaggcacaccctgtccgaagttactaaccagctggtagtgatgcccggcgccggcaaaatcttttctatgaatgactccccaagcctggattccgtcgattcggagtacgacatgggttccgtccagcgggatctgaacttccttgaggataatccaagtttgaaagatatcatgcttgccaaccagccctcacctcgcatgaccagcccattcatatctctccgccccaccaaccccgccatgcaggctctatctagtcaaaaacgtgaagtgcataaccgatccccagtatctttcagagagggccgacgcgcctcagatacatccctcacacagggcatcgtagcttttagacagcacctccagaatctagctcggaccaagggaatccttgagctgaacaaggttcagctcctctatgaacagattggacctgaagctgatcctaatcttgcacccgctgctccacagctgcaggatttggcttcttcttgtccgcaggaggaggtttcacagcaacaggagtccgtcagcaccctgcctgcttcggtccacccccaactctccccaaggcaaagcctcgagactcaatatttgcagcaccgactgcaaaagcccagtttgctgagcaaagcccagaacacttgtcagttgtactgcaaagaacctccacgcagcctcgaacagcagctgcaggaacacagacttcaacagaagcgtctctttctgcagaaacagtcccagctccaggcatacttcaaccagatgcagattgctgagagctcttaccctcaaccctcacagcagttaccactacctaggcaagagaccccaccaccctcccagcaggcccctccattctcccttacccagccactctcgccggtcttagaaccgtcatccgaacagatgcaatattcacctttcctgagccaatatcaggagatgcagttacagccactgccaagcacgagtggccccagggccgcaccacccctccctacacaactccagcagcagcaacctccccccccacctccaccccctcctccccgacagcccggggccgcccccgctccactgcagtttagctatcagacctgtgagctgccgtccgccgcgagccccgcgccagactaccctacaccatgccagtacccagtggatggcgcccagcagtccgatctgaccggaccggattgcccgcgatcacctggcttgcaagaagcaccctcctcatacgatcccttagctctgagtgaactccccggtctgtttgattgcgagatgcttgatgcagtcgatcctcagcacaacggctacgtgctggtgaattag

SEQ ID NO: 185079 - DNA, 2781 bp, Artificial Sequence
  derived and/or modified sequence
atggtgatggcagacgggcctaggcaccttcaacgcggaccagtgagagtgggcttttacgacatcgaaggtacactggggaaggggaactttgctgtagtaaagcttggcaggcatagaataacaaaaacagaggtcgccattaagatcatagataaatcgcagctggacgctgttaatttggagaaaatttatagagaagtccagatcatgaagatgctggaccatccacatatcattaagctctatcaggtaatggaaacaaagtccatgctgtaccttgtgaccgagtatgcaaaaaacggcgagatcttcgattatctggcaaaccacggcaggttaaacgagagtgaagctcgccgtaaattctggcagattctcagcgccgttgactactgtcacgggagaaagatcgtgcatcgagatctgaaagctgagaatttgctcctcgacaataacatgaacattaagatcgcggacttcggattcggcaacttttttaagtctggcgaactgctggcaacctggtgcgggagcccaccttatgcagcaccggaggtgttcgaagggcaacagtacgagggtccccagctggatatctggtccatgggcgttgtgttatatgtgctcgtctgtggggcactcccgttcgatggccctaccctccccatactccgccagagggttcttgaaggcaggttcaggatcccctatttcatgagcgaagactgcgagcatctgatccgccgaatgctggttctggatccatctaaacgcttgaccatcgcccaaataaaagaacataagtggatgctgatcgaagtgcctgtgcagcgccctgtgctgtacccgcaagagcaggagaacgagccgtccatcggagagttcaacgagcaggtgctgcgcctgatgcacagtttgggaatcgaccagcagaaaacgattgagtcattacagaataagagctacaaccattttgccgcaatctactttctgttagtcgagagacttaaatctcatcggagttcctttccagtcgagcagagactcgacgggaggcaacgtcgtccgtctactattgcggaacaaacagtggctaaagcccagaccgtcggcctgccagtgactatgcatagccctaacatgcgattgttgcgcagcgccctgctaccacaggccagcaatgtggaggccttttcttttccggcatctggttgccaggccgaggccgcttttatggaggaggagtgcgttgatacccctaaggttaacgggtgcctgttggatcccgtgcccccagtgctagtaagaaagggctgtcaatcactcccttccaacatgatggagacaagtatcgacgaggggctagaaaccgagggggaggctgaagaagaccccgcacatgcgtttgaggccttccagtccacacgcagcggtcagcggcgtcatacactgagcgaggtcacgaatcaactggtggtcatgccaggtgccggaaaaattttctcaatgaatgacagtccctcactggactcagttgatagcgagtatgatatgggttccgtgcagcgagatttgaattttctcgaggacaacccaagcctcaaagacatcatgctagctaatcaaccatcacctagaatgacctccccgtttatatccctcagaccaacaaatccagcaatgcaggctttgagcagccagaagcgtgaggtccacaacaggtctcccgtgtccttccgcgaaggacgccgtgctagcgacactagccttacgcagggtatagtcgcctttcggcagcacctgcagaacctggccaggaccaaagggattcttgaactcaataaagtgcaattgctgtacgagcaaatcggtcctgaggctgatcccaatttagcccctgccgctccccaactacaggatttggcctcatcttgcccgcaggaagaagtcagccaacagcaggagtcagtgagtacgctgcctgcctccgttcatccccagctgagccctaggcagagtctggagactcagtacttacaacatcgactgcaaaagccctcacttttgagcaaggcccagaatacctgccaactatactgcaaggagccaccccgaagcctcgaacagcagctgcaggaacatagactgcagcagaagcgactttttctccagaagcagagtcaactccaggcctatttcaaccagatgcaaattgctgaatccagctacccacagcctagccagcaactcccgctgccgaggcaagagacgccgcctccttcccaacaagcccctcctttttccctgacacagccattgagccccgtgctcgagccatcatctgagcagatgcagtacagtccatttctatcccagtatcaggagatgcaactgcagcccctgccttccactagcggacccagggctgcgccacctctgcctacacagttgcagcagcagcagccaccaccgcctccaccaccccctcctcctaggcaaccaggcgcagcacccgctcccctgcagtttagttatcaaacgtgcgaactccctagtgcagcaagcccagcacctgactacccgacgccttgccagtatccagtcgatggtgctcagcagagtgacctcacgggaccagattgtcctcgctcacccggactgcaagaggcgccttcctcttacgatcctttagctctctctgagcttccaggcttattcgattgcgaaatgctcgacgcagtggacccgcagcacaatggttacgttttagtgaattag

SEQ ID NO: 185080 - DNA, 9678 bp, Artificial Sequence
  derived and/or modified sequence
gacgtcggcgcacgtcagcggcggcgcgcgcctggctgggccctggggagcgggagggaaggagcgaaggagcgaaggagcaagcggagcggccgtcgcccaagccaagccgcgctgccaaccctcccgcccgcccgcgctcctgtccgccgtgtctagcagcggggcccagcatggtcatggcggatggcccgaggcacttgcagcgcgggccggtccgggtggggttctacgacatcgagggcacgctgggcaagggcaacttcgctgtggtgaagctggggcggcaccggatcaccaagacggaggtggcaataaaaataatcgataagtctcagctggatgcagtgaaccttgagaaaatctaccgagaagtacaaataatgaaaatgttagaccaccctcacataatcaaactttatcaggtaatggagaccaaaagtatgttgtaccttgtgacagaatatgccaaaaatggagaaatttttgactatcttgctaatcatggccggttaaatgagtctgaagccaggcgaaaattctggcaaatcctgtctgctgttgattattgtcatggtcggaagattgtgcaccgtgacctcaaagctgaaaatctcctgctggataacaacatgaatatcaaaatagcagatttcggttttggaaatttctttaaaagtggtgaactgctggcaacatggtgtggcagccccccttatgcagccccagaagtctttgaagggcagcagtatgaaggaccacagctggacatctggagtatgggagttgttctttatgtccttgtctgtggagctctgccctttgatggaccgactcttccaattttgaggcagagggttctggaaggaagattccggattccgtatttcatgtcagaagattgcgagcaccttatccgaaggatgttggtcctagacccatccaaacggctaaccatagcccaaatcaaggagcataaatggatgctcatagaagttcctgtccagagacctgttctctatccacaagagcaagaaaatgagccatccatcggggagtttaatgagcaggttctgcgactgatgcacagccttggaatagatcagcagaaaaccattgagtctttgcagaacaagagctataaccactttgctgccatttatttcttgttggtggagcgcctgaaatcacatcggagcagtttcccagtggagcagagacttgatggccgccagcgtcggcctagcaccattgctgagcaaacagttgccaaggcacagactgtggggctcccagtgaccatgcattcaccgaacatgaggctgctgcgatctgccctcctcccccaggcatccaacgtggaggccttttcatttccagcatctggctgtcaggcggaagctgcattcatggaagaagagtgtgtggacactccaaaggtcaatggctgtctgcttgaccctgtgcctcctgtcctggtgcggaagggatgccagtcactgcccagcaacatgatggagacctccattgacgaagggctggagacagaaggagaggccgaggaagaccccgctcatgcctttgaggcatttcagtccacacgcagcgggcagagacggcacactctgtcagaagtgaccaatcaactggtcgtgatgcctggggcagggaaaattttctccatgaatgacagcccctcccttgacagtgtggactctgagtatgatatggggtctgttcagagggacctgaactttctggaagacaacccttcccttaaggacatcatgttagccaatcagccttcaccccgcatgacatctcccttcataagcctgagacctaccaacccagccatgcaggctctgagctcccagaaacgagaggtccacaacaggtctccagtgagcttcagagagggccgcagagcatcagatacctccctcacccagggaattgtagcatttagacaacatcttcagaatctggctagaaccaaaggaattctagagttgaacaaagtgcagttgttgtatgaacaaataggaccggaggcagaccctaacctggcgccggcggctcctcagctccaggaccttgctagcagctgccctcaggaagaagtttctcagcagcaggaaagcgtctccactctccctgccagcgtgcatccccagctgtccccacggcagagcctggagacccagtacctgcagcacagactccagaagcccagccttctgtcaaaggcccagaacacctgtcagctttattgcaaagaaccaccgcggagccttgagcagcagctgcaggaacataggctccagcagaagcgactctttcttcagaagcagtctcaactgcaggcctattttaatcagatgcagatagcagagagctcctacccacagccaagtcagcagctgccccttccccgccaggagactccaccgccttctcagcaggccccaccgttcagcctgacccagcccctgagccccgtcctggagccttcctccgagcagatgcaatacagccctttcctcagccagtaccaagagatgcagcttcagcccctgccctccacttccggtccccgggctgctcctcctctgcccacgcagctacagcagcagcagccgccaccgccaccaccccctccaccaccacgacagccaggagctgccccagcccccttacagttctcctatcagacttgtgagctgccaagcgctgcttcccctgcgccagactatcccactccctgtcagtatcctgtggatggagcccagcagagcgacctaacggggccagactgtcccagaagcccaggactgcaagaggccccctccagctacgacccactagccctctctgagctacctggactctttgattgtgaaatgctagacgctgtggatccacaacacaacgggtatgtcctggtgaattagtctcagcacaggaattgaggtgggtcaggtgaaggaagagtgtatgttcctatttttattccagccttttaaatttaaagcttattttcttgccctctccctaacggggagaaatcgagccacccaactggaatcagagggtctggctggggtggatgttgcttcctcctggttctgccccaccacaaagttttctgtggcaagtgctggaacatagttgtaggctgaggctcctgcccttcggtcgagtggagcaagctctcgagggcagcactgacaaatgtgttcctaagaagacattcagacccaggtgttatgcaggattacatccgtttattatcaagggcaaccttggtgaaagcagaaagggtgtgtgctattgcatatatatgggggaaaaggcaatatatttttcactgaagctgagcaaccacatattgctacaaggcaaatcaagaagacatcaggaaatcagatgcacaggaaataaaggaaagctgtgctttgtcattgaatcctaagttcttagctgctgatgcaagttgtcccccaaggccatcacaaagcagtggggcatgagctgtgtttcaggggccactaaataacagctggtactgaccccagaaaccgccttcatctccattcggaagcaggtgacacaccccttcagaaggtgccctgggttgccgagtgtcagaatatactcaggactccagaggtgtcacacgtggaactgacaggagacccgccaccgtggaggcagggggcaagaaactcaagaacgcatcaagagcaccagccctgggccagggaagacaggctcttcctgcagtttctcgtggacactgctggcttgcgggcagtcggtctccagggtacctgttgtctcttttccgatgtaataactactttgaccttacactatatgttgctagtagtttattgagctttgtatatttggacagtttcatatagggcttagagattttaaggacatgataaatgaacttttctgtcccatgtgaagtggtagtgcggtgcctttcccccagatcatgctttaattctttcttttctgtagaaaccaacagtttccatttatgtcaatgctaaatccaaagtcacttcagagtttgttttccaccatgtgggaatcagcattcttaatttcgttaaagttttgacttgtaatgaaatgttcaagtattacagcaatattcaaagaaagaaccacagatgtgttaaccatttaagcagatcatctgccaaacattatattactaataaaacttaaccaacacttacaattcagtcatcaaagtaagtaaaaattagatgctacagctagctaactgtatccctagaaatgatgaataatttgccatttggacagttaacatccaggtgttacaaagtcagtgttaattctaaagatgatcatttctgccctttagaatggcttgtcccatcagcagatgaatgtgttaagcacaaagcatcttccttaaagcacaaagagagggactaactgatgctgcatctagaaaacacctttaagttgcctttcctctttgtagttagcgttcaggcaggtgacgtgtggaaagtctagggggttccattctggccatgcgagcccagctcctaccaacgtcggtaacttgagcagtccctgttgctggccagagactgcctggtcgccagcgctcaccatgggtgccaggatgcttcgcagaggcactgtgctcacggttggacttggtgtcagtgggaaagggcagtgtggggactgtcatttttgtgatttaataacacacagtgaaaatccaggaagaatgaattaagcttcttctgggagttgtttattcctgctcgtgcttaagattgatgatttcgtgaaataaagaacatcatttcatttaagagatcatttcattaagatctctaatctgttttgagtctttacaaaatagccagttataaaatggggcttgatttgtttagactgaaggaagacgttttcccaaaatatactacagaagtgctacaatatttgcgatattaaaatgcctgcagattgaaaatgggggccactcatttcagaactgcaggaatggtgtagttacagatcgacataaactcctgccccccaacaatgccatgagctgcttagcccaggagacctgggagctatggcaggacggttaggccagccgatgagggactgcagagaggctactggaaggttaaggacccagagagaaatcgagaggtgccctacagcagccaggcctatcaggatccgtcacacacggcagcggcgtggacaccggcctgatgcagagcgtgacccctcctgctgggacctgtgttgtaagctcctatttgcttatcttgtttatttcaagcagaaatcaataaattccataaccctctgtattgactgcaatgtaagctgctgaggagactggttctgttggtcagtcaggtgtttgctcagccctgtctgatcacctgtgctgctctgtccctaactagtgacccatggaagcttccaagcagttttctcttcatcactactaacaaacaaaacactaagaaggcttagtatcgctctttttctgcggggctactctgaagtactgacttgctttccagtctgattcacgttagcagtgtgtacactactgtatcatcatcagcttcatcaccctgtaaaccaggctcctctgaagagactttggtgagatgaacgtgaggtaaaaatttcgttcggcaaaaagtgcaatatgtgtggtactttattttttatgttctttttttaaatctggggtattagtctgtgctttgggagaaatgcactagctctgcaattcccagctgggcaagtgtgtctctagtatctccacgcaactgatacactggtccctgtaaggcaaacagcatgttagcccgacaggaagagggggcccactttcacattcccggtgacactgaccgtccccagctgccccctcgccacctctgcctgcactgccttctgtcaccgtgggaaaaggaggctgatggttctctacaccatccaccttgagaatccctgcgtgggagagcatcagggcccaccaggggagtggggatggggctcaggggctgttcatgcccatctgagcaaaccccttctctcttccatccacttttgcctcctaggaaagaaaaagtcagtggccctttcttcctcagatatcaagaactcccaagtgtttaaaccgtatgctggagtcagtggttgggacagacaggagcccaagactgaagccagcccttgcctcttgtgtcccttcccaactctggtgctggagtaatggggtgctctgcattttgatggggagcaaggggggaccccccctgtaggagtatcggcctctcccctgccccctaccctctctcgtggaccaaagtctccagcagaagagactcatcataagactgacgactcccccacctccacccacacaccgagtgtcatcagtcctaaaggcagggaaacgctcacagaattctgcccacgggttagatgtggggagaaggatattctcagctccagagtgattaggtgatcagccagaaactaaggcaaggtgacaagcagcagcctggagtcacagttggtcccaggcgtgtgggcactaagcagcctctggagacatgcgggcagttgaggatgcaaggacacagtgagtgagtggcgctcctttttggggtcctccagcctctagtcaagccccaggttcgtaaatatgtttgtattacattttaaaacctgtatcaacagtcacatttaagctccctattggtttaaagaaaattcatactccaggtaactttttcccattcgacctcctatagagacaatatgcagtgtgtcatttcacagtctcagtccctgtgaacagtggctgacaccggtgccagggctgacctgctacactcaaactcctaaactgggctgcctctaactgcctcctgggaagccacccgagccactcggtctctttgtgcctaaacatgaaaggtgaaaattggagaacagggaagctcgtaagttggagtcattgtacaggcagggatctttgatcattttgttgcttctggaatttatttaattttttttttttttgagacagagtctcgctctgtcacccaggctggaatgcagtggcgtgatttcagctcactgcaacctccacctcctgggttcaagccattctcctgcctcagcctcccaagtagctgggactacaggtgtgtgctaccgcatccagctagtttgtatatttttagtagagatggggtttcaccatgttgtccaggctgatcttgaactcctgacctcaggtgacccacccaccttggcctcccaaagtactgggattacaggtgtgagccaccacacccgacctggaatttttttatagaacttatcttcagagcaatgtatgaaagacaagagcagtatcagccgggcgcggtggctcacgcctgtaatcccaacactttgggaggccaaggcaggcggatcacgaggtcaggagattgagaccatcctaacacagtgaaacgccgtctctactaaaaatacaaaaaattagccgggcgtggtggtgggcgcctgtagttccagctactcgggaggctgaggcaggagaatggcgtgaacccgggaggtggagcttgcagtgagccaagatcgtgccactgcactccagcctgggcgacagagcaagactccacctcaaaaaaaaaaaaaaagacaagagcagtatcatctgcctctgtttctaaactggacaaagagattttcttaaagtttctatcatctcccttctgacaggttctacagtgtggtctgaagcacctgtaatgtcagagcccttgtctggcccttggtggcaggtgaacgaaagcagtggagcctctcaccttccagtagcctctcacattcttattttaccatttttgtcctaattaaggtagcctagctgattctagaagacagccatcctacgtgcacccccaccttgtgtccacatcttctccaggcaggtttcaacctatcagcagactcaggcacacactggggcacagatagagaaccaggcggcagcagtgctcgcagacccacccagggagagctgtgatgggttctgcccagatactctgctcgcccacccacaagggagcaatagcttatatttgtacattagttttaccaagcactttctcttctaaccctcacaacaattctatgaaattagctggggagatactgtccttatttttcacagctgaagaaaccaaagctttgggaagtttgtgacttctctgagatcacagctggtgatagaaggagctgggacacgcgcttgggttgactggcttctggttttggttctctggcttctagtgctggaagaagccctctctttcccttctctttcctcagtagcatctgactcttttcataagcaaacagctgtataaacaaagcccccattttggtcaagcacagggtgaatgtgatattgttcccacaaccttattctccactcaacagccgcctggctttggggaagaggccgccttcaggtgacagtgcagctgtccaggtggccgtgcactgaaccaggctgagggagacaaaaaccccgcagacccgcctgcctttcagcgtccagttaactgcagaagtttaggctcacctcaaagatgtctagtttttccaagttacaatacagcagtttcctacagaacacccccttcctcaattgccaaggggccgcatcgcacggcatcaggccaccactgcaggccagcagattccaccccaggaacggtcatgaactcagcctttgtctcaacgaggggcgtaacatttccttacagtcaagccccatcaactagaagtgcttattacttttaggattaaaaaagtaataacagactttgacttaatactctgtcttttcagaggcaaagtgggtgggtagaggggagctttaaaaatagaagtacaaaacaacatcctggaaacatatgaccccagatggaataatgtcacattccccagtgcagataatgggctgctgctggctctgtggtgtctgtctgcagaagatttgctcagtcaaggaaattcaagtggtgagacctttccaccatgggtggtaagagaaacctgccttcaccaaaatctctgaaggggaaagaagtggagagaaaggtttgcttcacttcggggactgcagtttgagaaataaaagggatacagagatatctgcactttgtagaaagggcaagattatttgcttatatctgaagggaggtgggtggttttgctggatgtttggtctgaaagagttacttttgataaagttaatctaactgtagttatattttctgtgtgcttttttttaattactaagaaaaaaattggtgagttcagtagctttggtattatgagtgcaaatcataatagctccaatgtgaaaaaaaaaatcaaaagtataacttgtcacttaatgttagaaaattgcctaaaatgcagtgtaataaataatctctgtaccaaatagtaatttaaatggggtaattttctgcaaggaaaatgtactgtttttatgtttccaaccctcttgaattaaaataaaaacaacttcttttctaa

SEQ ID NO: 185081 - DNA, 2781 bp, Artificial Sequence
  derived and/or modified sequence
atggtgatggccgacggccccagacacctgcagagaggccccgtgagagtgggcttctacgacatcgagggcaccctgggcaagggcaacttcgccgtggtgaagctgggcagacacagaatcaccaagaccgaggtggccatcaagatcatcgacaagagccagctggacgccgtgaacctggagaagatctacagagaggtgcagatcatgaagatgctggaccacccccacatcatcaagctgtaccaggtgatggagaccaagagcatgctgtacctggtgaccgagtacgccaagaacggcgagatcttcgactacctggccaaccacggcagactgaacgagagcgaggccagaagaaagttctggcagatcctgagcgccgtggactactgccacggcagaaagatcgtgcacagagacctgaaggccgagaacctgctgctggacaacaacatgaacatcaagatcgccgacttcggcttcggcaacttcttcaagagcggcgagctgctggccacctggtgcggcagccccccctacgccgcccccgaggtgttcgagggccagcagtacgagggcccccagctggacatctggagcatgggcgtggtgctgtacgtgctggtgtgcggcgccctgcccttcgacggccccaccctgcccatcctgagacagagagtgctggagggcagattcagaatcccctacttcatgagcgaggactgcgagcacctgatcagaagaatgctggtgctggaccccagcaagagactgaccatcgcccagatcaaggagcacaagtggatgctgatcgaggtgcccgtgcagagacccgtgctgtacccccaggagcaggagaacgagcccagcatcggcgagttcaacgagcaggtgctgagactgatgcacagcctgggcatcgaccagcagaagaccatcgagagcctgcagaacaagagctacaaccacttcgccgccatctacttcctgctggtggagagactgaagagccacagaagcagcttccccgtggagcagagactggacggcagacagagaagacccagcaccatcgccgagcagaccgtggccaaggcccagaccgtgggcctgcccgtgaccatgcacagccccaacatgagactgctgagaagcgccctgctgccccaggccagcaacgtggaggccttcagcttccccgccagcggctgccaggccgaggccgccttcatggaggaggagtgcgtggacacccccaaggtgaacggctgcctgctggaccccgtgccccccgtgctggtgagaaagggctgccagagcctgcccagcaacatgatggagaccagcatcgacgagggcctggagaccgagggcgaggccgaggaggaccccgcccacgccttcgaggccttccagagcaccagaagcggccagagaagacacaccctgagcgaggtgaccaaccagctggtggtgatgcccggcgccggcaagatcttcagcatgaacgacagccccagcctggacagcgtggacagcgagtacgacatgggcagcgtgcagagagacctgaacttcctggaggacaaccccagcctgaaggacatcatgctggccaaccagcccagccccagaatgaccagccccttcatcagcctgagacccaccaaccccgccatgcaggccctgagcagccagaagagagaggtgcacaacagaagccccgtgagcttcagagagggcagaagagccagcgacaccagcctgacccagggcatcgtggccttcagacagcacctgcagaacctggccagaaccaagggcatcctggagctgaacaaggtgcagctgctgtacgagcagatcggccccgaggccgaccccaacctggcccccgccgccccccagctgcaggacctggccagcagctgcccccaggaggaggtgagccagcagcaggagagcgtgagcaccctgcccgccagcgtgcacccccagctgagccccagacagagcctggagacccagtacctgcagcacagactgcagaagcccagcctgctgagcaaggcccagaacacctgccagctgtactgcaaggagccccccagaagcctggagcagcagctgcaggagcacagactgcagcagaagagactgttcctgcagaagcagagccagctgcaggcctacttcaaccagatgcagatcgccgagagcagctacccccagcccagccagcagctgcccctgcccagacaggagacccccccccccagccagcaggccccccccttcagcctgacccagcccctgagccccgtgctggagcccagcagcgagcagatgcagtacagccccttcctgagccagtaccaggagatgcagctgcagcccctgcccagcaccagcggccccagagccgccccccccctgcccacccagctgcagcagcagcagccccccccccccccccccccccccccccccagacagcccggcgccgcccccgcccccctgcagttcagctaccagacctgcgagctgcccagcgccgccagccccgcccccgactaccccaccccctgccagtaccccgtggacggcgcccagcagagcgacctgaccggccccgactgccccagaagccccggcctgcaggaggcccccagcagctacgaccccctggccctgagcgagctgcccggcctgttcgactgcgagatgctggacgccgtggacccccagcacaacggctacgtgctggtgaactag

SEQ ID NO: 185082 - protein, 1216 aa, Artificial Sequence
  derived and/or modified sequence
MAGAQPGVHALQLKPVCVSDSLKKGTKFVKWDDDSTIVTPIILRTDPQGFFFYWTDQNKETELLDLSLVKDARCGRHAKAPKDPKLRELLDVGNIGRLEQRMITVVYGPDLVNISHLNLVAFQEEVAKEWTNEVFSLATNLLAQNMSRDAFLEKAYTKLKLQVTPEGRIPLKNIYRLFSADRKRVETALEACSLPSSRNDSIPQEDFTPEVYRVFLNNLCPRPEIDNIFSEFGAKSKPYLTVDQMMDFINLKQRDPRLNEILYPPLKQEQVQVLIEKYEPNNSLARKGQISVDGFMRYLSGEENGVVSPEKLDLNEDMSQPLSHYFINSSHNTYLTAGQLAGNSSVEMYRQVLLSGCRCVELDCWKGRTAEEEPVITHGFTMTTEISFKEVIEAIAECAFKTSPFPILLSFENHVDSPKQQAKMAEYCRLIFGDALLMEPLEKYPLESGVPLPSPMDLMYKILVKNKKKSHKSSEGSGKKKLSEQASNTYSDSSSMFEPSSPGAGEADTESDDDDDDDDCKKSSMDEGTAGSEAMATEEMSNLVNYIQPVKFESFEISKKRNKSFEMSSFVETKGLEQLTKSPVEFVEYNKMQLSRIYPKGTRVDSSNYMPQLFWNAGCQMVALNFQTMDLAMQINMGMYEYNGKSGYRLKPEFMRRPDKHFDPFTEGIVDGIVANTLSVKIISGQFLSDKKVGTYVEVDMFGLPVDTRRKAFKTKTSQGNAVNPVWEEEPIVFKKVVLPTLACLRIAVYEEGGKFIGHRILPVQAIRPGYHYICLRNERNQPLTLPAVFVYIEVKDYVPDTYADVIEALSNPIRYVNLMEQRAKQLAALTLEDEEEVKKEADPGETPSEAPSEARTTPAENGVNHTTTLTPKPPSQALHSQPAPGSVKAPAKTEDLIQSVLTEVEAQTIEELKQQKSFVKLQKKHYKEMKDLVKRHHKKTTDLIKEHTTKYNEIQNDYLRRRAALEKSAKKDSKKKSEPSSPDHGSSTIEQDLAALDAEMTQKLIDLKDKQQQQLLNLRQEQYYSEKYQKREHIKLLIQKLTDVAEECQNNQLKKLKEICEKEKKELKKKMDKKRQEKITEAKSKDKSQMEEEKTEMIRSYIQEVVQYIKRLEEAQSKRQEKLVEKHKEIRQQILDEKPKLQVELEQEYQDKFKRLPLEILEFVQEAMKGKISEDSNHGSAPLSLSSDPGKVNHKTPSSEELGGDIPGKEFDTPL

SEQ ID NO: 185083 - protein, 232 aa, Artificial Sequence
  derived and/or modified sequence
AGAQPGVHALQLKPVCVSDSLKKGTKFVKWDDDSTIVTPIILRTDPQGFFFYWTDQNKETELLDLSLVKDARCGRHAKAPKDPKLRELLDVGNIGRLEQRMITVVYGPDLVNISHLNLVAFQEEVAKEWTNEVFSLATNLLAQNMSRDAFLEKAYTKLKLQVTPEGRIPLKNIYRLFSADRKRVETALEACSLPSSRVEKANEAAKSEQSCGKAPPKHFHLHFIKQNKMLEP

SEQ ID NO: 185084 - DNA, 3651 bp, Artificial Sequence
  derived and/or modified sequence
atggctggcgcacaacctggcgttcatgccctgcagctgaagcctgtgtgcgtgtccgatagtttgaaaaaagggacaaaattcgtgaaatgggacgatgactccacaattgtaacccccatcatcttaaggacagatccacagggcttcttcttctattggactgatcaaaataaagaaacagaactgctggacctatcactagtcaaggacgcccggtgcggcaggcacgccaaggccccaaaggatcccaagctacgagagttactggatgttggcaacattggccgactggagcagcgcatgatcaccgtcgtgtatgggcccgatctcgtaaatatatcacacctgaacttggttgccttccaagaagaggttgccaaggagtggaccaacgaggtcttttcactggctaccaacctcctggcccagaacatgagcagggatgctttcttggagaaagcctacactaaactgaagttgcaggtgactccagaaggcagaattcctctgaagaacatctaccgcctgtttagcgccgatcgcaagagggtggaaacagcacttgaagcatgcagtctcccaagctccaggaatgattccattcctcaggaggacttcaccccagaagtgtatcgggtcttccttaacaatctgtgtccccgccccgagattgataatattttctcggagttcggcgccaagagtaaaccctacctgaccgtcgatcagatgatggactttatcaacctgaaacagcgcgatccaagattgaacgagatcctctatcctccactgaagcaagagcaagtgcaggtgttgatcgaaaagtacgaacctaacaattctctggctagaaagggccagatctccgttgacggcttcatgaggtacctctccggcgaggagaacggcgttgtctctccagaaaaactggatctaaacgaggacatgtctcagccccttagccactacttcatcaactccagccataatacctatttgaccgccggtcagctggctggtaattcgagcgtggagatgtataggcaggtgttgctcagcggatgtcgatgtgtcgagctggattgttggaagggcagaacagctgaagaagaaccggtgataacccacggtttcaccatgaccacggagatcagtttcaaggaagtcattgaagcaattgctgaatgtgctttcaagacatccccatttcccatcctgctgagcttcgaaaaccacgtggactcccctaagcagcaagcaaagatggcagaatactgtcgtttgatcttcggtgatgctctcctgatggagcctctggagaagtaccccctcgaatctggggtgccgttgccttctcctatggatttaatgtataagattctggtgaagaacaagaagaagtcacataagtcttccgaaggctcaggtaagaaaaaactgagtgaacaagcttctaatacctattcagactcttcctctatgttcgaacccagttcaccaggcgccggggaagccgataccgagagtgatgatgatgatgacgacgatgactgtaagaagagcagcatggacgagggcacagctggaagcgaggccatggccactgaagaaatgagcaaccttgtcaactacatacaacccgtaaaattcgagtcctttgagatttctaaaaagcgtaacaagagttttgagatgagctcatttgtcgagacaaaaggcctggaacagcttaccaagagtcctgtcgaatttgtcgagtataacaaaatgcaactctctagaatatacccaaaaggcacacgagttgactcctcaaactatatgcctcagctgttctggaacgctgggtgccagatggtagccctgaatttccagaccatggacttggctatgcaaattaatatgggcatgtatgaatacaacggaaaatcaggttaccgcctcaaacccgagttcatgcggaggcctgataaacacttcgatccttttacggagggaattgtggacggaatcgtggctaatacactgtcagtgaagataataagcggacagttcttaagtgataagaaggtaggtacatacgtagaggtcgacatgttcggattgcctgtggacacgcgtcgtaaggccttcaaaacaaaaacgagtcagggcaacgcagtcaatccggtgtgggaagaggaacctatcgttttcaaaaaagtcgttctgcccaccctggcatgccttcgcatcgctgtgtacgaagagggtgggaagttcatcgggcatcgaattctgccagtgcaagccattagaccaggataccattacatctgcctgagaaacgagagaaaccagccactgacactccccgccgttttcgtctatatcgaggtaaaggactacgttccggacacatacgcagacgtgattgaagcattatccaatcccatacgctacgtaaatctgatggaacagagagccaaacaactggcagctcttaccctggaagatgaggaggaggttaaaaaggaggcagaccccggagagacaccatctgaagcacccagcgaggcgcggactacaccggccgaaaacggggtgaaccacacaacaactcttacgcccaagccaccgtcgcaggccctgcatagtcagccagcgccaggatctgtgaaggcccctgcgaagaccgaggatcttatccagagcgtccttacggaggtagaagcacagacgattgaagaattaaagcaacagaaaagcttcgtaaagttgcagaaaaagcattacaaggagatgaaggatcttgtgaagcgtcaccacaaaaagactacagatttgattaaagaacatactactaagtacaatgagatccaaaacgactacctgcgacgcagggctgctctggaaaaaagcgcaaagaaagattctaagaagaaatcagaaccctcctcaccagatcacggctcttccacaatcgaacaggaccttgccgctctggatgccgagatgacccagaagcttattgatttgaaagataagcagcagcagcaactcctgaatcttcggcaagagcaatactattctgaaaagtaccaaaaaagagaacacattaaactgctcatacagaagcttacagatgtggcagaggaatgccagaacaaccaattgaagaagctgaaagagatttgcgagaaggaaaaaaaagagctgaaaaaaaagatggacaagaagcgccaggaaaagatcaccgaagcgaagtccaaagacaaaagtcagatggaagaggaaaaaaccgagatgatccgcagttatattcaagaagttgtccagtatataaagagacttgaagaagcccagtcaaaacgacaggagaagctggtggagaaacacaaagaaatccggcagcagatattggacgaaaagccaaagctgcaggtggagcttgagcaggagtatcaagataagttcaaacgactccccctcgaaatcctggaattcgtgcaagaggccatgaaggggaaaatcagcgaggacagcaatcacggatctgctccactgagtctctcgtcggaccccggaaaagtgaaccataagacacctagctccgaagagctggggggcgacatccctggaaaggaattcgacaccccactgtag

SEQ ID NO: 185085 - DNA, 3411 bp, Artificial Sequence
  derived and/or modified sequence
actcaggatccaaaactgagggagctcctcgacgtggggaacatcggtcgcctggagcagcggatgatcacggtcgtgtatggacctgatctggtcaacatcagtcatctgaatctggtggctttccaggaagaggtggctaaggagtggaccaatgaggtcttttccctggccaccaaccttcttgctcagaatatgtcccgagatgcattcctcgagaaagcctataccaagttaaaactccaggtgacacccgaggggagaattccgcttaaaaatatataccgcctgtttagtgctgataggaaacgggtggaaacagctctcgaagcttgctctctcccttccagcagaaacgactctatccctcaggaggacttcacaccagaggtgtatcgggtcttcttaaacaatctgtgtccgcggcccgagatcgacaatattttctccgagttcggggcaaagagtaagccatatctgacagtcgaccagatgatggactttatcaacctcaaacaacgcgaccctagactcaacgagatcctgtatccccctctaaagcaggaacaggtgcaggtgctgattgaaaaatatgagccaaacaactctcttgcaagaaagggccagatcagcgtggatggctttatgagatatctatctggagaggagaatggggtcgtgagtcccgagaagctggatctgaacgaagacatgagccaacctctgagccattacttcatcaacagctcccacaacacgtacctgaccgccggtcagctggccggaaactcttccgtcgagatgtaccgtcaggtgctcctctcagggtgtcggtgtgtggagctggattgttggaaaggaaggactgccgaagaagagcccgtcattacgcatgggttcactatgacgacggagatttcttttaaggaggttattgaagctatagctgagtgcgccttcaaaacatcaccttttccaatcttgctctccttcgaaaatcacgtggattctccaaagcagcaggcaaagatggccgagtactgccgtctgatttttggcgatgccctgttgatggagcctctggagaagtatcccctcgaatctggggtgccactgccttcacctatggaccttatgtataagatcttagtgaagaataaaaaaaaatcccataagtcatccgagggctctggtaaaaaaaaactgtctgaacaggcaagcaacacttattccgattcctcctccatgttcgaacccagcagtcctggagcaggcgaggccgataccgagtcagatgacgacgacgacgatgatgactgcaagaaatcctctatggatgaaggcactgccggttcggaggcgatggccacggaggagatgtccaacctcgtgaactacatccagccggtgaagtttgagtccttcgaaatctctaagaagagaaataagtcttttgaaatgagtagttttgtcgagaccaaagggctggagcagctcacgaagtctccggtcgagttcgtggagtataacaagatgcaactatctaggatctacccgaaaggcactcgcgtggacagctctaattacatgccgcagttattctggaacgctggttgtcagatggtggctcttaatttccagaccatggatctggccatgcagataaatatgggcatgtacgagtacaacggcaagtctgggtacaggctgaagccggaattcatgcgcaggccggataagcatttcgaccccttcactgagggcatcgtggacggaattgtagctaacacgctgtctgtgaaaattataagtgggcagtttctgtccgacaaaaaggttggcacatacgttgaagttgacatgttcggcctgcccgtcgataccaggaggaaggctttcaaaaccaagactagtcagggaaatgctgtgaatcctgtctgggaggaggagccaatcgtgtttaagaaagtggttctcccaacactcgcctgtctgcgtatcgccgtgtacgaggaaggtggcaagtttatcgggcaccgcatactgccagttcaggccattagaccgggataccactatatttgtctgcgtaacgaacggaaccagccattgacactccccgccgtgttcgtgtatatagaagtgaaagactacgtgcccgacacatatgctgatgtgatcgaggcactgtctaatcctattcggtatgtaaacctgatggaacagcgggccaagcagttggcagctctgactctcgaagatgaggaggaggtgaaaaaagaggccgatcctggagaaacccccagcgaggctccaagcgaggcccgcaccacccccgcggaaaacggcgtcaaccacacgacgacacttacacctaaacctccttcccaggcattacatagccagcctgcacccggaagcgtcaaggcccctgctaagactgaagacctgatacaatcggtactgactgaggtggaagcacaaaccatcgaagaattaaagcagcaaaagagtttcgttaagctccagaagaaacactataaggagatgaaggatctggtgaaaagacatcataagaaaacgactgacctgatcaaagagcacacaaccaaatataatgaaattcagaatgactatctgaggagacgagcggctttggagaagagcgcgaaaaaggactccaaaaagaaaagcgagccgtctagtcctgatcatggatcctctacgatcgagcaggatctcgcggcgttggatgccgaaatgacacagaaacttattgatctgaaggataaacagcaacaacagctgttgaacctccggcaagaacaatattattccgaaaagtatcagaagagagagcatatcaagctgttaattcagaaattaaccgacgtggcagaggaatgccagaacaatcagttgaagaagctgaaagaaatatgtgagaaagagaaaaaggagctgaaaaagaagatggataagaagaggcaggagaagattaccgaagccaaatcaaaggacaagtctcaaatggaagaagaaaagacagaaatgatacgctcctatatccaggaggttgtgcagtacattaaaagactggaggaggcacagtcaaagagacaggaaaagctggtcgagaaacacaaagagatccgccagcagatcctcgacgaaaagccaaagctgcaggtggaactggagcaagaataccaagacaaattcaaaaggttgcctctggagatacttgaattcgtccaggaggcaatgaaaggaaagatctctgaagacagtaatcatggcagcgcccctctcagtttatctagcgatcctggaaaggtgaaccacaaaacaccgagttccgaagaacttggtggtgatattcccggtaaggaattcgacacaccattatag

SEQ ID NO: 185086 - DNA, 3651 bp, Artificial Sequence
  derived and/or modified sequence
atggccggggcccagcccggggtgcacgccctgcagctgaagcctgtgtgtgtgtctgacagcctgaagaagggcaccaagtttgtgaagtgggatgatgacagcaccatcgtgacccccatcatcctgaggacagacccccagggcttcttcttctactggacagaccagaacaaggagacagagctgctggacctgagcctggtgaaggatgcccgctgtggcagacatgccaaggcccccaaggaccccaagctgcgggagctgctggatgtgggcaacatcggccgcctggagcagaggatgatcaccgtggtgtatggccctgacctggtgaacatcagccacctgaacctggtggccttccaggaggaggtggccaaggagtggaccaatgaggtgttcagcctggccaccaacctgctggcccagaacatgagcagagatgccttcctggagaaggcctacaccaagctgaagctgcaggtgaccccagagggccgcatccccctgaagaacatctaccgcctcttctctgctgacaggaagagggtggagacagccctggaggcctgcagcctgcccagcagcagaaatgacagcatcccccaggaggacttcaccccagaggtgtacagagtcttcctgaacaacctgtgccccaggcctgagattgacaacatcttcagcgagtttggagccaagagcaagccctacctgactgtggaccagatgatggacttcatcaacctgaagcagagggacccccggctgaatgagatcctgtacccacccctgaagcaggagcaggtgcaggtgctgattgagaagtatgagcccaacaacagcctggccaggaagggccagatctctgtggatggcttcatgagatacctgagcggggaggagaatggagtggtgtccccagagaagctggacctgaatgaagacatgagccagcccctgagccactacttcatcaacagcagccacaacacctacctgacagctggccagctggccggcaacagctctgtggagatgtaccggcaggtgctgctgagcggctgccgctgtgtggagctggactgctggaagggccgcacagctgaggaggagcccgtcatcacccacggcttcaccatgaccacagagatctccttcaaggaggtgattgaggccatcgcagaatgtgccttcaagaccagccccttccccatcctgctgagctttgagaaccacgtggacagccccaagcagcaggccaagatggccgagtactgccgcctcatctttggagatgccctgctgatggagcccctggagaagtaccccctggagagcggcgtgcccctgcccagccccatggacctgatgtacaagatcctggtgaagaacaagaagaagagccacaagagcagcgagggcagcggcaagaagaagctgtctgagcaggccagcaacacctacagcgacagcagctccatgtttgagcccagcagccctggggccggggaggccgacacagaaagtgatgatgatgatgatgatgatgactgcaagaagagctccatggatgagggcacagctggcagcgaggccatggccacagaggagatgagcaacctggtgaactacatccagcctgtgaagtttgagagctttgagatcagcaagaagaggaacaagagctttgagatgagcagctttgtggagaccaagggcctggagcagctgaccaagagccctgtggagtttgtggagtacaacaagatgcagctgagccgcatctaccccaagggcaccagggtggacagcagcaactacatgccccagctgttctggaatgccggctgccagatggtggccctgaacttccagaccatggacctggccatgcagatcaacatgggcatgtatgagtacaacgggaagagcggctaccgcctgaagccagagttcatgaggaggccagacaagcactttgaccccttcacagagggcatcgtggatggcatcgtggccaacaccctgtctgtgaagatcatcagcggccagttcctgagtgacaagaaggtgggcacctacgtggaggtggacatgtttggcctgcctgtggacaccaggaggaaggccttcaagaccaagaccagccagggcaatgctgtgaaccctgtgtgggaggaggagcccatcgtgttcaagaaggtggtgctgcccaccctggcctgcctgagaattgctgtgtatgaggagggcggcaagttcatcggccaccgcatcctgcctgtgcaggccatccggcccggctaccactacatctgcctgagaaatgaaagaaaccagcccctgaccctgcctgctgtgtttgtgtacatcgaggtgaaggactatgtgcctgacacctatgcagatgtgattgaggccctgagcaaccccatccgctacgtgaacctgatggagcagagggccaagcagctggccgccctgaccctggaggatgaggaggaggtgaagaaggaggccgaccccggggagaccccatctgaggcccccagcgaggcccggaccaccccagcagaaaatggagtgaaccacaccaccaccctgacccccaagccacccagccaggccctgcacagccagcctgcccctggctctgtgaaggccccagccaagacagaagatctcatccagagcgtgctgacagaggtggaggcccagaccatcgaggagctgaagcagcagaagagctttgtgaagctgcagaagaagcactacaaggagatgaaggacctggtgaagaggcaccacaagaagaccacagacctgatcaaggagcacaccaccaagtacaatgagatccagaatgactacctgcggcggcgggccgccctggagaagagcgccaagaaggacagcaagaagaagtctgagcccagcagcccagaccacggcagcagcaccatcgagcaggacctggccgccctggatgctgagatgacccagaagctgattgacctgaaggacaagcagcagcagcagctgctgaacctgcggcaggagcagtactacagcgagaagtaccagaagcgggagcacatcaagctgctgatccagaagctgacagatgtggccgaggagtgccagaacaaccagctgaagaagctgaaggagatctgtgagaaggagaagaaggagctgaagaagaagatggacaagaagaggcaggagaagatcacagaggccaagagcaaggacaagagccagatggaggaggagaagacagagatgatccgcagctacatccaggaggtggtgcagtacatcaagaggctggaggaggcccagagcaagaggcaggagaagctggtggagaagcacaaggagatccggcagcagatcctggatgagaagcccaagctgcaggtggagctggagcaggagtaccaggacaagttcaagaggctgcccctggagatcctggagtttgtgcaggaggccatgaagggcaagatcagcgaggacagcaaccacggcagcgcccccctgagcctgagcagtgaccccgggaaggtgaaccacaagacccccagcagcgaggagctgggcggggacatccctgggaaggagtttgacacccccctgtag

SEQ ID NO: 185087 - DNA, 3411 bp, Artificial Sequence
  derived and/or modified sequence
acccaggaccccaagctgcgggagctgctggatgtgggcaacatcggccgcctggagcagaggatgatcaccgtggtgtatggccctgacctggtgaacatcagccacctgaacctggtggccttccaggaggaggtggccaaggagtggaccaatgaggtgttcagcctggccaccaacctgctggcccagaacatgagcagagatgccttcctggagaaggcctacaccaagctgaagctgcaggtgaccccagagggccgcatccccctgaagaacatctaccgcctcttctctgctgacaggaagagggtggagacagccctggaggcctgcagcctgcccagcagcagaaatgacagcatcccccaggaggacttcaccccagaggtgtacagagtcttcctgaacaacctgtgccccaggcctgagattgacaacatcttcagcgagtttggagccaagagcaagccctacctgactgtggaccagatgatggacttcatcaacctgaagcagagggacccccggctgaatgagatcctgtacccacccctgaagcaggagcaggtgcaggtgctgattgagaagtatgagcccaacaacagcctggccaggaagggccagatctctgtggatggcttcatgagatacctgagcggggaggagaatggagtggtgtccccagagaagctggacctgaatgaagacatgagccagcccctgagccactacttcatcaacagcagccacaacacctacctgacagctggccagctggccggcaacagctctgtggagatgtaccggcaggtgctgctgagcggctgccgctgtgtggagctggactgctggaagggccgcacagctgaggaggagcccgtcatcacccacggcttcaccatgaccacagagatctccttcaaggaggtgattgaggccatcgcagaatgtgccttcaagaccagccccttccccatcctgctgagctttgagaaccacgtggacagccccaagcagcaggccaagatggccgagtactgccgcctcatctttggagatgccctgctgatggagcccctggagaagtaccccctggagagcggcgtgcccctgcccagccccatggacctgatgtacaagatcctggtgaagaacaagaagaagagccacaagagcagcgagggcagcggcaagaagaagctgtctgagcaggccagcaacacctacagcgacagcagctccatgtttgagcccagcagccctggggccggggaggccgacacagaaagtgatgatgatgatgatgatgatgactgcaagaagagctccatggatgagggcacagctggcagcgaggccatggccacagaggagatgagcaacctggtgaactacatccagcctgtgaagtttgagagctttgagatcagcaagaagaggaacaagagctttgagatgagcagctttgtggagaccaagggcctggagcagctgaccaagagccctgtggagtttgtggagtacaacaagatgcagctgagccgcatctaccccaagggcaccagggtggacagcagcaactacatgccccagctgttctggaatgccggctgccagatggtggccctgaacttccagaccatggacctggccatgcagatcaacatgggcatgtatgagtacaacgggaagagcggctaccgcctgaagccagagttcatgaggaggccagacaagcactttgaccccttcacagagggcatcgtggatggcatcgtggccaacaccctgtctgtgaagatcatcagcggccagttcctgagtgacaagaaggtgggcacctacgtggaggtggacatgtttggcctgcctgtggacaccaggaggaaggccttcaagaccaagaccagccagggcaatgctgtgaaccctgtgtgggaggaggagcccatcgtgttcaagaaggtggtgctgcccaccctggcctgcctgagaattgctgtgtatgaggagggcggcaagttcatcggccaccgcatcctgcctgtgcaggccatccggcccggctaccactacatctgcctgagaaatgaaagaaaccagcccctgaccctgcctgctgtgtttgtgtacatcgaggtgaaggactatgtgcctgacacctatgcagatgtgattgaggccctgagcaaccccatccgctacgtgaacctgatggagcagagggccaagcagctggccgccctgaccctggaggatgaggaggaggtgaagaaggaggccgaccccggggagaccccatctgaggcccccagcgaggcccggaccaccccagcagaaaatggagtgaaccacaccaccaccctgacccccaagccacccagccaggccctgcacagccagcctgcccctggctctgtgaaggccccagccaagacagaagatctcatccagagcgtgctgacagaggtggaggcccagaccatcgaggagctgaagcagcagaagagctttgtgaagctgcagaagaagcactacaaggagatgaaggacctggtgaagaggcaccacaagaagaccacagacctgatcaaggagcacaccaccaagtacaatgagatccagaatgactacctgcggcggcgggccgccctggagaagagcgccaagaaggacagcaagaagaagtctgagcccagcagcccagaccacggcagcagcaccatcgagcaggacctggccgccctggatgctgagatgacccagaagctgattgacctgaaggacaagcagcagcagcagctgctgaacctgcggcaggagcagtactacagcgagaagtaccagaagcgggagcacatcaagctgctgatccagaagctgacagatgtggccgaggagtgccagaacaaccagctgaagaagctgaaggagatctgtgagaaggagaagaaggagctgaagaagaagatggacaagaagaggcaggagaagatcacagaggccaagagcaaggacaagagccagatggaggaggagaagacagagatgatccgcagctacatccaggaggtggtgcagtacatcaagaggctggaggaggcccagagcaagaggcaggagaagctggtggagaagcacaaggagatccggcagcagatcctggatgagaagcccaagctgcaggtggagctggagcaggagtaccaggacaagttcaagaggctgcccctggagatcctggagtttgtgcaggaggccatgaagggcaagatcagcgaggacagcaaccacggcagcgcccccctgagcctgagcagtgaccccgggaaggtgaaccacaagacccccagcagcgaggagctgggcggggacatccctgggaaggagtttgacacccccctgtag

SEQ ID NO: 185088 - DNA, 3651 bp, Artificial Sequence
  derived and/or modified sequence
atggccggcgcccagcccggcgtgcacgccctgcagctgaagcccgtatgcgtgtccgacagtctgaagaaggggactaaattcgttaagtgggatgatgattcaaccatcgttaccccgattatcttaagaactgaccctcaggggttcttcttttactggacagatcagaataaggagaccgaattgttggatttatcgctggtcaaagacgcccgctgtgggcggcacgccaaggccccaaaggatcctaagttaagagaactgttggatgtcggcaatattggcagactcgaacagagaatgattacagtcgtgtatggacctgatttagttaacattagccatctcaatctggtggcctttcaggaggaggtggctaaagaatggaccaatgaggttttcagcttagccacaaatctactagctcagaatatgtcaagagatgcattcctcgaaaaggcctacactaagctaaaactccaggtaacacctgagggtagaataccgcttaagaatatttatagactgtttagcgcagaccgcaaaagggtggaaacagccctggaggcctgcagcttaccgagtagcagaaatgactctataccccaggaagatttcaccccagaagtgtatagggtgttcctaaacaatctttgcccgagaccggaaattgacaacatcttctccgagttcggagctaagtcaaaaccctatttgaccgtggatcagatgatggattttatcaatctgaagcagagagaccctcggctgaacgagattctttatcctccgctgaagcaggagcaggtgcaggtcctgatcgaaaaatatgaacccaataactctctggctagaaaaggacaaatttccgtggatggttttatgcgatacttgagcggtgaagagaatggtgtggtgtccccagaaaaactggatctcaacgaggacatgtcgcagcctctcagccactactttattaatagttcccacaatacctacctgactgctgggcagctggccgggaattctagcgttgaaatgtatcggcaagtgctgctgtcaggttgtcggtgtgttgagctggactgttggaaaggacggactgcggaagaagaacctgtgatcacacacgggttcacgatgacgacagagatctcatttaaagaagtgatcgaggcaatcgccgagtgcgcctttaaaacaagccctttccccatcttgctctctttcgagaaccatgtggattcccctaaacagcaggctaagatggccgagtattgtcgtctaattttcggcgatgctttgctcatggagccactggagaagtatcccctggaatccggtgtgccgcttccttcccccatggacctgatgtacaaaatcctcgtgaaaaacaagaagaagtcccataaatcctccgaaggatcaggtaaaaaaaagctgtcagagcaggctagcaacacttatagtgactccagcagcatgttcgaaccgagtagccccggcgcaggggaggccgacactgagtcagacgacgacgacgatgatgacgattgtaaaaagagtagcatggacgaaggtactgccggatctgaagcgatggcaactgaagagatgtccaatctggtgaactacatccaacctgtgaaattcgaatctttcgaaataagcaagaagcggaataaaagctttgaaatgtctagttttgtcgagaccaaaggcctcgaacagttgactaagtcccctgtggagttcgtcgagtacaacaagatgcagctgtctcgaatataccctaaaggcacccgcgtggatagctcgaattacatgccccagctgttctggaatgctggatgtcagatggtggctctaaactttcagactatggatctcgccatgcaaatcaatatgggtatgtatgaatataacgggaaatcaggctacaggctgaagcctgagtttatgcgccgtcctgataagcatttcgacccctttacagaggggatcgttgacggcattgtcgccaacactttgagtgtaaagattatttcgggccagtttctatcagataagaaggtgggcacctatgtggaggtagacatgttcgggttgccagtcgatacccgtaggaaggcatttaaaaccaaaacctcccagggcaatgcagtcaacccggtttgggaggaagagccaatcgtattcaagaaggtggtcctgcctaccctggcgtgtctgaggattgcagtgtacgaagagggtggcaagtttatcggtcatcggattttaccagtgcaagctattcgccctggctatcactacatatgtttgaggaatgagcggaaccaacctttaacactgcccgcggtgtttgtttacatcgaagtgaaagactacgtccctgacacctacgccgacgttattgaggccctgtctaatccaattaggtacgtcaatttaatggagcaaagagctaagcaactggcagcattaacattggaagacgaggaggaggtgaagaaggaagccgaccccggagagacaccctctgaggcaccatcagaggcacgtaccacacccgctgaaaatggtgttaatcacactacaacactgacccccaagcccccctcccaggccctacattctcagcctgcccccgggtccgttaaggcccccgcaaagaccgaagatctgattcagagcgtgctgacggaggttgaggcccaaactattgaggagctgaaacagcagaaaagttttgtgaaactccaaaagaagcactacaaggagatgaaagacctggtgaagaggcaccataaaaagaccactgatctgatcaaggaacacactacaaaatacaacgagatccagaacgattatcttaggagacgcgccgcattagaaaagtccgcaaaaaaggattccaagaaaaagagcgaaccttcctctccagaccatggctcttcaaccatcgagcaagacttggctgccctcgatgcggaaatgactcagaagctgatcgatctgaaagataaacagcagcagcaactgctcaatcttcggcaagagcagtattatagcgagaaatatcaaaagagagagcatatcaaattgcttattcaaaagctgaccgatgttgctgaggaatgtcagaataaccaactgaagaaactgaaggaaatctgcgaaaaagaaaaaaaggaactaaaaaagaagatggataagaaacggcaagagaagataactgaagcgaaatccaaggacaaatcccagatggaagaggagaaaaccgagatgatccggtcttacattcaagaggtggtgcaatacatcaagaggctggaagaggcccaaagcaaacggcaagaaaaattagtcgagaaacataaagagattcggcagcaaattctcgacgaaaaaccaaaactgcaggttgaactggaacaggagtaccaagacaaatttaagaggttgcccctggaaatactggaatttgtgcaggaggccatgaaaggaaaaatctctgaagactctaatcatggctctgcccctctctccctgtccagcgatccaggaaaggttaatcataagacacccagttctgaggagctcgggggagatataccaggcaaggaatttgacacacccctttag

SEQ ID NO: 185089 - DNA, 3411 bp, Artificial Sequence
  derived and/or modified sequence
acccaggaccccaagctgcgggagctgctggacgtgggcaacatcggcaggctagagcaaaggatgattacagtcgtttatgggcctgacctagtcaacatctcacaccttaacctcgtggccttccaggaggaggtggcgaaagaatggactaacgaggtcttctccttggccactaatttgctggcccagaatatgagtcgcgatgctttcttggagaaggcatataccaagcttaaactgcaggttactccagaaggaaggatacccctgaagaacatctatcggctcttcagcgctgaccgcaaaagagtcgaaacggcactggaggcttgctctttaccctctagccggaacgatagcattccacaggaggactttactccagaagtatatcgggtttttctgaataatttgtgtcctagacccgagatcgataacattttctcagaatttggcgccaagagcaaaccttacctcactgtggatcaaatgatggactttattaatctaaagcagcgggacccccggctcaatgaaatcctttacccccctctgaagcaggagcaggttcaggtattgatcgaaaagtacgagccaaataactctctcgcacgaaaaggacagatctcggtcgatggtttcatgaggtacctaagcggcgaagagaatggcgtggtgagccccgaaaaactggatctgaacgaggatatgtcacaacccctgagccattactttatcaactctagccataatacctatctaactgctggccagctggcgggaaattctagtgtcgagatgtacagacaagttctgctgtcaggctgccgttgtgtcgagctagactgttggaaggggaggacagcagaagaggaacctgtgataactcacggcttcaccatgacaactgaaattagtttcaaagaagtgatcgaagccattgccgaatgcgctttcaagacttctcccttccctattttgttgtcctttgagaaccacgtagattctccgaaacaacaggccaagatggcagaatattgtagactgatctttggagatgcccttctgatggagccactggagaagtatcccctggagtctggagtccctttgccatcccccatggatctcatgtataaaattttggtcaaaaacaagaaaaaaagtcacaagagctccgaaggaagcgggaaaaaaaagttgtctgagcaagcatccaatacttactctgatagcagctctatgtttgagcccagtagcccaggagcaggcgaggctgatacagaaagcgacgatgacgacgacgacgatgactgtaagaagagctctatggacgagggtaccgcgggatcagaggccatggctacagaagagatgtcaaatctagtgaactacatacagcctgtcaaatttgagtctttcgaaatttcaaaaaagagaaataagtctttcgagatgtcaagcttcgtcgagaccaaaggcttggagcagctgaccaaaagcccagtcgagttcgtcgaatacaacaagatgcagttaagtcgcatttaccccaagggcacacgggtggacagttccaattatatgccacagctgttttggaacgccggatgccagatggtagccctcaattttcagaccatggacctggccatgcagattaatatggggatgtacgagtacaacggaaagtctggctaccggctgaagccggagttcatgaggcggcctgataaacactttgacccttttaccgaggggatcgtggacggaattgttgcaaataccctgagcgtgaagattatatctggccaattcctgagtgacaagaaggtgggaacttacgtggaagtggatatgtttggcctgccagtggacacaaggaggaaggcatttaaaacaaaaacaagtcagggcaatgctgtcaacccagtctgggaggaggaaccaattgtgtttaaaaaggtagtgcttcctactcttgcctgtctccggattgctgtctatgaggagggggggaaattcatcgggcatcggattttgcctgtgcaggcaataagaccagggtaccactatatctgtctacggaatgagcgaaatcaaccccttactctgccagctgtattcgtgtacattgaggttaaggactacgtacccgacacatatgctgacgttatcgaagccctttccaaccccattcgttacgtaaacctgatggagcagagggccaaacagcttgccgcgctgactctggaggacgaggaggaagtaaagaaggaagccgaccctggtgaaaccccttcagaagcaccctcagaggcccggaccacccctgcagaaaacggagtgaaccacacgaccacactgacgcccaaaccaccttcacaagcgttacattcacagcctgcgcctggctcagtgaaagctccagcaaagaccgaagatctgattcagtctgtgctgacagaagtcgaggcgcagaccattgaagaattaaagcaacagaaatcttttgtgaaactccagaagaagcactacaaagagatgaaagacctggtcaagcgacatcataaaaagactacagacctgattaaggaacacacaactaaatacaatgagattcaaaacgactaccttaggcggagggcagccttagagaaaagcgcgaagaaggactcaaaaaagaagtcggagccatcgagccccgaccacgggagctcaactattgaacaggacctagcggcactggatgccgagatgactcagaagctcatcgatcttaaggacaagcagcaacagcagctgcttaatctcaggcaggaacagtactacagcgagaaataccagaaacgtgaacacatcaagcttctcattcagaagcttaccgatgttgctgaagagtgccagaacaatcagttgaagaagctgaaggagatctgtgagaaagagaaaaaggaactgaaaaagaagatggacaagaaacgacaggagaagatcactgaggcgaagtcaaaagacaaaagccaaatggaagaggagaaaaccgagatgatccgctcatacattcaggaagtcgtgcaatatattaagaggctcgaggaagctcagtcaaagagacaggaaaaacttgttgagaaacacaaggagatacgccagcagattctggatgagaagccaaaattacaagtggagttagagcaggagtaccaggacaagtttaagagactcccactggagattctggagtttgtgcaggaagccatgaagggaaaaatatcggaagatagtaatcacggttccgctcctctgagcctgagcagcgaccccggaaaagtgaaccataaaacgccgtcctctgaggagctggggggcgatattcccggcaaagagttcgataccccgctgtag

SEQ ID NO: 185090 - DNA, 6729 bp, Artificial Sequence
  derived and/or modified sequence
ggccgcccggagcccagatgagcccagatggccggggctcaacccggagtgcacgccttgcaactcaagcccgtgtgcgtgtccgacagcctcaagaagggcaccaaattcgtcaagtgggatgatgactcaactattgttactccaattattttgaggactgaccctcagggatttttcttttactggacagatcaaaacaaggagacagagctactggatctcagccttgtcaaagatgccagatgtgggagacacgccaaagctcccaaggaccccaaattacgtgaacttttggatgtggggaacatcgggcgcctggagcagcgcatgatcacagtggtgtatgggcctgacctcgtgaacatctcccatttgaatctcgtggctttccaagaagaagtggccaaggaatggacaaatgaggttttcagtttggcaacaaacctgctggcccaaaacatgtccagggatgcatttctggaaaaagcctatactaaacttaagctgcaagtcactccagaagggcgtattcctctcaaaaacatatatcgcttgttttcagcagatcggaagcgagttgaaactgctttagaggcttgtagtcttccatcttcaaggaatgattcaatacctcaagaagatttcactccagaagtgtacagagttttcctcaacaacctttgccctcgacctgaaattgataacatcttttcagaatttggtgcaaaaagcaaaccatatcttaccgttgatcagatgatggattttatcaaccttaagcagcgagatcctcggcttaatgaaatactttatccacctctaaaacaagagcaagtccaagtattgattgagaagtatgaacccaacaacagcctcgccagaaaaggacaaatatcagtggatgggttcatgcgctatctgagtggagaagaaaacggagtcgtttcacctgagaaactggatttgaatgaagacatgtctcagcccctttctcactatttcattaattcctcgcacaacacctacctcacagctggccaactggctggaaactcctctgttgagatgtatcgccaagtgctcctgtctggttgtcgctgtgtggagctggactgctggaagggacggactgcagaagaggaacctgtcatcacccatggcttcaccatgacaactgaaatatctttcaaggaagtgatagaagcaattgcggagtgtgcatttaagacttcaccttttccaattctcctttcgtttgagaaccatgtggattccccaaagcagcaagccaagatggcggagtactgccgactgatctttggggatgcccttctcatggagcccctggaaaaatatccactggaatctggagttcctcttccaagccctatggatttaatgtataaaattttggtgaaaaataagaagaaatcacacaagtcatcagaaggaagcggcaaaaagaagctctcagaacaagcctccaacacctacagtgactcctccagcatgttcgagccctcatccccaggagccggagaagctgatacggaaagtgacgacgacgatgatgatgatgactgtaaaaaatcttcaatggatgaggggactgctggaagtgaggctatggccacagaagaaatgtctaatctggtgaactatattcagccagtcaagtttgagtcatttgaaatttcaaaaaaaagaaataaaagttttgaaatgtcttccttcgtggaaaccaaaggacttgaacaactcaccaagtctccagtggaatttgtagaatataacaaaatgcagcttagcaggatatatccaaaaggaacacgtgtggattcatccaactatatgcctcagctcttctggaatgcaggttgtcagatggtggcacttaatttccagacaatggacctggctatgcaaataaatatggggatgtatgaatacaacgggaagagtggctacagattgaagccagagttcatgaggaggcctgacaagcattttgatccatttactgaaggcatcgtagatgggatagtggcaaacactttgtctgttaagattatttcaggtcagtttctttctgataagaaagttgggacttacgtggaagtagatatgtttggtttgcctgtggatacaaggaggaaggcatttaagaccaaaacatcccaaggaaatgctgtgaatcctgtctgggaagaagaacctattgtgttcaaaaaggtggttcttcctactctggcctgtttgagaatagcagtttatgaagaaggaggtaaattcattggccaccgtatcttgccagtgcaagccattcggccaggctatcactatatctgtctaaggaatgaaaggaaccagcctctgacgctgcctgctgtctttgtctacatagaagtgaaagactatgtgccagacacatatgcagatgtcatcgaagctttatcaaacccaatccgatatgtgaacctgatggaacagagagctaagcaattggctgctttgacactggaagatgaagaagaagtaaagaaagaggctgatcctggagaaacaccatcagaggctccaagtgaagcgagaacgactccagcagaaaatggggtgaatcacactacaaccctgacacccaagccaccctcccaggctctccacagccagccagctccaggttctgtaaaggcacctgccaaaacagaagatcttattcagagtgtcttaacagaagtggaagcacagaccatcgaagaactaaagcaacagaaatcgtttgtgaaacttcaaaagaaacactacaaagaaatgaaagacctggttaagagacaccacaagaaaaccactgaccttatcaaagaacacactaccaagtataatgaaattcagaatgactacttgagaaggagagccgctttggaaaagtccgccaaaaaggacagtaagaaaaaatcggaacccagcagccctgatcatggttcatcaacgattgagcaagacctcgctgctctggatgctgaaatgacccaaaagttaatagacttgaaggacaaacaacagcagcagctgcttaatcttcggcaagaacagtattatagtgaaaaataccagaagcgagaacatattaaactgcttattcaaaagttgacggatgtcgcagaagagtgtcagaacaatcagttaaagaagctcaaagaaatctgtgagaaagaaaagaaagaattaaagaagaaaatggataaaaagaggcaggagaagataacagaagctaaatccaaagacaaaagtcagatggaagaggagaagacagagatgatccggtcatatatccaggaagtggtgcagtatatcaagaggctagaagaagcgcaaagtaaacggcaagaaaaactcgtagagaaacacaaggaaatacgtcagcagatcctggatgaaaagcccaagctgcaggtggagctggagcaagaataccaagacaaattcaaaagactgcccctcgagattttggaattcgtgcaggaagccatgaaaggaaagatcagtgaagacagcaatcacggttctgcccctctctccctgtcctcagaccctggaaaagtgaaccacaagactccctccagtgaggagctgggaggagacatcccaggaaaagaatttgatactcctctgtgaatgctcctgccaggccttcagaaattgcatggccactccagcgtcatcggactctctcttattacaaagatcactgcccaggaccatcttcccgagaagcatcccttagcctaaaatccacaccaaagggagagttccagaggaatccatgaagaattcccatgcccaggctccatgtgtcatgtggaaacctccacaggtctgctagtgaagaatgcatgtatgtgagatttttgttttctttccaatagcaaattcaaagcaagcaacttgcaggctccatggaacttttaatgaaggacagtgtcttctttgaagaaaatcaagctcgtgtttttattcgaagctctggtgtaaaatatttcaaagtcatagaaatagtttgagaaatgcatagcattatttaacactattgaacagccgactttgagcattgtttcttctaactgcccctcaactaccattatcttcaagtcaacatgcatattacattttcatcctttgctttgcaagcactggtggcttgcagtttgctaatttatttatcatagagtcatcaatgtatttgttgctgacatggttttattagatactgtagtgattcaaataagttttctatttgaaaaaaaaaatcacttgattgtatccttgcccagtgaagccatcctaagacttagcaatatggattgtacatttggctgcatgagcaagtcggccgcacacttccagacagtgtgctgtttgaattgactatttgcactcaaagtctgggtattcattggttattggcctgaaatgatcaaataactacaaatgatctgttgaataaaaatagttgagctgatatatgttaagcagatattcaatcagaatgaacaggttccggtggttattttgccgtttgacattttttatggttcatttatttttaatatagagaggaagattgaatatttatctagagaatacaaagacccacatgtaaatgataggtattatctccatgtatatatgtacccacttagtcatgtaagtgcatatacacatacacacacatgagtgtagacatgtgtttattaattgacaatgacccaaatctcttccacaagacttaaaaccaaattcagggacaaatggatagagaagaaaagggtcaaacatcgagattacatggatgttaaattatatggagacgctaagaaataattgatggagccattgatgcaaaccgaagtagatttagaacttatatgaatttgatttatattttgcaagatcaaaaattagatgttaagtatcagattttaagcttgttttaatggtcaaaaaattaggacagaaataatatggacatttattagtatcttccataatttttaagtctgacacatttctattttattctaacataaaaaaacttccattatatatttactaagtatatttaattcacttaactctgtctttataagttcctattttagatggaataagagaaacaaattatatcaaggtaaaactgatcaaaagcataattgaaagttctgaaaaaagaaaaataataatatgtagaaaaatgtaacttagagagtaacacatgaacattgaagttaaaacccagaagccagatgctcacagttttattttactttaaaataaacctgtctgactgtagctttgtgaaatatcttaaaacgcaaaaaccaattgtgtcctgaaaattgtttcaagaatttaatatttttatgaaaattattttatttaactttaagcaataactagagattacaattaaattttaatcaaaatgaaggcttagttcaaacataaggaaacagtgtttgattaaaaaaaacacatctagtaagacgtaaggggaaaatcacatcctctttggagatgattatattttgatctgaagggtttggggtgttcattagacacttaataaaacttaacttccaatgaaaaagaaatcttttgtaaatcattctacttttgcactttgaaagaaaggcgttaatcataaagaagcaagaatggtcaaaatcgaatgctgcatttttataaacaaaattacagactgtctgaaattgaagaagaatgaactaataatagcattcataaccaaacacaatgatgattattgcagaacattgtatcacattttagtccagagatagaataaagttgaataaccttgacttacacaaaactgttttggtagttggatttcattatcttagtgaatttagtcattttacaatatgtttgtatttggccatttactgtaatcacatttttatatctgtacaatgacactttttgcagttgtggggtagtgtgtaacactgtccatcttgcatcattgaaactactacaatgatactatcatttaataatattaatattacttgaaatagactaagataaagaaaaggggtctgtatgatgtgcagttttgtgcctttatgtatttgccttgttctttgtcgaatgtgtgaaattccgtactgtggtttttcctataatagaaagtagagctgtgtattaaattagactgtgtctctctgatacctttacactactgagaatagcatggttttggccatgtaaaccaattttcaaagttctaatgacatagccatgtgtttttggttttttatatttcattttaaaatttgagtatcaccatacattaattaatactcctgtagtagataagctgtcattaagtaattcccaaaaaaagggccatttgcttgcattactttgaatttaatgttgcgcttgtgcactgtgttaatattgtttgtgatggattggacgttgtgactcttgccttttaagaagaaaaaaaagataggacaaagtatttgaagctcttaaaatgtacatattttggttcttctatctcaaattatttaaaatgcataattcacatttttgtaataattctatgcaattttgtggcatgatgtttcttccacttgtaattttatgtgctttcatcacaaatccaaaggaaagaataaaaatttcttaacacaa

SEQ ID NO: 185091 - DNA, 1856 bp, Artificial Sequence
  derived and/or modified sequence
aaatactttatccacctctaaaacaagagcaagtccaagtattgattgagaagtatgaacccaacaacagcctcgccagaaaaggacaaatatcagtggatgggttcatgcgctatctgagtggagaagaaaacggagtcgtttcacctgagaaactggatttgaatgaagacatgtctcagcccctttctcactatttcattaattcctcgcacaacacctacctcacagctggccaactggctggaaactcctctgttgagatgtatcgccaagtgctcctgtctggttgtcgctgtgtggagctggactgctggaagggacggactgcagaagaggaacctgtcatcacccatggcttcaccatgacaactgaaatatctttcaaggaagtgatagaagcaattgcggagtgtgcatttaagacttcaccttttccaattctcctttcgtttgagaaccatgtggattccccaaagcagcaagccaagatggcggagtactgccgactgatctttggggatgcccttctcatggagcccctggaaaaatatccactggaatctggagttcctcttccaagccctatggatttaatgtataaaattttggtgaaaaataagaagaaatcacacaagtcatcagaaggaagcggcaaaaagaagctctcagaacaagcctccaacacctacagtgactcctccagcatgttcgagccctcatccccaggagccggagaagctgatacggaaagtgacgacgacgatgatgatgatgactgtaaaaaatcttcaatggatgaggggactgctggaagtgaggctatggccacagaagaaatgtctaatctggtgaactatattcagccagtcaagtttgagtcatttgaaatttcaaaaaaaagaaataaaagttttgaaatgtcttccttcgtggaaaccaaaggacttgaacaactcaccaagtctccagtggaatttgtagaatataacaaaatgcagcttagcaggatatatccaaaaggaacacgtgtggattcatccaactatatgcctcagctcttctggaatgcaggttgtcagatggtggcacttaatttccagacaatggacctggctatgcaaataaatatggggatgtatgaatacaacgggaagagtggctacagattgaagccagagttcatgaggaggcctgacaagcattttgatccatttactgaaggcatcgtagatgggatagtggcaaacactttgtctgttaagattatttcaggtcagtttctttctgataagaaagttgggacttacgtggaagtagatatgtttggtttgcctgtggatacaaggaggaaggcatttaagaccaaaacatcccaaggaaatgctgtgaatcctgtctgggaagaagaacctattgtgttcaaaaaggtggttcttcctactctggcctgtttgagaatagcagtttatgaagaaggaggtaaattcattggccaccgtatcttgccagtgcaagccattcggccaggctatcactatatctgtctaaggaatgaaaggaaccagcctctgacgctgcctgctgtctttgtctacatagaagtgaaagactatgtgccagacacatatgcagatgtcatcgaagctttatcaaacccaatccgatatgtgaacctgatggaacagagagctaagcaattggctgctttgacactggaagatgaagaagaagtaaagaaagagggtggatttctgcatgatgaaattatgagactcacccgtaatacgctggaaaaactgatggccttacctcttacccatgtggtgcccatccaaagcaagatgctgtcataa

SEQ ID NO: 185092 - DNA, 6462 bp, Artificial Sequence
  derived and/or modified sequence
acccaggaccccaaattacgtgaacttttggatgtggggaacatcgggcgcctggagcagcgcatgatcacagtggtgtatgggcctgacctcgtgaacatctcccatttgaatctcgtggctttccaagaagaagtggccaaggaatggacaaatgaggttttcagtttggcaacaaacctgctggcccaaaacatgtccagggatgcatttctggaaaaagcctatactaaacttaagctgcaagtcactccagaagggcgtattcctctcaaaaacatatatcgcttgttttcagcagatcggaagcgagttgaaactgctttagaggcttgtagtcttccatcttcaaggaatgattcaatacctcaagaagatttcactccagaagtgtacagagttttcctcaacaacctttgccctcgacctgaaattgataacatcttttcagaatttggtgcaaaaagcaaaccatatcttaccgttgatcagatgatggattttatcaaccttaagcagcgagatcctcggcttaatgaaatactttatccacctctaaaacaagagcaagtccaagtattgattgagaagtatgaacccaacaacagcctcgccagaaaaggacaaatatcagtggatgggttcatgcgctatctgagtggagaagaaaacggagtcgtttcacctgagaaactggatttgaatgaagacatgtctcagcccctttctcactatttcattaattcctcgcacaacacctacctcacagctggccaactggctggaaactcctctgttgagatgtatcgccaagtgctcctgtctggttgtcgctgtgtggagctggactgctggaagggacggactgcagaagaggaacctgtcatcacccatggcttcaccatgacaactgaaatatctttcaaggaagtgatagaagcaattgcggagtgtgcatttaagacttcaccttttccaattctcctttcgtttgagaaccatgtggattccccaaagcagcaagccaagatggcggagtactgccgactgatctttggggatgcccttctcatggagcccctggaaaaatatccactggaatctggagttcctcttccaagccctatggatttaatgtataaaattttggtgaaaaataagaagaaatcacacaagtcatcagaaggaagcggcaaaaagaagctctcagaacaagcctccaacacctacagtgactcctccagcatgttcgagccctcatccccaggagccggagaagctgatacggaaagtgacgacgacgatgatgatgatgactgtaaaaaatcttcaatggatgaggggactgctggaagtgaggctatggccacagaagaaatgtctaatctggtgaactatattcagccagtcaagtttgagtcatttgaaatttcaaaaaaaagaaataaaagttttgaaatgtcttccttcgtggaaaccaaaggacttgaacaactcaccaagtctccagtggaatttgtagaatataacaaaatgcagcttagcaggatatatccaaaaggaacacgtgtggattcatccaactatatgcctcagctcttctggaatgcaggttgtcagatggtggcacttaatttccagacaatggacctggctatgcaaataaatatggggatgtatgaatacaacgggaagagtggctacagattgaagccagagttcatgaggaggcctgacaagcattttgatccatttactgaaggcatcgtagatgggatagtggcaaacactttgtctgttaagattatttcaggtcagtttctttctgataagaaagttgggacttacgtggaagtagatatgtttggtttgcctgtggatacaaggaggaaggcatttaagaccaaaacatcccaaggaaatgctgtgaatcctgtctgggaagaagaacctattgtgttcaaaaaggtggttcttcctactctggcctgtttgagaatagcagtttatgaagaaggaggtaaattcattggccaccgtatcttgccagtgcaagccattcggccaggctatcactatatctgtctaaggaatgaaaggaaccagcctctgacgctgcctgctgtctttgtctacatagaagtgaaagactatgtgccagacacatatgcagatgtcatcgaagctttatcaaacccaatccgatatgtgaacctgatggaacagagagctaagcaattggctgctttgacactggaagatgaagaagaagtaaagaaagaggctgatcctggagaaacaccatcagaggctccaagtgaagcgagaacgactccagcagaaaatggggtgaatcacactacaaccctgacacccaagccaccctcccaggctctccacagccagccagctccaggttctgtaaaggcacctgccaaaacagaagatcttattcagagtgtcttaacagaagtggaagcacagaccatcgaagaactaaagcaacagaaatcgtttgtgaaacttcaaaagaaacactacaaagaaatgaaagacctggttaagagacaccacaagaaaaccactgaccttatcaaagaacacactaccaagtataatgaaattcagaatgactacttgagaaggagagccgctttggaaaagtccgccaaaaaggacagtaagaaaaaatcggaacccagcagccctgatcatggttcatcaacgattgagcaagacctcgctgctctggatgctgaaatgacccaaaagttaatagacttgaaggacaaacaacagcagcagctgcttaatcttcggcaagaacagtattatagtgaaaaataccagaagcgagaacatattaaactgcttattcaaaagttgacggatgtcgcagaagagtgtcagaacaatcagttaaagaagctcaaagaaatctgtgagaaagaaaagaaagaattaaagaagaaaatggataaaaagaggcaggagaagataacagaagctaaatccaaagacaaaagtcagatggaagaggagaagacagagatgatccggtcatatatccaggaagtggtgcagtatatcaagaggctagaagaagcgcaaagtaaacggcaagaaaaactcgtagagaaacacaaggaaatacgtcagcagatcctggatgaaaagcccaagctgcaggtggagctggagcaagaataccaagacaaattcaaaagactgcccctcgagattttggaattcgtgcaggaagccatgaaaggaaagatcagtgaagacagcaatcacggttctgcccctctctccctgtcctcagaccctggaaaagtgaaccacaagactccctccagtgaggagctgggaggagacatcccaggaaaagaatttgatactcctctgtgaatgctcctgccaggccttcagaaattgcatggccactccagcgtcatcggactctctcttattacaaagatcactgcccaggaccatcttcccgagaagcatcccttagcctaaaatccacaccaaagggagagttccagaggaatccatgaagaattcccatgcccaggctccatgtgtcatgtggaaacctccacaggtctgctagtgaagaatgcatgtatgtgagatttttgttttctttccaatagcaaattcaaagcaagcaacttgcaggctccatggaacttttaatgaaggacagtgtcttctttgaagaaaatcaagctcgtgtttttattcgaagctctggtgtaaaatatttcaaagtcatagaaatagtttgagaaatgcatagcattatttaacactattgaacagccgactttgagcattgtttcttctaactgcccctcaactaccattatcttcaagtcaacatgcatattacattttcatcctttgctttgcaagcactggtggcttgcagtttgctaatttatttatcatagagtcatcaatgtatttgttgctgacatggttttattagatactgtagtgattcaaataagttttctatttgaaaaaaaaaatcacttgattgtatccttgcccagtgaagccatcctaagacttagcaatatggattgtacatttggctgcatgagcaagtcggccgcacacttccagacagtgtgctgtttgaattgactatttgcactcaaagtctgggtattcattggttattggcctgaaatgatcaaataactacaaatgatctgttgaataaaaatagttgagctgatatatgttaagcagatattcaatcagaatgaacaggttccggtggttattttgccgtttgacattttttatggttcatttatttttaatatagagaggaagattgaatatttatctagagaatacaaagacccacatgtaaatgataggtattatctccatgtatatatgtacccacttagtcatgtaagtgcatatacacatacacacacatgagtgtagacatgtgtttattaattgacaatgacccaaatctcttccacaagacttaaaaccaaattcagggacaaatggatagagaagaaaagggtcaaacatcgagattacatggatgttaaattatatggagacgctaagaaataattgatggagccattgatgcaaaccgaagtagatttagaacttatatgaatttgatttatattttgcaagatcaaaaattagatgttaagtatcagattttaagcttgttttaatggtcaaaaaattaggacagaaataatatggacatttattagtatcttccataatttttaagtctgacacatttctattttattctaacataaaaaaacttccattatatatttactaagtatatttaattcacttaactctgtctttataagttcctattttagatggaataagagaaacaaattatatcaaggtaaaactgatcaaaagcataattgaaagttctgaaaaaagaaaaataataatatgtagaaaaatgtaacttagagagtaacacatgaacattgaagttaaaacccagaagccagatgctcacagttttattttactttaaaataaacctgtctgactgtagctttgtgaaatatcttaaaacgcaaaaaccaattgtgtcctgaaaattgtttcaagaatttaatatttttatgaaaattattttatttaactttaagcaataactagagattacaattaaattttaatcaaaatgaaggcttagttcaaacataaggaaacagtgtttgattaaaaaaaacacatctagtaagacgtaaggggaaaatcacatcctctttggagatgattatattttgatctgaagggtttggggtgttcattagacacttaataaaacttaacttccaatgaaaaagaaatcttttgtaaatcattctacttttgcactttgaaagaaaggcgttaatcataaagaagcaagaatggtcaaaatcgaatgctgcatttttataaacaaaattacagactgtctgaaattgaagaagaatgaactaataatagcattcataaccaaacacaatgatgattattgcagaacattgtatcacattttagtccagagatagaataaagttgaataaccttgacttacacaaaactgttttggtagttggatttcattatcttagtgaatttagtcattttacaatatgtttgtatttggccatttactgtaatcacatttttatatctgtacaatgacactttttgcagttgtggggtagtgtgtaacactgtccatcttgcatcattgaaactactacaatgatactatcatttaataatattaatattacttgaaatagactaagataaagaaaaggggtctgtatgatgtgcagttttgtgcctttatgtatttgccttgttctttgtcgaatgtgtgaaattccgtactgtggtttttcctataatagaaagtagagctgtgtattaaattagactgtgtctctctgatacctttacactactgagaatagcatggttttggccatgtaaaccaattttcaaagttctaatgacatagccatgtgtttttggttttttatatttcattttaaaatttgagtatcaccatacattaattaatactcctgtagtagataagctgtcattaagtaattcccaaaaaaagggccatttgcttgcattactttgaatttaatgttgcgcttgtgcactgtgttaatattgtttgtgatggattggacgttgtgactcttgccttttaagaagaaaaaaaagataggacaaagtatttgaagctcttaaaatgtacatattttggttcttctatctcaaattatttaaaatgcataattcacatttttgtaataattctatgcaattttgtggcatgatgtttcttccacttgtaattttatgtgctttcatcacaaatccaaaggaaagaataaaaatttcttaacacaa

SEQ ID NO: 185093 - DNA, 3651 bp, Artificial Sequence
  derived and/or modified sequence
atggcaggggcacagcccggagtgcacgcccttcagttgaagccagtgtgtgtgagcgattctctcaaaaaggggacaaaattcgtcaagtgggacgacgattccacgattgtgacccctatcatcctgcgcaccgatcctcagggcttttttttctactggacagatcagaacaaggagacagagcttttggatctctcactcgtgaaagatgctaggtgcggaagacatgccaaagctcccaaagatcccaagctgcgtgagctactcgacgtcggcaatattggacgcctcgaacagcgaatgatcaccgtggtgtacggtcccgatctggttaacatttcccacttaaatctcgtggcctttcaggaagaagtggcaaaagaatggactaatgaagttttctccctggccacaaacctcctggcccagaacatgtccagggatgcattcttagagaaagcatatacaaaactgaagctacaggtgacgcccgagggacgcatcccccttaaaaatatttaccgcctgttttcggctgatcgcaagagagtcgagaccgctttggaagcttgcagtctgccatctagccgcaatgactccattcctcaggaagacttcacaccagaagtctatagagtattcctgaacaacctctgtccacggcctgagatagacaacattttcagtgagtttggtgccaagagcaagccctacctgaccgttgatcaaatgatggacttcatcaacctcaaacagcgcgacccgcgactgaacgaaattctgtatcctcccctgaagcaggaacaagtgcaggttctaatcgagaagtacgaacccaataactctctcgccagaaaggggcagatctcagtcgacgggtttatgaggtaccttagcggtgaggagaatggagtcgtgtcaccggaaaagttggacctgaacgaagacatgtctcagccactcagccactacttcatcaattccagtcacaatacctacttgacggccggacagctggcaggcaatagcagcgtagagatgtatcgccaggtgctgctttcaggttgccgttgcgtcgaattggattgttggaaggggaggacagctgaggaggagcccgtgattacgcacggttttaccatgactaccgagatttcgtttaaagaggtcattgaggccatcgcagagtgcgctttcaagacatccccatttccaatactcttgtcatttgagaaccacgtggacagccccaaacagcaggcaaaaatggccgaatattgccgcctgatttttggggacgctctgctcatggagcccctcgagaagtatccacttgaaagcggggttccacttccctcccccatggacttaatgtataaaatcctggtaaaaaataagaaaaaaagccacaagtcaagcgaaggctccgggaaaaagaaacttagcgagcaggccagtaatacctactcagactcatcttccatgttcgaacccagctcacccggtgccggtgaagcggatactgagtctgatgacgacgacgatgatgatgactgtaaaaagagttcaatggacgagggaactgcaggaagtgaggccatggctaccgaggagatgtccaacctggtgaactacatccagccagttaaattcgagtctttcgagattagcaagaagcgcaacaagtcctttgagatgagctcgttcgtcgaaacaaaggggttggaacagttgacgaaaagcccagtggaattcgtggaatacaataaaatgcagctttcacgtatttaccctaaaggcaccagagtggactcatcaaactatatgcctcaactgttctggaatgctgggtgtcagatggtcgcgctgaactttcagactatggatcttgctatgcaaattaacatgggcatgtacgagtacaacggaaagagcggttatcggttaaaacccgagtttatgagacggcctgacaaacattttgatccttttacagaaggaatcgtggacgggatcgtggccaataccctgagcgttaaaataattagtggacagttcctgtcggataaaaaggtcggaacttacgtagaggtcgacatgttcggcttgcccgtcgacaccaggagaaaagccttcaagacaaaaaccagtcagggaaacgccgtgaatcccgtttgggaggaggagcctatcgtatttaagaaagtggtactgcctacactcgcctgtctgagaatcgcagtttacgaagaggggggtaagttcatcggccaccgcatactgcccgtacaagccattcggccaggataccactacatttgcttgcgtaacgagaggaatcagccgctgaccctccctgctgtattcgtttacatcgaagtcaaggattatgtccccgatacctacgccgacgtgattgaagccctcagtaatccgattcgatacgtaaatctgatggagcaaagagcgaaacaactggcagcactgacattggaagatgaggaagaggtgaagaaagaggctgaccccggtgagacaccctccgaagccccttctgaagctcggacaacaccggcagagaatggggttaaccacaccaccacgctgacacccaaacccccttctcaggcacttcactctcagcccgctcctggcagcgttaaggcccctgctaagaccgaggatctaatccagtccgttctcacagaggtggaggcccagacaatcgaagaactaaaacaacagaagtccttcgtcaaactgcagaaaaaacactataaggaaatgaaagacctggtcaagcgacatcataaaaagacaaccgaccttatcaaggagcataccaccaagtacaacgagatacagaacgactacctgcgtagaagagccgctctcgaaaagtcagcaaagaaggactcaaagaagaagtcggaaccttccagccccgatcatggtagttctaccattgagcaggatctggcagcattggacgcagaaatgacccagaaactgatagatctgaaagacaagcagcagcagcagctgctgaacctccgccaggaacagtattactcggagaaatatcaaaagcgcgagcacattaagctcctcatacagaagcttacagatgttgcagaagagtgtcagaacaaccaactgaagaagttaaaggagatctgcgagaaggagaaaaaagagttaaagaaaaagatggataaaaaacgccaagaaaagattaccgaggcgaagagtaaggacaagtcccagatggaagaggaaaaaaccgaaatgattaggtcatatatccaggaggtggtgcagtatatcaagagactcgaagaagcccagtctaagagacaggaaaaactggtggaaaagcataaggagatccgccagcagattttagatgagaagcccaagttgcaggtggagcttgaacaggagtatcaggataagttcaaaaggcttccactcgaaattctcgagttcgtgcaggaagcaatgaagggaaaaataagtgaagatagcaatcacggctccgcccctctatctttgagctcagacccgggaaaggttaatcacaagacgccgagtagtgaggagttgggcggtgatatccctggcaaggagtttgacactcccctttag

SEQ ID NO: 185094 - DNA, 3411 bp, Artificial Sequence
  derived and/or modified sequence
acccaggatccaaaacttcgggagcttctagatgtgggaaacattggacgcctggagcagagaatgatcaccgttgtatacggacctgacttggtaaacatttcacaccttaacctcgttgccttccaggaagaagttgcaaaggagtggactaacgaggtattttccctcgccacaaacctgcttgcccagaacatgtcacgcgatgccttcctcgaaaaggcctataccaagctcaaactccaggtgactcctgagggcaggattcccctcaagaatatctaccgtctattttctgcggataggaaaagggtggaaaccgcactggaagcttgcagtctgcccagctccaggaacgactccatccctcaggaggactttacacccgaggtgtatagagtgtttctgaacaatctctgccccaggccagagattgacaacatcttttctgagtttggcgcaaagtcaaagccctatctgacagtcgatcagatgatggattttatcaatctcaaacaaagagatcctagactgaacgagattctgtatccgcctctaaagcaagagcaagtgcaagtgctgattgaaaaatatgagcccaacaactctctggccaggaaaggacagatctccgtggacgggttcatgagatatctatccggcgaggaaaatggtgtggtttctccagagaagctggacctgaatgaagatatgtcccaaccattaagccactactttatcaacagctcacataacacgtacttgacggccggacagttggctgggaactcatcagtggagatgtaccgccaagtgctattgagcggttgtcgctgcgtggagctggattgctggaagggtagaaccgctgaggaagagcctgtgattacacatggcttcaccatgaccacagaaatcagctttaaggaggtgattgaggcgatagccgagtgcgcattcaagacttcccccttcccgatcctattgagcttcgaaaaccacgtggattcacccaagcagcaagcgaagatggctgagtactgccgactgattttcggagatgctttactcatggagcctctggaaaagtatcctctggagtcaggggtgccattgccttcgcccatggacctgatgtacaaaatccttgtgaaaaacaagaaaaaatcccacaaatcatctgaaggcagcggtaagaagaaactgagtgaacaagcctctaacacatacagtgactcatcaagcatgtttgaacctagctctcccggagccggtgaggccgacacggaatcagacgacgacgatgacgatgatgactgtaagaaaagctcgatggatgaaggaaccgccggttcggaagcaatggcaacagaggagatgagcaatctggtgaattacatccagccggtgaagtttgagtcctttgaaatcagtaagaagcgcaacaagagcttcgagatgagcagcttcgtggagacaaagggcttagaacagctgaccaagtctccggtcgagtttgtggagtataacaagatgcagctgtcgcgcatatatccaaaaggcacccgcgtggactcctcaaattacatgccacagctattttggaacgcaggctgtcaaatggtcgctttgaatttccaaactatggatctcgccatgcagatcaatatggggatgtacgagtacaacggcaagagcggctatagattaaaaccggagtttatgcgtaggcctgacaagcatttcgatcctttcactgaggggattgttgatggaatagtggccaatacattgagtgtgaaaataattagtggacaattcctgtcggataagaaagtcggcacctacgtcgaggtcgatatgtttggcctgcctgttgataccaggcgcaaggctttcaaaaccaagaccagtcagggcaacgccgtcaatccggtgtgggaggaagagcctattgtctttaagaaggtggtgctgccaacactggcttgtctgcgcatcgccgtctatgaggagggaggcaaatttatcggacatcgcattcttcccgttcaggctatcaggccgggatatcattacatctgtctgcgaaacgaaagaaaccaacccctcacactccccgctgtgttcgtttatatcgaggtgaaggattatgtacccgatacctacgcagacgtgatagaagccctgtcgaaccccattcgatatgtcaatctcatggaacagcgcgctaagcaattagcagccctgaccctggaggatgaagaagaggtgaagaaagaagcagatccgggtgaaaccccatcagaagccccttctgaggcgaggaccacccccgctgagaacggggtgaaccacaccactactctcaccccaaagcctccatcacaagcactgcattcccagcccgctcctggttccgtgaaggctcctgctaaaacagaggatttgatccagtccgttcttacggaagtcgaagcccagactatagaagaactgaagcaacaaaaaagctttgtgaagctgcagaagaaacattacaaagaaatgaaggacctggtcaagagacaccacaaaaaaacaacggacctcattaaggagcatactacaaagtataatgagatccagaacgactatcttcgcagacgcgcagcgctcgagaagagcgccaagaaagattccaagaaaaagagcgaaccatcttcccctgatcacggctcttctacgattgaacaagacctggctgcgctagatgctgagatgacacagaagttaatcgacttaaaggataagcagcaacaacagcttcttaatttgcggcaagagcagtattattcagagaagtaccagaaacgggagcacatcaaactgctaatccagaagctgaccgatgtcgccgaggagtgtcaaaataaccagctcaagaaactgaaagagatctgcgagaaagagaagaaggaattgaaaaagaagatggataaaaagaggcaggaaaaaatcactgaagctaagtccaaggacaaatcccagatggaggaggagaagacagaaatgatcagatcttacatacaggaggtggttcagtatatcaaaaggctcgaagaggcgcaatccaagcggcaggaaaagctcgttgagaaacacaaggaaattaggcaacagattttagatgaaaaacctaagttgcaggttgagttagagcaggagtatcaggacaagtttaagagacttcctcttgaaatactagagtttgtgcaggaagctatgaaggggaaaatttcggaggattcaaaccatggatccgctccactctctctgtctagcgatcccggaaaagtgaaccacaaaacacccagctcggaggaactgggtggtgacatcccgggaaaagagttcgacactcccctctag

SEQ ID NO: 185095 - DNA, 3651 bp, Artificial Sequence
  derived and/or modified sequence
atggccggcgcccagcccggcgtgcacgccctgcagctgaagcccgtgtgcgtgagcgacagcctgaagaagggcaccaagttcgtgaagtgggacgacgacagcaccatcgtgacccccatcatcctgagaaccgacccccagggcttcttcttctactggaccgaccagaacaaggagaccgagctgctggacctgagcctggtgaaggacgccagatgcggcagacacgccaaggcccccaaggaccccaagctgagagagctgctggacgtgggcaacatcggcagactggagcagagaatgatcaccgtggtgtacggccccgacctggtgaacatcagccacctgaacctggtggccttccaggaggaggtggccaaggagtggaccaacgaggtgttcagcctggccaccaacctgctggcccagaacatgagcagagacgccttcctggagaaggcctacaccaagctgaagctgcaggtgacccccgagggcagaatccccctgaagaacatctacagactgttcagcgccgacagaaagagagtggagaccgccctggaggcctgcagcctgcccagcagcagaaacgacagcatcccccaggaggacttcacccccgaggtgtacagagtgttcctgaacaacctgtgccccagacccgagatcgacaacatcttcagcgagttcggcgccaagagcaagccctacctgaccgtggaccagatgatggacttcatcaacctgaagcagagagaccccagactgaacgagatcctgtacccccccctgaagcaggagcaggtgcaggtgctgatcgagaagtacgagcccaacaacagcctggccagaaagggccagatcagcgtggacggcttcatgagatacctgagcggcgaggagaacggcgtggtgagccccgagaagctggacctgaacgaggacatgagccagcccctgagccactacttcatcaacagcagccacaacacctacctgaccgccggccagctggccggcaacagcagcgtggagatgtacagacaggtgctgctgagcggctgcagatgcgtggagctggactgctggaagggcagaaccgccgaggaggagcccgtgatcacccacggcttcaccatgaccaccgagatcagcttcaaggaggtgatcgaggccatcgccgagtgcgccttcaagaccagccccttccccatcctgctgagcttcgagaaccacgtggacagccccaagcagcaggccaagatggccgagtactgcagactgatcttcggcgacgccctgctgatggagcccctggagaagtaccccctggagagcggcgtgcccctgcccagccccatggacctgatgtacaagatcctggtgaagaacaagaagaagagccacaagagcagcgagggcagcggcaagaagaagctgagcgagcaggccagcaacacctacagcgacagcagcagcatgttcgagcccagcagccccggcgccggcgaggccgacaccgagagcgacgacgacgacgacgacgacgactgcaagaagagcagcatggacgagggcaccgccggcagcgaggccatggccaccgaggagatgagcaacctggtgaactacatccagcccgtgaagttcgagagcttcgagatcagcaagaagagaaacaagagcttcgagatgagcagcttcgtggagaccaagggcctggagcagctgaccaagagccccgtggagttcgtggagtacaacaagatgcagctgagcagaatctaccccaagggcaccagagtggacagcagcaactacatgccccagctgttctggaacgccggctgccagatggtggccctgaacttccagaccatggacctggccatgcagatcaacatgggcatgtacgagtacaacggcaagagcggctacagactgaagcccgagttcatgagaagacccgacaagcacttcgaccccttcaccgagggcatcgtggacggcatcgtggccaacaccctgagcgtgaagatcatcagcggccagttcctgagcgacaagaaggtgggcacctacgtggaggtggacatgttcggcctgcccgtggacaccagaagaaaggccttcaagaccaagaccagccagggcaacgccgtgaaccccgtgtgggaggaggagcccatcgtgttcaagaaggtggtgctgcccaccctggcctgcctgagaatcgccgtgtacgaggagggcggcaagttcatcggccacagaatcctgcccgtgcaggccatcagacccggctaccactacatctgcctgagaaacgagagaaaccagcccctgaccctgcccgccgtgttcgtgtacatcgaggtgaaggactacgtgcccgacacctacgccgacgtgatcgaggccctgagcaaccccatcagatacgtgaacctgatggagcagagagccaagcagctggccgccctgaccctggaggacgaggaggaggtgaagaaggaggccgaccccggcgagacccccagcgaggcccccagcgaggccagaaccacccccgccgagaacggcgtgaaccacaccaccaccctgacccccaagccccccagccaggccctgcacagccagcccgcccccggcagcgtgaaggcccccgccaagaccgaggacctgatccagagcgtgctgaccgaggtggaggcccagaccatcgaggagctgaagcagcagaagagcttcgtgaagctgcagaagaagcactacaaggagatgaaggacctggtgaagagacaccacaagaagaccaccgacctgatcaaggagcacaccaccaagtacaacgagatccagaacgactacctgagaagaagagccgccctggagaagagcgccaagaaggacagcaagaagaagagcgagcccagcagccccgaccacggcagcagcaccatcgagcaggacctggccgccctggacgccgagatgacccagaagctgatcgacctgaaggacaagcagcagcagcagctgctgaacctgagacaggagcagtactacagcgagaagtaccagaagagagagcacatcaagctgctgatccagaagctgaccgacgtggccgaggagtgccagaacaaccagctgaagaagctgaaggagatctgcgagaaggagaagaaggagctgaagaagaagatggacaagaagagacaggagaagatcaccgaggccaagagcaaggacaagagccagatggaggaggagaagaccgagatgatcagaagctacatccaggaggtggtgcagtacatcaagagactggaggaggcccagagcaagagacaggagaagctggtggagaagcacaaggagatcagacagcagatcctggacgagaagcccaagctgcaggtggagctggagcaggagtaccaggacaagttcaagagactgcccctggagatcctggagttcgtgcaggaggccatgaagggcaagatcagcgaggacagcaaccacggcagcgcccccctgagcctgagcagcgaccccggcaaggtgaaccacaagacccccagcagcgaggagctgggcggcgacatccccggcaaggagttcgacacccccctgtag

SEQ ID NO: 185096 - DNA, 3411 bp, Artificial Sequence
  derived and/or modified sequence
acccaggaccccaagctgagagagctgctggacgtgggcaacatcggcagactggagcagagaatgatcaccgtggtgtacggccccgacctggtgaacatcagccacctgaacctggtggccttccaggaggaggtggccaaggagtggaccaacgaggtgttcagcctggccaccaacctgctggcccagaacatgagcagagacgccttcctggagaaggcctacaccaagctgaagctgcaggtgacccccgagggcagaatccccctgaagaacatctacagactgttcagcgccgacagaaagagagtggagaccgccctggaggcctgcagcctgcccagcagcagaaacgacagcatcccccaggaggacttcacccccgaggtgtacagagtgttcctgaacaacctgtgccccagacccgagatcgacaacatcttcagcgagttcggcgccaagagcaagccctacctgaccgtggaccagatgatggacttcatcaacctgaagcagagagaccccagactgaacgagatcctgtacccccccctgaagcaggagcaggtgcaggtgctgatcgagaagtacgagcccaacaacagcctggccagaaagggccagatcagcgtggacggcttcatgagatacctgagcggcgaggagaacggcgtggtgagccccgagaagctggacctgaacgaggacatgagccagcccctgagccactacttcatcaacagcagccacaacacctacctgaccgccggccagctggccggcaacagcagcgtggagatgtacagacaggtgctgctgagcggctgcagatgcgtggagctggactgctggaagggcagaaccgccgaggaggagcccgtgatcacccacggcttcaccatgaccaccgagatcagcttcaaggaggtgatcgaggccatcgccgagtgcgccttcaagaccagccccttccccatcctgctgagcttcgagaaccacgtggacagccccaagcagcaggccaagatggccgagtactgcagactgatcttcggcgacgccctgctgatggagcccctggagaagtaccccctggagagcggcgtgcccctgcccagccccatggacctgatgtacaagatcctggtgaagaacaagaagaagagccacaagagcagcgagggcagcggcaagaagaagctgagcgagcaggccagcaacacctacagcgacagcagcagcatgttcgagcccagcagccccggcgccggcgaggccgacaccgagagcgacgacgacgacgacgacgacgactgcaagaagagcagcatggacgagggcaccgccggcagcgaggccatggccaccgaggagatgagcaacctggtgaactacatccagcccgtgaagttcgagagcttcgagatcagcaagaagagaaacaagagcttcgagatgagcagcttcgtggagaccaagggcctggagcagctgaccaagagccccgtggagttcgtggagtacaacaagatgcagctgagcagaatctaccccaagggcaccagagtggacagcagcaactacatgccccagctgttctggaacgccggctgccagatggtggccctgaacttccagaccatggacctggccatgcagatcaacatgggcatgtacgagtacaacggcaagagcggctacagactgaagcccgagttcatgagaagacccgacaagcacttcgaccccttcaccgagggcatcgtggacggcatcgtggccaacaccctgagcgtgaagatcatcagcggccagttcctgagcgacaagaaggtgggcacctacgtggaggtggacatgttcggcctgcccgtggacaccagaagaaaggccttcaagaccaagaccagccagggcaacgccgtgaaccccgtgtgggaggaggagcccatcgtgttcaagaaggtggtgctgcccaccctggcctgcctgagaatcgccgtgtacgaggagggcggcaagttcatcggccacagaatcctgcccgtgcaggccatcagacccggctaccactacatctgcctgagaaacgagagaaaccagcccctgaccctgcccgccgtgttcgtgtacatcgaggtgaaggactacgtgcccgacacctacgccgacgtgatcgaggccctgagcaaccccatcagatacgtgaacctgatggagcagagagccaagcagctggccgccctgaccctggaggacgaggaggaggtgaagaaggaggccgaccccggcgagacccccagcgaggcccccagcgaggccagaaccacccccgccgagaacggcgtgaaccacaccaccaccctgacccccaagccccccagccaggccctgcacagccagcccgcccccggcagcgtgaaggcccccgccaagaccgaggacctgatccagagcgtgctgaccgaggtggaggcccagaccatcgaggagctgaagcagcagaagagcttcgtgaagctgcagaagaagcactacaaggagatgaaggacctggtgaagagacaccacaagaagaccaccgacctgatcaaggagcacaccaccaagtacaacgagatccagaacgactacctgagaagaagagccgccctggagaagagcgccaagaaggacagcaagaagaagagcgagcccagcagccccgaccacggcagcagcaccatcgagcaggacctggccgccctggacgccgagatgacccagaagctgatcgacctgaaggacaagcagcagcagcagctgctgaacctgagacaggagcagtactacagcgagaagtaccagaagagagagcacatcaagctgctgatccagaagctgaccgacgtggccgaggagtgccagaacaaccagctgaagaagctgaaggagatctgcgagaaggagaagaaggagctgaagaagaagatggacaagaagagacaggagaagatcaccgaggccaagagcaaggacaagagccagatggaggaggagaagaccgagatgatcagaagctacatccaggaggtggtgcagtacatcaagagactggaggaggcccagagcaagagacaggagaagctggtggagaagcacaaggagatcagacagcagatcctggacgagaagcccaagctgcaggtggagctggagcaggagtaccaggacaagttcaagagactgcccctggagatcctggagttcgtgcaggaggccatgaagggcaagatcagcgaggacagcaaccacggcagcgcccccctgagcctgagcagcgaccccggcaaggtgaaccacaagacccccagcagcgaggagctgggcggcgacatccccggcaaggagttcgacacccccctgtag

SEQ ID NO: 185097 - protein, 396 aa, Artificial Sequence
  derived and/or modified sequence
MELDHRTSGGLHAYPGPRGGQVAKPNVILQIGKCRAEMLEHVRRTHRHLLAEVSKQVERELKGLHRSVGKLESNLDGYVPTSDSQRWKKSIKACLCRCQETIANLERWVKREMHVWREVFYRLERWADRLESTGGKYPVGSESARHTVSVGVGGPESYCHEADGYDYTVSPYAITPPPAAGELPGQEPAEAQQYQPWVPGEDGQPSPGVDTQIFEDPREFLSHLEEYLRQVGGSEEYWLSQIQNHMNGPAKKWWEFKQGSVKNWVEFKKEFLQYSEGTLSREAIQRELDLPQKQGEPLDQFLWRKRDLYQTLYVDADEEEIIQYVVGTLQPKLKRFLRHPLPKTLEQLIQRGMEVQDDLEQAAEPAGPHLPVEDEAETLTPAPNSESVASDRTQPE

SEQ ID NO: 185098 - DNA, 2985 bp, Artificial Sequence
  derived and/or modified sequence
tcgggcacggcgtcctccctccgcagcagccgagccggacctgcctccccgggcgtgctccgccggccccgccgccggcccgcagcgacagacaggcgctccccgcagctccgcacgggacccaggccgccggaccccagcgccggaccaccctctgtccgccccgaggagtttgccgcctgccggagcacctgcgcacagatggagctggaccaccggaccagcggcgggctccacgcctaccccgggccgcggggcgggcaggtggccaagcccaacgtgatcctgcagatcgggaagtgccgggccgagatgctggagcacgtgcggcggacgcaccggcacctgctggccgaggtgtccaagcaggtggagcgcgagctgaaggggctgcaccggtcggtcgggaagctggagagcaacctggacggctacgtgcccacgagcgactcgcagcgctggaagaagtccatcaaggcctgcctgtgccgctgccaggagaccatcgccaacctggagcgctgggtcaagcgcgagatgcacgtgtggcgcgaggtgttctaccgcctggagcgctgggccgaccgcctggagtccacgggcggcaagtacccggtgggcagcgagtcagcccgccacaccgtttccgtgggcgtggggggtcccgagagctactgccacgaggcagacggctacgactacaccgtcagcccctacgccatcaccccgcccccagccgctggcgagctgcccgggcaggagcccgccgaggcccagcagtaccagccgtgggtccccggcgaggacgggcagcccagccccggcgtggacacgcagatcttcgaggaccctcgagagttcctgagccacctagaggagtacttgcggcaggtgggcggctctgaggagtactggctgtcccagatccagaatcacatgaacgggccggccaagaagtggtgggagttcaagcagggctccgtgaagaactgggtggagttcaagaaggagttcctgcagtacagcgagggcacgctgtcccgagaggccatccagcgcgagctggacctgccgcagaagcagggcgagccgctggaccagttcctgtggcgcaagcgggacctgtaccagacgctctacgtggacgcggacgaggaggagatcatccagtacgtggtgggcaccctgcagcccaagctcaagcgtttcctgcgccaccccctgcccaagaccctggagcagctcatccagaggggcatggaggtgcaggatgacctggagcaggcggccgagccggccggcccccacctcccggtggaggatgaggcggagaccctcacgcccgcccccaacagcgagtccgtggccagtgaccggacccagcccgagtagagggcatcccggagcccccagcctgcccactacatccagcctgtggctttgcccaccaggacttttgagctggggctgactcctgcaggggaagccctggtccagctgggtgccccctcgagctccgggcggactcgcacacactcgtgtcatccagatgtgagcaccgcacccagcggcaaagagccctcccccctgcagggctccacccatcaccctccctccgtctgtctttccggcctggaccccaccctccacactctcaggccatcacagaacaccccagcttcctcattctgctacaacacccaggccctctggacatccagaaaaccaagtgtccggatggcaggggccagcggccaccaagctcatgggacacccagagcagaagctagggcagagccaatgctgagggagcctcgacttccggcgccgccgccctctcccggcatccgcagagccagctgacgccctccctgcctcccagggcagctggccagcctcgggcagcgcggccccctcctcccaggggagagtagaagtcgcacacgcagcagagcagacctgatgtcccggtgcttcctggcccctcagctccagtgattcacgcccgcctggagaagaatcagagctcagctcatgactcacccatggcaggcggagggtcccagaggggctgagtcctcaaatccggctgaggcagcagctggcaccatcagagccaggagagtgacaacaggtctcaaggttcccacaaagtctttgctgctgtgctgggcaccacccacccctcaccttgcaggctgcctgcgtgggaggcgaagtcccaggacagcccagaggggggctacagagaggagtcggctgcagcagagggcaggagccccagcttagccctgagcgccagcgcgaggaccagggcctgccactaagcccgccccgctggccgccagctgcccgtccccagagccactgcagcaggagtcgggccctgcctccctcccagcagggaaaccccgcccgctgccaggccatcctctctgccagaggctttcatgagccccaaggctggggccacagctcctacccctgcccagcagccctgagctcagctgcaggaaggacatcccagaagccatggctcctggggcgcttccaggcattctgccctgccccgacaccagaaccctggtgctggtgggccactagcgtctgcagcctaagcaggtgctggctcagggttcatcgttctgccttgtccactgggggaccagccctgcagaccactctgacaagtcttcagcccacaccctgccagccccacagattttatttttgcacataagccataaccaatcctcaaggctggcacaggctttggggaagccctggagcctgtgaagaccctggaaacctcatgaggctgtggccaacccctgccccttgccccacacagaccaggccttaaatgtcggtccaggccctgtgcaccttaccccagagacagactctttttgtaagattttgttaataaaacactgaaacttcaaaaaaaaaaaaaaaaaaaaaaaaaaaaaaaaaaaaaaaaaa

SEQ ID NO: 185099 - DNA, 1191 bp, Artificial Sequence
  derived and/or modified sequence
atggagctagaccaccggacttcaggaggcctgcatgcctatccgggcccacggggtggccaggttgcgaaacccaatgtgattctgcagatcggtaagtgccgggctgagatgctggagcacgtacgtcgtacccatagacatctcctggctgaggtctccaagcaagtggaaagagagctaaagggccttcatcggtctgtggggaaactcgaatctaacctggacggctatgtgcctacctctgactcacagcgatggaagaagtccattaaggcatgcctttgccgctgccaggaaactatcgctaacctggaaagatgggtaaaacgggagatgcacgtctggcgcgaagtgttttatcggctggagcggtgggctgacaggctagagtccactggggggaaatacccagtgggaagtgagtccgcaagacatactgtttctgtgggggtgggtggcccagagtcctactgtcacgaagcagatggttatgattacaccgtatcaccttacgccataaccccgccacctgccgctggagaactaccaggccaagaaccggccgaggcacaacagtatcaaccttgggttcccggggaggacgggcaaccttcgcccggcgttgacacgcagatattcgaagatcctagagagtttttgagtcaccttgaagagtatctgaggcaagtcggaggcagcgaagagtattggctgtcacagatacagaaccatatgaacggtcccgctaaaaagtggtgggaattcaaacagggctctgtgaagaattgggtggagttcaaaaaagagtttttgcaatactccgagggaactctatctagagaagcgattcagcgagagctggatttgccgcaaaagcagggggagccgttggaccagtttctttggcgcaagagagacttgtaccagaccctgtacgtagatgcagacgaggaggaaatcattcagtacgtcgtagggaccttgcaacccaagctgaagcggttcctgaggcacccgctgcccaagaccctggagcagcttattcaacgggggatggaggtgcaggacgatctggaacaagcggctgagcccgccggaccccatcttcctgtggaagacgaggccgaaaccctcactcctgcacccaactctgaatcagttgcttccgaccgaacccaaccagagtag

SEQ ID NO: 185100 - DNA, 1191 bp, Artificial Sequence
  derived and/or modified sequence
atggagctggaccacaggaccagcggcggcctgcacgcctacccaggcccccggggcggccaggtggccaagcccaacgtcatcctgcagattggaaaatgtagagctgagatgctggagcacgtgcggaggacccaccgccacctgctggccgaggtgtccaagcaggtggagcgggagctgaagggcctgcacaggtctgtgggcaagctggagagcaacctggatggctacgtgcccaccagtgacagccagcgctggaagaagagcatcaaggcctgcctgtgccgctgccaggagaccatcgccaacctggagcgctgggtgaagcgggagatgcacgtgtggagggaggtgttctaccgcctggagcgctgggccgaccggctggagagcactggaggcaagtaccctgtgggcagcgagagcgcccggcacacagtgtctgtgggcgtgggcggccctgagagctactgccacgaggctgatggctatgactacacagtgagcccctatgccatcaccccacctcctgctgctggggagctgcccggccaggagcctgctgaggcccagcagtaccagccctgggtgcctggagaagatggccagcccagccctggggtggacacccagatctttgaggacccccgggagttcctgagccacctggaggagtacctgcggcaggtgggcggcagcgaggagtactggctgagccagatccagaaccacatgaatggacctgccaagaagtggtgggagttcaagcagggctctgtgaagaactgggtggagttcaagaaggagttcctgcagtacagcgagggcaccctgagccgggaggccatccagcgggagctggacctgccccagaagcagggcgagcccctggaccagttcctgtggaggaagagggacctgtaccagaccctgtatgtggatgctgatgaggaggagatcatccagtatgtggtgggcaccctgcagcccaagctgaagcgcttcctgcggcaccccctgcccaagaccctggagcagctgatccagaggggcatggaggtgcaggatgacctggagcaggccgctgagcccgccggcccccacctgcctgtggaggatgaggccgagaccctgaccccagcccccaacagcgagagcgtggccagtgacaggacccagcctgagtag

SEQ ID NO: 185101 - DNA, 1191 bp, Artificial Sequence
  derived and/or modified sequence
atggagctggaccaccggaccagcggcggcctgcacgcctaccccggcccccgtggaggtcaagtggcgaagccaaacgtgatcctgcagattggtaagtgcagggccgagatgctggagcacgttcggcgaactcatcgccacctcctggccgaagttagcaaacaagtggaaagggaactgaaagggctccatcgcagtgtgggcaaactagaatccaatctggatggctacgtgcccacaagcgactcccagaggtggaagaaatcgatcaaggcctgtctgtgtcggtgccaggagactattgccaacctcgaaaggtgggtgaaacgagaaatgcacgtttggcgggaggtgttctataggctcgaacgatgggccgataggctcgaaagtacaggagggaagtaccccgttggctctgaatccgcgaggcacaccgtttcggtcggagtaggcggtcctgagagctattgccacgaagcagacgggtacgattatacagtcagtccctatgccatcacacccccacctgctgcaggagaacttcctggacaagagccagccgaggctcagcagtaccagccttgggtgcctggagaggacggtcaaccctcgccgggggtggatactcagatcttcgaggatccacgggagttcctttctcatttggaggaatacctgcgtcaagtgggcgggtccgaagagtactggcttagtcagatccagaatcacatgaatggcccagccaaaaagtggtgggaattcaaacaaggctctgtgaagaattgggtggaatttaaaaaagagtttctacagtattctgagggaactctgagtcgcgaggctatccaaagggaactcgatcttccccaaaagcagggggaacccctggaccaatttctatggcggaagagggacctgtatcagaccctgtatgtggacgcagacgaggaggagattatccagtacgtggtgggaactttgcaaccgaaactgaaacgattcctcagacaccccttaccgaagaccttggaacagttgatccagcgtggtatggaagtacaagatgacctcgagcaggcagctgaaccagccgggcctcaccttccggtagaagacgaagctgaaacgctgactcctgcaccgaattcggagtcagttgccagtgataggacgcagcctgagtag

SEQ ID NO: 185102 - DNA, 1191 bp, Artificial Sequence
  derived and/or modified sequence
atggaactcgaccatcggacctcaggaggccttcacgcgtatcccggtccaagaggcggacaggtggccaagcctaacgttatccttcagattggaaagtgtcgagctgagatgctagagcatgtccgcaggacacatcggcacctgctggcggaagtttccaaacaggtggagcgagagttgaaaggattacaccgatcagtgggcaagttagagtccaaccttgatggctatgtgcctacaagcgactcacagcgctggaaaaagtccatcaaagcctgtctgtgccgttgtcaggagactatcgccaatttggaacgatgggtgaaacgtgagatgcacgtgtggcgtgaagtgttttacagattagagcggtgggcagaccgactggagagtaccggtggtaagtatcccgtgggaagtgaatccgccagacacaccgtcagtgtgggagtcggtggcccagagtcctattgccacgaagctgatgggtatgattatacagtctctccttatgccataactccccctcctgcagcaggcgagttgcctggtcaagagccagcagaagcccagcagtaccagccctgggtgcctggcgaagacggtcaaccatcacctggcgtggatactcagattttcgaagacccgagggaattcctgtcccatcttgaggaatatctcaggcaggtgggcggatcagaagagtattggctgtcgcagatccagaatcatatgaacgggccagctaagaaatggtgggaattcaagcaagggtctgtgaaaaattgggttgagtttaagaaagagttcctccagtatagcgaggggacgctgagccgggaggctattcaaagagaactggatctcccccagaagcagggcgaaccgctggaccagtttctgtggcggaaacgagacctctaccagactttatacgtcgatgctgacgaggaggagatcatccagtacgtcgtggggaccctgcaaccaaagctcaagaggtttcttagacatcccttaccaaaaacactggagcagctgatccaacgcggtatggaggtccaggacgacctcgaacaggccgcagagcctgccggaccccatctccccgttgaggatgaggccgaaactctcacccccgcacccaattccgagtcagtggcttccgataggacacaacccgaatag

SEQ ID NO: 185103 - DNA, 1191 bp, Artificial Sequence
  derived and/or modified sequence
atggagctggaccacagaaccagcggcggcctgcacgcctaccccggccccagaggcggccaggtggccaagcccaacgtgatcctgcagatcggcaagtgcagagccgagatgctggagcacgtgagaagaacccacagacacctgctggccgaggtgagcaagcaggtggagagagagctgaagggcctgcacagaagcgtgggcaagctggagagcaacctggacggctacgtgcccaccagcgacagccagagatggaagaagagcatcaaggcctgcctgtgcagatgccaggagaccatcgccaacctggagagatgggtgaagagagagatgcacgtgtggagagaggtgttctacagactggagagatgggccgacagactggagagcaccggcggcaagtaccccgtgggcagcgagagcgccagacacaccgtgagcgtgggcgtgggcggccccgagagctactgccacgaggccgacggctacgactacaccgtgagcccctacgccatcacccccccccccgccgccggcgagctgcccggccaggagcccgccgaggcccagcagtaccagccctgggtgcccggcgaggacggccagcccagccccggcgtggacacccagatcttcgaggaccccagagagttcctgagccacctggaggagtacctgagacaggtgggcggcagcgaggagtactggctgagccagatccagaaccacatgaacggccccgccaagaagtggtgggagttcaagcagggcagcgtgaagaactgggtggagttcaagaaggagttcctgcagtacagcgagggcaccctgagcagagaggccatccagagagagctggacctgccccagaagcagggcgagcccctggaccagttcctgtggagaaagagagacctgtaccagaccctgtacgtggacgccgacgaggaggagatcatccagtacgtggtgggcaccctgcagcccaagctgaagagattcctgagacaccccctgcccaagaccctggagcagctgatccagagaggcatggaggtgcaggacgacctggagcaggccgccgagcccgccggcccccacctgcccgtggaggacgaggccgagaccctgacccccgcccccaacagcgagagcgtggccagcgacagaacccagcccgagtag

SEQ ID NO: 185104 - DNA, 2943 bp, Artificial Sequence
  derived and/or modified sequence
tcgggcgcggcgtcctccctccgcagcagccgagccggacctgcctccccgggcgtgctccgccggccccgccgccggcccgcagcgacagacaggcgctccccgcagctccgcacgggacccaggccgccggaccccagcgccggaccaccctctgtccgccccgaggagtttgccgcctgccggagcacctgcgcacagatggagctggaccaccggaccagcggcgggctccacgcctaccccgggccgcggggcgggcaggtggccaagcccaacgtgatcctgcagatcgggaagtgccgggccgagatgctggagcacgtgcggcggacgcaccggcacctgctggccgaggtgtccaagcaggtggagcgcgagctgaaggggctgcaccggtcggtcgggaagctggagagcaacctggacggctacgtgcccacgagcgactcgcagcgctggaagaagtccatcaaggcctgcctgtgccgctgccaggagaccatcgccaacctggagcgctgggtcaagcgcgagatgcacgtgtggcgcgaggtgttctaccgcctggagcgctgggccgaccgcctggagtccacgggcggcaagtacccggtgggcagcgagtcagcccgccacaccgtttccgtgggcgtggggggtcccgagagctactgccacgaggcagacggctacgactacaccgtcagcccctacgccatcaccccgcccccagccgctggcgagctgcccgggcaggagcccgccgaggcccagcagtaccagccgtgggtccccggcgaggacgggcagcccagccccggcgtggacacgcagatcttcgaggaccctcgagagttcctgagccacctagaggagtacttgcggcaggtgggcggctctgaggagtactggctgtcccagatccagaatcacatgaacgggccggccaagaagtggtgggagttcaagcagggctccgtgaagaactgggtggagttcaagaaggagttcctgcagtacagcgagggcacgctgtcccgagaggccatccagcgcgagctggacctgccgcagaagcagggcgagccgctggaccagttcctgtggcgcaagcgggacctgtaccagacgctctacgtggacgcggacgaggaggagatcatccagtacgtggtgggcaccctgcagcccaagctcaagcgtttcctgcgccaccccctgcccaagaccctggagcagctcatccagaggggcatggaggtgcaggatgacctggagcaggcggccgagccggccggcccccacctcccggtggaggatgaggcggagaccctcacgcccgcccccaacagcgagtccgtggccagtgaccggacccagcccgagtagagggcatcccggagcccccagcctgcccactacatccagcctgtggctttgcccaccaggacttttgagctggggctgactcctgcaggggaagccctggtccagctgggtgccccctcgagctccgggcggactcgcacacactcgtgtcatccagatgtgagcaccgcacccagcggcaaagagccctcccccctgcagggctccacccatcaccctccctccgtctgtctttccggcctggaccccaccctccacactctcaggccatcacagaacaccccagcttcctcattctgctacaacacccaggccctctggacatccagaaaaccaagtgtccggatggcaggggccagcggccaccaagctcatgggacacccagagcagaagctagggcagagccaatgctgagggagcctcgacttccggcgccgccgccctctcccggcatccgcagagccagctgacgccctccctgcctcccagggcagctggccagcctcgggcagcgcggccccctcctcccaggggagagtagaagtcgcacacgcagcagagcagacctgatgtcccggtgcttcctggcccctcagctccagtgattcacgcccgcctggagaagaatcagagctcagctcatgactcacccatggcaggcggagggtcccagaggggctgagtcctcaaatccggctgaggcagcagctggcaccatcagagccaggagagtgacaacaggtctcaaggttcccacaaagtctttgctgctgtgctgggcaccacccacccctcaccttgcaggctgcctgcgtgggaggcgaagtcccaggacagcccagaggggggctacagagaggagtcggctgcagcagagggcaggagccccagcttagccctgagcgccagcgcgaggaccagggcctgccactaagcccgccccgctggccgccagctgcccgtccccagagccactgcagcaggagtcgggccctgcctccctcccagcagggaaaccccgcccgctgccaggccatcctctctgccagaggctttcatgagccccaaggctggggccacagctcctacccctgcccagcagccctgagctcagctgcaggaaggacatcccagaagccatggctcctggggcgcttccaggcattctgccctgccccgacaccagaaccctggtgctggtgggccactagcgtctgcagcctaagcaggtgctggctcagggttcatcgttctgccttgtccactgggggaccagccctgcagaccactctgacaagtcttcagcccacaccctgccagccccacagattttatttttgcacataagccataaccaatcctcaaggctggcacaggctttggggaagccctggagcctgtgaagaccctggaaacctcatgaggctgtggccaacccctgccccttgccccacacagaccaggccttaaatgtcggtccaggccctgtgcaccttaccccagagacagactctttttgtaagattttgttaataaaacactgaaacttc

SEQ ID NO: 185105 - protein, 1006 aa, Artificial Sequence
  derived and/or modified sequence
MAEQESLEFGKADFVLMDTVSMPEFMANLRLRFEKGRIYTFIGEVVVSVNPYKLLNIYGRDTIEQYKGRELYERPPHLFAIADAAYKAMKRRSKDTCIVISGESGAGKTEASKYIMQYIAAITNPSQRAEVERVKNMLLKSNCVLEAFGNAKTNRNDNSSRFGKYMDINFDFKGDPIGGHINNYLLEKSRVIVQQPGERSFHSFYQLLQGGSEQMLRSLHLQKSLSSYNYIHVGAQLKSSINDAAEFRVVADAMKVIGFKPEEIQTVYKILAAILHLGNLKFVVDGDTPLIENGKVVSIIAELLSTKTDMVEKALLYRTVATGRDIIDKQHTEQEASYGRDAFAKAIYERLFCWIVTRINDIIEVKNYDTTIHGKNTVIGVLDIYGFEIFDNNSFEQFCINYCNEKLQQLFIQLVLKQEQEEYQREGIPWKHIDYFNNQIIVDLVEQQHKGIIAILDDACMNVGKVTDEMFLEALNSKLGKHAHFSSRKLCASDKILEFDRDFRIRHYAGDVVYSVIGFIDKNKDTLFQDFKRLMYNSSNPVLKNMWPEGKLSITEVTKRPLTAATLFKNSMIALVDNLASKEPYYVRCIKPNDKKSPQIFDDERCRHQVEYLGLLENVRVRRAGFAFRQTYEKFLHRYKMISEFTWPNHDLPSDKEAVKKLIERCGFQDDVAYGKTKIFIRTPRTLFTLEELRAQMLIRIVLFLQKVWRGTLARMRYKRTKAALTIIRYYRRYKVKSYIHEVARRFHGVKTMRDYGKHVKWPSPPKVLRRFEEALQTIFNRWRASQLIKSIPASDLPQVRAKVAAVEMLKGQRADLGLQRAWEGNYLASKPDTPQTSGTFVPVANELKRKDKYMNVLFSCHVRKVNRFSKVEDRAIFVTDRHLYKMDPTKQYKVMKTIPLYNLTGLSVSNGKDQLVVFHTKDNKDLIVCLFSKQPTHESRIGELVGVLVNHFKSEKRHLQVNVTNPVQCSLHGKKCTVSVETRLNQPQPDFTKNRSGFILSVPGN

SEQ ID NO: 185106 - protein, 198 aa, Artificial Sequence [sequence omitted]

SEQ ID NO: 185107 - DNA, 3021 bp, Artificial Sequence
  derived and/or modified sequence
atggctgagcaggaatctctggagttcggaaaggctgatttcgtacttatggataccgtcagtatgccagagttcatggctaaccttcgactaaggtttgagaagggcaggatctacacatttatcggagaagtggtggtgtccgtgaatccctataagctgctaaacatctatgggagagacactatcgagcaatacaaggggagagaattgtacgaaagacccccacatctgttcgcgatagctgacgcagcatataaagcaatgaagcgacgctcaaaagacacctgcattgtcatcagcggcgaaagcggcgccggcaagactgaggctagcaagtacattatgcagtacatagccgccatcaccaacccttctcagcgggcagaggttgagcgggtaaaaaatatgttgctcaagagcaattgcgtgttggaggctttcggcaatgccaaaacaaacaggaacgacaatagctccaggtttggtaaatatatggatatcaacttcgattttaaaggcgatcctataggcggccacatcaacaactatttactggaaaagtcaagagtgattgtgcagcagcctggcgaacgcagctttcacagcttttaccaactgctacaagggggctccgagcaaatgctacggtcactgcatttacagaagtccctgtccagctacaattacatccacgttggagcccaactgaagagttctatcaatgacgccgctgaattcagagtagtggccgacgcaatgaaggttataggcttcaaaccagaagagattcagactgtatacaaaatacttgctgctatattgcacctgggaaatctcaaattcgttgtagacggagacacgcccttgattgaaaacgggaaggtggttagcattattgcggaactcctgtccacgaagactgacatggttgagaaggccctgctctaccggacggtagctaccgggcgggacatcattgacaaacaacatacagagcaggaagcatcttatggcagagacgcctttgctaaagcgatctatgagaggctcttctgctggatagtgactaggattaatgatatcatagaggtcaagaattatgataccactatccacgggaaaaatactgttatcggggtcttagacatatatggctttgagatctttgacaataacagcttcgaacagttttgtatcaattactgcaacgaaaagttgcagcagctgttcatccagttagtgctgaagcaagaacaggaggagtatcaacgtgagggcatcccctggaagcacatagattatttcaacaatcagatcatcgtcgatcttgtagagcagcaacataagggtattatagccatccttgacgatgcgtgtatgaacgtcggcaaggtcacggacgaaatgtttctggaagcactgaatagcaagctcggcaagcacgcccacttttcgagcagaaaactgtgcgcatccgataaaattttagagttcgatcgggatttccggatcaggcattatgccggggacgtcgtttatagtgtgatcgggtttatcgacaagaataaagacaccctgtttcaggattttaaacggctaatgtacaattcctcaaatccggtcttgaaaaacatgtggcccgaaggaaaactgtcaattaccgaggtcaccaaacgtcctctgacagctgctaccctcttcaaaaatagcatgatcgctcttgtcgacaacctagcaagcaaagagccttattatgtccggtgcatcaagcccaatgataagaaatctccccagatattcgacgacgagcgctgtcgtcatcaagtggagtatctcggactgctcgagaatgtgcgggtgagaagggccgggttcgccttccggcaaacatatgaaaagttcctccacagatacaagatgatctccgagttcacatggccaaaccacgatttaccatccgataaagaagcagttaaaaagctaatagagagatgtggattccaggacgatgtggcctacggcaagacaaagatctttatacggactcccagaaccctcttcacattggaggagttgcgggcccagatgcttattaggattgtgctttttctgcagaaggtttggagaggcacacttgctcggatgcgatataagcgcacaaaagcggccctcaccatcattcgatattaccgacgctataaagtgaaatcatacattcatgaggttgctagacgcttccacggcgtgaaaaccatgagagactacggaaagcacgtgaagtggccctctccgccaaaagtgctcagacgctttgaagaggccttacagactatatttaatagatggagggcctcacagctcatcaaatcaatcccagcatcggatctgccccaagtcagggcaaaagtagcggccgtggaaatgctaaaaggacagagagctgatctgggtttgcaaagggcttgggaaggcaactacttggcctctaagccagatacccctcagaccagcggtacttttgtgccagtggccaatgaactgaaacgtaaggataaatacatgaatgtgctgttctcatgtcacgtgcgtaaagtgaaccggttcagcaaagtcgaggaccgcgccatcttcgtgacagaccgacacctgtataagatggatccaaccaaacaatataaagttatgaagactatcccactttataacctgaccgggctgtccgtaagcaacggcaaagaccagcttgtagtgttccatactaaggacaacaaagatctgattgtctgcctgttttcgaaacagcctacccacgagtcgcggatcggcgaattggtgggtgttttggtgaaccattttaagagtgagaaacggcatcttcaggtaaacgttactaaccccgtccaatgttctctccacgggaaaaaatgtacagtaagtgtggagacgcggctgaaccagccacagccggatttcaccaagaatcggtctggttttatcctgagcgtgccaggaaattag

SEQ ID NO: 185108 - DNA, 597 bp, Artificial Sequence
  derived and/or modified sequence
atgctgaaaggccaaagggctgatttgggcctccagcgcgcctgggaggggaattacttagcctcaaagcccgacaccccgcaaacatctggaaccttcgtgcctgtggccaatgagcttaaaaggaaggataaatacatgaacgtgctgttttcgtgccatgtaaggaaggttaaccggtttagtaaggtggaagatcgagcgatattcgtcaccgaccgacatctgtataaaatggatcccactaaacaatacaaggtgatgaaaaccattccgctctacaacctgacggggctgtccgtatccaacggcaaggaccaactggtggtctttcataccaaagataacaaagacctaatcgtatgtctgttttccaaacagccaacccatgagagcaggataggcgagctcgttggtgtgttagttaaccactttaagtcagaaaagaggcacttgcaagtcaacgtgaccaacccggttcagtgtagcctgcacggtaagaaatgcacagtgagcgtggaaactaggctgaaccagcctcagcccgacttcacaaagaatcgcagtggctttatcctatcagtcccaggtaactag

SEQ ID NO: 185109 - DNA, 3021 bp, Artificial Sequence
  derived and/or modified sequence
atggccgagcaggagagcctggagtttgggaaggctgactttgtgctgatggacacagtgtccatgcctgagttcatggccaacctgcggctgcgctttgagaagggccgcatctacaccttcatcggggaggtggtggtgtctgtgaacccctacaagctgctgaacatctacggccgggacaccatcgagcagtacaagggccgggagctgtatgaaagaccaccccacctgtttgccatcgcagatgctgcctacaaggccatgaagagaagaagcaaggacacctgcatcgtcatctctggagagagcggggccggcaagacagaggccagcaagtacatcatgcagtacatcgccgccatcaccaaccccagccagagagctgaggtggagcgggtgaagaacatgctgctgaagagcaactgtgtgctggaggcctttggaaatgccaagaccaacagaaatgacaacagcagcagatttgggaagtacatggacatcaactttgacttcaagggggaccccatcggcggccacatcaacaactacctgctggagaagagcagggtcatcgtgcagcagcccggggagaggagcttccacagcttctaccagctgctgcagggcggcagcgagcagatgctgcggagcctgcacctgcagaagagcctgagcagctacaactacatccacgtgggcgcccagctgaagagcagcatcaatgatgctgctgagttccgggtggtggctgatgccatgaaggtgattggcttcaagccagaggagatccagacagtgtacaagatcctggccgccatcctgcacctgggcaacctgaagtttgtggtggatggagacacccccctgattgaaaatggcaaggtggtgtccatcatcgccgagctgctgagcaccaagacagacatggtggagaaggccctgctgtacagaacagtggccaccggccgggacatcatcgacaagcagcacacagagcaggaggccagctatggaagagatgcctttgccaaggccatctatgaaagactcttctgctggatcgtgacccgcatcaatgacatcatcgaggtgaagaactatgacaccaccatccacggcaagaacacagtgattggagtgctggacatctacggctttgagatctttgacaacaacagctttgagcagttctgcatcaactactgcaatgagaagctgcagcagctgttcatccagctggtgctgaagcaggagcaggaggagtaccagcgggagggcatcccctggaagcacatcgactacttcaacaaccagatcatcgtggacctggtggagcagcagcacaagggcatcatcgccatcctggatgatgcctgcatgaatgtgggcaaggtgacagatgagatgttcctggaggccctgaacagcaagctgggcaagcacgcccacttcagcagcaggaagctgtgtgccagtgacaagatcctggagtttgaccgggacttccgcatccgccactatgctggagatgtggtgtacagcgtgattggcttcatcgacaagaacaaggacaccctcttccaggacttcaagaggctgatgtacaacagcagcaaccctgtgctgaagaacatgtggccagagggcaagctgagcatcacagaggtgaccaagaggcccctgacagctgccaccctcttcaagaacagcatgattgccctggtggacaacctggccagcaaggagccctactacgtgcgctgcatcaagcccaatgacaagaagagcccccagatctttgatgatgagcgctgccgccaccaggtggagtacctgggcctgctggagaatgtgcgggtgcggcgggccggctttgccttccggcagacctatgagaagttcctgcaccgctacaagatgatcagcgagttcacctggcccaaccacgacctgcccagcgacaaggaggccgtgaagaagctgattgagcgctgtggcttccaggatgatgtggcctacggcaagaccaagatcttcatccgcacccccaggaccctcttcaccctggaggagctgcgggcccagatgctgatcagaattgtgctcttcctgcagaaggtgtggaggggcaccctggccaggatgagatacaagaggaccaaggccgccctgaccatcatccgctactaccgccgctacaaggtgaagagctacatccacgaggtggcccggcgcttccacggcgtgaagaccatgagggactatggcaagcacgtgaagtggcccagcccccccaaggtgctgcggagatttgaggaggccctgcagaccatcttcaaccgctggagggccagccagctgatcaagagcatcccagccagtgacctgccccaggtgcgggccaaggtggccgctgtggagatgctgaagggccagagagctgacctgggcctgcagagggcctgggagggcaactacctggccagcaagccagacaccccccagaccagcggcacctttgtgcctgtggccaatgagctgaagaggaaggacaagtacatgaatgtgctcttcagctgccacgtgaggaaggtgaaccgcttcagcaaggtggaggaccgggccatctttgtgacagacagacacctgtacaagatggaccccaccaagcagtacaaggtgatgaagaccatccccctgtacaacctgaccggcctgtctgtgtccaatggcaaggaccagctggtggtgttccacaccaaggacaacaaggacctgattgtgtgcctcttcagcaagcagcccacccatgagagccgcatcggggagctggtgggcgtgctggtgaaccacttcaagtctgagaagaggcacctgcaggtgaatgtgaccaaccctgtgcagtgcagcctgcacggcaagaagtgcaccgtgtctgtggagacccggctgaaccagccccagcctgacttcaccaagaacagaagtggcttcatcctgtctgtgcccggcaactag

SEQ ID NO: 185110 - DNA, 597 bp, Artificial Sequence
  derived and/or modified sequence
atgctgaagggccagagagctgacctgggcctgcagagggcctgggagggcaactacctggccagcaagccagacaccccccagaccagcggcacctttgtgcctgtggccaatgagctgaagaggaaggacaagtacatgaatgtgctcttcagctgccacgtgaggaaggtgaaccgcttcagcaaggtggaggaccgggccatctttgtgacagacagacacctgtacaagatggaccccaccaagcagtacaaggtgatgaagaccatccccctgtacaacctgaccggcctgtctgtgtccaatggcaaggaccagctggtggtgttccacaccaaggacaacaaggacctgattgtgtgcctcttcagcaagcagcccacccatgagagccgcatcggggagctggtgggcgtgctggtgaaccacttcaagtctgagaagaggcacctgcaggtgaatgtgaccaaccctgtgcagtgcagcctgcacggcaagaagtgcaccgtgtctgtggagacccggctgaaccagccccagcctgacttcaccaagaacagaagtggcttcatcctgtctgtgcccggcaactag

SEQ ID NO: 185111 - DNA, 5182 bp, Artificial Sequence
  derived and/or modified sequence
cgcgctggcgccatggcggagcaggagagcctggaattcggcaaggcagacttcgtgctgatggacaccgtctccatgcccgagttcatggccaacctcaggctcagatttgaaaaagggcgcatctatacgttcattggagaagtcgtcgtttctgtgaacccttacaagttgttgaacatctatggaagagacacaattgagcagtataaaggccgtgagctgtatgagagaccgcctcacctttttgctattgcggatgctgcttacaaggctatgaagaggcgatcaaaagacacttgtattgtgatatcaggggaaagtggagctggtaaaacggaagccagtaagtacattatgcagtatattgcggccatcaccaaccccagtcagagagcagaggttgaaagagtgaagaatatgttgcttaagtccaactgtgttttggaagcttttggaaatgccaaaaccaaccgtaatgacaactcaagcaggtttggaaaatacatggatatcaactttgacttcaagggtgaccctattggtgggcatatcaataactacttactagaaaagtctcgagtgattgtgcaacagccaggagaaagaagctttcattctttctatcagctactccaaggaggttcagaacaaatgctacgctctctacatctccagaaatccctttcatcctacaactatattcatgtgggagctcaattaaagtcttctatcaatgatgctgccgaattcagagttgttgctgatgccatgaaagtcattggcttcaaacctgaggagatccaaacagtgtataagattttggctgctattctgcacttgggaaatttaaaatttgtagtagatggtgacacgcctcttattgagaatggcaaagtagtatctatcatagcagaattgctctctactaagacagatatggttgagaaagcccttctttaccggactgtggccacaggccgtgacatcattgacaagcagcacacagaacaagaggccagctacggcagagacgcctttgccaaggcaatatatgagcgccttttttgttggatcgttactcgcatcaatgatattattgaggtcaagaactatgacaccacaatccatgggaaaaacactgttattggtgtcttggatatctatggctttgaaatctttgacaacaacagttttgaacaattctgtatcaattactgcaatgagaaactgcagcagctatttattcagctggttctgaagcaagaacaagaggaataccagcgggaagggatcccctggaaacatattgactacttcaacaatcagatcattgttgacctcgtggagcaacagcacaaagggatcattgcaatccttgatgatgcttgcatgaatgtcggcaaagtcaccgatgaaatgtttcttgaagcacttaacagtaaattgggcaaacacgcccatttttccagccgaaagctctgtgcctcagacaaaattctggagtttgatcgagattttcgaattcgacattatgcaggcgatgtagtctattctgtcattggttttattgacaaaaataaagatactttatttcaagatttcaagcgccttatgtataacagttcaaatcctgtgctcaagaatatgtggcctgaaggcaaactgagcattacagaggtgaccaagcgacctctgactgctgctaccttgtttaagaattctatgattgctctagtagacaaccttgcatcaaaggaaccatattacgttcgttgcatcaaacccaatgacaagaaatctccacagatatttgatgatgaacgctgccggcaccaagtagaatatcttggactactggaaaatgtgagagtgcgtcgggcaggatttgccttccgccagacatacgagaagtttcttcacaggtataagatgatctctgaattcacctggcccaaccatgaccttccttcagacaaagaggctgtcaagaaactaattgaacggtgtggttttcaggatgatgtagcttatgggaagaccaaaattttcattcgaacaccccgaacattgtttaccttggaagaactccgtgcccagatgctcataaggattgtcctctttctacaaaaggtgtggcggggcaccctggcccgcatgcggtacaaaagaaccaaggcagctctgacaataatcaggtactaccggcgctacaaagtgaagtcgtacatccacgaggtggccagacgcttccatggcgtcaagaccatgcgagactacgggaagcacgtgaagtggccaagccctcctaaagttcttcgccgttttgaggaggccctgcagacgattttcaatagatggagagcatcccagctcatcaagagcattccggcctcagacctgccccaggtcagggcaaaggttgcagccgtggaaatgttgaagggtcaaagggctgacctcgggctccagagggcctgggagggcaactatcttgcttcaaagccagatacacctcagacctcaggcacttttgtccctgttgctaatgaattgaaacggaaggacaaatacatgaatgtcctcttttcctgtcacgtccgtaaggtaaatcgatttagtaaggtggaagacagagcaatttttgtcactgaccgtcacctgtataaaatggatcccactaaacagtacaaggtgatgaagactatccctctatacaatttgactggtctgagtgtctccaatggaaaggaccaacttgtagtgttccatacgaaagacaacaaagacctcattgtctgcctcttcagcaaacagccaacccatgagagtcgaattggagaacttgttggagtgctggtgaatcatttcaagagtgagaagcgccaccttcaagtgaacgtcaccaacccagtacagtgcagcctgcacgggaagaagtgcaccgtctccgtggagacgcggctcaaccagccccagcccgacttcaccaagaatcgctcgggcttcatcctcagcgtgcccgggaactgacgccccgcggaggcctggcccggagcccggccacactccgagtcctgggtcccagtccagctgctgcctcccaacccatgcccgctagaaacctgctgcgagggcccctcccagaggagccccgcccctgtaagatttccttcctggttttctgcctttggtatcatcttcctctgtccttactgtccacggtccctgttcaataagccaaagaccctggtgccccgcccagacccctgggctgacgtccagaccaatctcaccccagaggcaactggatggtgcctttagttggtgcggatgccccgtggccaggtcaagtcagagcacctggacaggtgtcctccctgctgctgaccctgcagagggaaggggtggggatgcaggaccccactctgcgggagccccatagccacctctcttgcccaaggtgagccagccctggggacccagctcagggaggctctgctcagagttcggcggacccaccccaacccaactcccagccgccagccaaagccactgggtgagcagagtcacccacagggccagcccctcagccaggagccagtggcaggagcggaacagcccatccagcagagtgagtccatccttcccaggttctcccctgggagactccctttgccaccaaggcccccaccagggcctctgaccaccgctctggagaggacagtgtggcatgctccaaggatcatcttacttaactcgcagcctgtggctgtggtcctcttatagatactttcaccgtttgcagggttgctaatcagatacctgctgtcaccacacttgggtcaggaaccctaatgagaacggggagctgccagggtgagggcagccctcagggtcggccgctttccctctggaccacctcccgctgcgtttcctactcagagaaacagcaagggcggggtcaagacacgggatgacgggaagcaggaagcggggcagcagcacagcgtggggtcctggcactgcaggccaggccaggatgcccaccccgccctctacacggccccttggggcctgcgcccgtgaaactggtgccagggagcactgccagcttgccagtttctgcccagcaaaagcacgtatgcttcaggggccttctgagaccaccttccccactgagccccagctgctgagaaggccttgagggaagtagaggctgggagcaaatgccccatgcggtgagaggatgaggggagcctacgcctcaggcatgtggtgagaggatgagggggagggagccaacgcctcaggtggagtgggcagaggtgcaagagagggatgtactgaagcttcttcccgtcctgccacagacacttctcctgccttcccaccctgacccggcagaacccaccaagtgcctgtgtgcagcctcctgtgcctcacccagggcctgaccccagagtggtcccaacaacccggtctcatgcccactccccatccctgcttcccaaaaattgcactgtgtgcagtttgcaacaaagaatcccgctggcatcctgtccttgggaaccctttctcattctccaagcctggtcagctgcctgcacaggcagaggtgccctcagcccagattagcaacactcatagttttgccaattaccagtagacactagtggaaccatctaactggaacttcctctctccttccacttatttcctcaaacttgttgctttacactagacacatgcaaatgtatgttttaaacacaccaaaacagatcatgccaaatgagttgcctgtcaaaggctggagggcaggaggagggcctgggtttgggttctttcctcccagcctttggatggtgccttgggccccttagccccagcgccagggcctcccagctgaggccacaggacaagcacttttttatgatgtactaaaagccacagtatgtggcaactgcaaaaggatcaggaatttagggtatgatctcggtcacgtgtcccgggcgctgaggggaaaggaagcgggcatgattgtagacaatgagggggttctcttgatgtaatgaaatgcaattttatggtttggtgcaaaaactcctattttccagtaaattaactttatttctaaagcatattttgatttgccatcaagagcaataaagcattaaatctt

SEQ ID NO: 185112 - DNA, 3481 bp, Artificial Sequence
  derived and/or modified sequence
gaagaggcgatcaaaagacacttgtattgtgatatcaggggaaagtggagctggtaaaacggaagccagtaagtacattatgcagtatattgcggccatcaccaaccccagtcagagagcagaggttgaaagagtgaagaatatgttgcttaagtccaactgtgttttggaagcttttggaaatgccaaaaccaaccgtaatgacaactcaagcaggtttggaaaatacatggatatcaactttgacttcaagggtgaccctattggtgggcatatcaataactacttactagaaaagtctcgagtgattgtgcaacagccaggagaaagaagctttcattctttctatcagctactccaaggaggttcagaacaaatgctacgctctctacatctccagaaatccctttcatcctacaactatattcatgtgggagctcaattaaagtcttctatcaatgatgctgccgaattcagagttgttgctgatgccatgaaagtcattggcttcaaacctgaggagatccaaacagtgtataagattttggctgctattctgcacttgggaaatttaaaatttgtagtagatggtgacacgcctcttattgagaatggcaaagtagtatctatcatagcagaattgctctctactaagacagatatggttgagaaagcccttctttaccggactgtggccacaggccgtgacatcattgacaagcagcacacagaacaagaggccagctacggcagagacgcctttgccaaggcaatatatgagcgccttttttgttggatcgttactcgcatcaatgatattattgaggtcaagaactatgacaccacaatccatgggaaaaacactgttattggtgtcttggatatctatggctttgaaatctttgacaacaacagttttgaacaattctgtatcaattactgcaatgagaaactgcagcagctatttattcagctggttctgaagcaagaacaagaggaataccagcgggaagggatcccctggaaacatattgactacttcaacaatcagatcattgttgacctcgtggagcaacagcacaaagggatcattgcaatccttgatgatgcttgcatgaatgtcggcaaagtcaccgatgaaatgtttcttgaagcacttaacagtaaattgggcaaacacgcccatttttccagccgaaagctctgtgcctcagacaaaattctggagtttgatcgagattttcgaattcgacattatgcaggcgatgtagtctattctgtcattggttttattgacaaaaataaagatactttatttcaagatttcaagcgccttatgtataacagttcaaatcctgtgctcaagaatatgtggcctgaaggcaaactgagcattacagaggtgaccaagcgacctctgactgctgctaccttgtttaagaattctatgattgctctagtagacaaccttgcatcaaaggaaccatattacgttcgttgcatcaaacccaatgacaagaaatctccacagatatttgatgatgaacgctgccggcaccaagtagaatatcttggactactggaaaatgtgagagtgcgtcgggcaggatttgccttccgccagacatacgagaagtttcttcacaggtataagatgatctctgaattcacctggcccaaccatgaccttccttcagacaaagaggctgtcaagaaactaattgaacggtgtggttttcaggatgatgtagcttatgggaagaccaaaattttcattcgaacaccccgaacattgtttaccttggaagaactccgtgcccagatgctcataaggattgtcctctttctacaaaaggtgtggcggggcaccctggcccgcatgcggtacaaaagaaccaaggcagctctgacaataatcaggtactaccggcgctacaaagtgaagtcgtacatccacgaggtggccagacgcttccatggcgtcaagaccatgcgagactacgggaagcacgtgaagtggccaagccctcctaaagttcttcgccgttttgaggaggccctgcagacgattttcaatagatggagagcatcccagctcatcaagagcattccggcctcagacctgccccaggtcagggcaaaggttgcagccgtggaaatgttgaagggtcaaagggctgacctcgggctccagagggcctgggagggcaactatcttgcttcaaagccagatacacctcagacctcaggcacttttgtccctgttgctaatgaattgaaacggaaggacaaatacatgaatgtcctcttttcctgtcacgtccgtaaggtaaatcgatttagtaaggtggaagacagagcaatttttgtcactgaccgtcacctgtataaaatggatcccactaaacagtacaaggtgatgaagactatccctctatacaatttgactggtctgagtgtctccaatggaaaggaccaacttgtagtgttccatacgaaagacaacaaagacctcattgtctgcctcttcagcaaacagccaacccatgagagtcgaattggagaacttgttggagtgctggtgaatcatttcaagagtgagaagcgccaccttcaagtgaacgtcaccaacccagtacagtgcagcctgcacgggaagaagtgcaccgtctccgtggagacgcggctcaaccagccccagcccgacttcaccaagaatcgctcgggcttcatcctcagcgtgcccgggaactgacgccccgcggaggcctggcccggagcccggccacactccgagtcctgggtcccagtccagctgctgcctcccaacccatgcccgctagaaacctgctgcgagggcccctcccagaggagccccgcccctgtggtcctcttatagatacctgcacaggcagaggtgccctcagcccagattagcaacactcatagttttgccaattaccagtagacactagtggaaccatctaactggaacttcctctctccttccacttatttcctcaaacttgttgctttacactagacacatgcaaatgtatgttttaaacacaccaaaacagatcatgccaaatgagttgcctgtcaaaggctggagggcaggaggagggcctgggtttgggttctttcctcccagcctttggatggtgccttgggccccttagccccagcgccagggcctcccagctgaggccacaggacaagcacttttttatgatgtactaaaagccacagtatgtggcaactgcaaaaggatcaggaatttagggtatgatctcggtcacgtgtcccgggcgctgaggggaaaggaagcgggcatgattgtagacaatgagggggttctcttgatgtaatgaaatgcaattttatggtttggtgcaaaaactcctattttccagtaaattaactttatttctaaagcatattttgatttgccatcaagagcaataaagcattaaatctt

SEQ ID NO: 185113 - DNA, 3021 bp, Artificial Sequence
  derived and/or modified sequence
atggccgagcaggagagcctggagttcggcaaggccgacttcgtgctcatggataccgttagcatgccagagttcatggctaacttacggttgaggttcgaaaagggtcgcatttacacatttataggagaggttgtggtatctgtcaacccctacaaactgctgaacatctacgggagggacactatcgagcaatataaaggccgtgaactttacgaacggcccccccatcttttcgccatcgccgacgccgcatacaaggcaatgaagcggagaagcaaagatacttgtattgtgattagcggcgaatctggggccggtaagacagaagcaagtaagtatatcatgcaatacatcgctgctatcacgaatccctcccaaagggcagaggtagagagagtgaagaatatgctcctgaaatcgaattgtgtactcgaggcattcgggaacgcgaagacgaatcgcaatgacaactcgtctcggtttggcaaatacatggacatcaatttcgactttaagggagaccccattgggggacacatcaataattatctgctggagaaaagccgcgttatcgtgcagcagccaggcgaacgatcctttcatagtttttaccagcttctgcaggggggaagcgagcagatgctgcgctcgctgcacttacagaagagcctgtcatcttataactatatccatgtcggagcacaactgaagtcctctattaatgatgccgctgaatttagggttgtggctgatgctatgaaggtcatcgggttcaagcccgaggaaatccaaaccgtatacaagatactggcagctatcctccacctgggaaacttgaaattcgtagtcgacggcgacactccactgattgaaaatggaaaagtggtctccatcatcgccgaactcctgtctactaagaccgacatggttgagaaagctctgctgtatagaacagtagctaccgggagagacatcattgacaagcagcatactgaacaggaagcgagctacggacgagatgcattcgctaaagccatatacgagaggctgttctgttggatcgtgacaagaattaacgacataatcgaggtgaagaactacgacacaacaattcacgggaaaaacaccgtgatcggtgtcctggatatttatgggtttgagatctttgacaataatagcttcgagcagttttgcataaattattgcaatgagaagctgcaacaactgtttattcagcttgtgttgaagcaggaacaggaggagtaccaaagggaaggtatcccctggaagcatatcgattatttcaacaatcaaatcattgtcgatcttgtcgagcagcagcacaaagggattatcgccatcctagatgacgcatgtatgaacgtcggcaaggtcacagatgagatgtttttggaggccttgaactctaaactcggcaagcatgctcacttctcctccaggaaactatgtgctagcgacaaaatcctggaatttgaccgcgacttccgtatccgtcactacgctggagacgtagtctattctgtgatcggcttcattgataaaaacaaggacaccctgtttcaggactttaaacgtctgatgtacaactccagcaacccagtcctaaaaaatatgtggcctgagggcaaactcagcatcacagaagtgaccaaaagaccactgaccgctgccacactctttaaaaactctatgattgctcttgtggataatctcgccagtaaagaaccatattacgtgagatgcatcaagcctaatgacaaaaaaagccctcaaatatttgatgacgagcggtgccggcatcaggtggaatacctggggcttctcgagaatgtaagggtgcgtagagctgggttcgcctttcgacagacctacgagaagtttctgcatagatacaagatgattagcgagttcacttggccgaaccacgacctgccctctgacaaagaggctgtaaaaaagctgatcgaacgatgcggattccaggatgacgttgcttacgggaagactaaaatcttcatcaggactccacgtacactctttactctggaagaacttcgcgctcagatgctgattaggattgtcctcttcctgcagaaggtgtggcgtgggaccttagcacgcatgcgctataagcgcacaaaagctgcacttacaattattcggtattaccggaggtacaaagtgaagtcgtatattcacgaggtggcccgccgcttccatggggtaaaaactatgcgagactacgggaagcacgtgaagtggccaagcccacctaaagtcctgagacgctttgaggaagccctgcaaaccatatttaacagatggcgcgctagtcagctaatcaaatcaattcctgcaagtgacctgccccaagtcagggctaaggttgctgctgtggagatgctgaaaggccaacgagctgaccttggcctgcagagggcgtgggagggaaactatctcgcatcaaaacccgatacgccgcaaacatccgggaccttcgtgcccgttgctaacgaacttaagaggaaagacaagtatatgaacgtgctgtttagttgtcacgtccggaaagtaaaccggttctctaaagttgaagaccgcgcaatctttgtgacagaccgtcacctgtataaaatggacccaacaaaacaatacaaggtgatgaagaccatcccactctacaatctgaccggattgtcagtgtccaatggtaaggaccagctcgtcgtgtttcacaccaaggacaacaaggacctgattgtctgtttgttctccaaacagcctacccatgagtccagaattggcgaactggttggagtattggtgaaccatttcaaaagcgagaagaggcatctccaggttaatgtgactaatcctgtacagtgttctctccacggcaagaagtgtacagtctccgtggagaccaggctgaatcagccacagccggatttcaccaaaaatcgttctggcttcatcctgtccgtgcctgggaattag

SEQ ID NO: 185114 - DNA, 597 bp, Artificial Sequence
  derived and/or modified sequence
atgctgaagggccagcgggccgacctgggcctgcagcgggcctgggaaggcaattatttagccagcaaacctgacacaccacagacttctggcactttcgtgcccgtggccaacgaactgaagcggaaggataagtatatgaatgtactcttctcctgtcacgttcggaaggtgaacagattttctaaagtagaggatcgcgctatattcgtgaccgatcgccatctctacaagatggatcctaccaaacagtacaaagtgatgaagacaatcccactatataacctgaccgggctgtcagtttccaacggtaaggatcagctggtggtgttccacaccaaggacaacaaagacctaatagtttgtctgttttccaagcaacccacacacgagagcagaatcggagagctggtgggggtgttggtgaatcatttcaagtctgagaagcgacaccttcaggtaaacgtgaccaatccagtgcagtgcagtttacatggcaagaagtgcacagtgtccgtcgaaacaaggctgaaccagcctcagccagatttcacaaaaaacaggagcggtttcatcctcagcgttcctggaaactag

SEQ ID NO: 185115 - DNA, 3021 bp, Artificial Sequence
  derived and/or modified sequence
atggccgaacaagagtccctggagttcggcaaagctgactttgttttgatggatacagttagtatgccagaatttatggcaaacctccgattgcggttcgagaagggacgtatctacaccttcatcggggaagtagtcgtttctgtgaatccctacaagctcctcaacatctatgggagagacaccatcgaacagtacaagggtcgtgaactgtacgaacgcccaccacatcttttcgcaatcgcagacgctgcttataaggccatgaagcgcagatctaaggatacctgcatcgttataagtggcgaatctggcgctggaaaaacagaagcatcaaagtatataatgcagtatatcgctgccattacaaatccaagccagcgggcagaggtggaaagggttaaaaatatgcttctgaagagcaactgcgtgctggaggcattcggtaacgcaaaaactaaccgcaacgacaattcaagtcggttcggcaaatacatggatattaactttgatttcaaaggcgatccgatagggggacacatcaataattatctgctggagaaatcaagagttatcgtgcagcagcccggtgaacggtctttccactcattttaccagctgctgcaaggcggatcagaacaaatgctgcgatcccttcatttgcaaaagagcctctcaagctataactacatccacgtcggtgcgcaactgaagagctctattaatgatgctgccgagttccgcgttgttgccgacgctatgaaggttataggtttcaagccagaagagatccaaacagtgtataagatcctcgcagccatacttcacctaggtaatcttaagtttgtggtcgatggagacaccccactgatcgagaacggaaaagtcgtctccattatagcggagctgttgtcaactaaaactgacatggtggagaaagctttgctctatcgcacagtcgctactgggagggacatcatagacaagcagcacactgaacaggaagcatcatacgggagggacgccttcgctaaagctatctacgaaaggctcttctgttggatcgtgacacgaattaacgatataattgaggtcaagaactacgacaccaccatccatggaaagaacactgtgattggtgtgttggatatctacgggttcgaaatctttgacaacaacagcttcgagcagttttgtattaattattgcaatgagaaactccagcaattgtttatccaactggtgttgaaacaggagcaggaagaatatcaaagggaaggcataccttggaaacacattgattatttcaataaccagattatcgtggacctggttgagcagcagcacaaggggattatcgccatcctagatgatgcttgcatgaacgtggggaaggtcactgacgagatgttcttggaggccctgaattcaaagttagggaaacacgctcacttcagttcacgcaaactctgcgcttcggataagatcctggagttcgatcgagacttcagaatccgccattacgccggagacgtcgtgtacagtgtgatagggttcatcgacaaaaacaaggatacattgttccaggactttaaaagactaatgtacaactccagcaatccagtgttgaagaatatgtggcccgaggggaaactgtccatcaccgaggtgaccaagaggcccttaacagccgctactctctttaagaacagtatgatagctctcgtggacaatctcgcgtctaaagagccttactatgtgcgctgcataaagcctaacgacaagaaatccccacaaatctttgacgatgagcggtgtaggcaccaagtcgagtatttagggttactcgagaatgttcgagttagaagagccggttttgcgttccggcagacctatgaaaagttcctccatcgttataagatgatcagtgagttcacgtggcccaaccacgatctgccgtcagataaggaggccgtgaagaaactgatcgaacgttgtggctttcaggatgacgttgcctacggaaagacgaaaatattcatcagaacaccccgaacactgttcaccctggaggagctgcgggctcagatgttgatcaggattgtattattcctccagaaggtgtggagaggcacgcttgcacgaatgcggtacaagagaacgaaagcggctctcaccatcatcaggtactacagaagatataaagtgaagtcctatatccatgaagttgcacgaaggttccacggggtcaagaccatgcgggattacgggaagcacgtcaaatggccatcccccccaaaggtgttacgaagatttgaggaggcacttcaaaccatttttaatcgttggcgggcatcacagttaattaagtctatccccgcatccgatctgcctcaggtccgggcaaaagtggcggcagttgagatgttgaaaggccagagggcagacctcggcctccaaagggcttgggaggggaattatctggcttccaaacctgataccccacagacaagcgggacctttgtgcctgtggccaacgagcttaaacgcaaggataagtatatgaacgtgctgttctcctgccatgttagaaaagtgaacaggttttcgaaggtggaagatcgcgctatcttcgtgactgaccgccatttatacaaaatggatccaaccaaacagtacaaggtaatgaaaacaatacccctgtacaaccttactgggctatcagtatctaatggcaaagaccagctcgttgtttttcacaccaaggataacaaagacttaatcgtgtgtctgttctctaaacagccgactcacgagtcccgcattggagaactcgttggcgtcctggtaaaccattttaagtccgagaaaaggcatctgcaggtcaacgttactaatccagttcaatgtagtttacacggaaagaagtgcacggtgagtgtggagacccgactcaatcaacctcagcccgactttacaaagaatcgttccggatttattctgagcgtcccagggaactag

SEQ ID NO: 185116 - DNA, 597 bp, Artificial Sequence
  derived and/or modified sequence
atgctgaaaggacagcgagctgacctcggactacagcgtgcctgggaaggaaactatctagcaagcaaacctgatacgccccagaccagcgggacattcgttcctgtagcaaacgaactgaagaggaaggataaatatatgaacgtcctgttctcatgccacgtcagaaaagtgaaccgcttctctaaagtcgaagatcgtgcaatttttgtgacagatcgtcatctttacaagatggacccaacgaagcagtacaaggtaatgaagaccattccactttacaacctaaccggcttgagcgtcagcaacgggaaggatcagctagtggtgttccataccaaggataacaaggacctgatcgtctgcttattcagcaagcagcctactcatgagagtaggatcggcgagctcgtgggcgtcctggtgaatcacttcaagtccgaaaagcgccatctccaggtgaatgtaacaaatcctgtccagtgcagcctacatgggaagaaatgcacagtatccgtggaaacacgactgaaccaaccacagcccgacttcaccaaaaatagaagcggattcatccttagtgtgcccggtaactag

SEQ ID NO: 185117 - DNA, 3021 bp, Artificial Sequence
  derived and/or modified sequence
atggccgagcaggagagcctggagttcggcaaggccgacttcgtgctgatggacaccgtgagcatgcccgagttcatggccaacctgagactgagattcgagaagggcagaatctacaccttcatcggcgaggtggtggtgagcgtgaacccctacaagctgctgaacatctacggcagagacaccatcgagcagtacaagggcagagagctgtacgagagacccccccacctgttcgccatcgccgacgccgcctacaaggccatgaagagaagaagcaaggacacctgcatcgtgatcagcggcgagagcggcgccggcaagaccgaggccagcaagtacatcatgcagtacatcgccgccatcaccaaccccagccagagagccgaggtggagagagtgaagaacatgctgctgaagagcaactgcgtgctggaggccttcggcaacgccaagaccaacagaaacgacaacagcagcagattcggcaagtacatggacatcaacttcgacttcaagggcgaccccatcggcggccacatcaacaactacctgctggagaagagcagagtgatcgtgcagcagcccggcgagagaagcttccacagcttctaccagctgctgcagggcggcagcgagcagatgctgagaagcctgcacctgcagaagagcctgagcagctacaactacatccacgtgggcgcccagctgaagagcagcatcaacgacgccgccgagttcagagtggtggccgacgccatgaaggtgatcggcttcaagcccgaggagatccagaccgtgtacaagatcctggccgccatcctgcacctgggcaacctgaagttcgtggtggacggcgacacccccctgatcgagaacggcaaggtggtgagcatcatcgccgagctgctgagcaccaagaccgacatggtggagaaggccctgctgtacagaaccgtggccaccggcagagacatcatcgacaagcagcacaccgagcaggaggccagctacggcagagacgccttcgccaaggccatctacgagagactgttctgctggatcgtgaccagaatcaacgacatcatcgaggtgaagaactacgacaccaccatccacggcaagaacaccgtgatcggcgtgctggacatctacggcttcgagatcttcgacaacaacagcttcgagcagttctgcatcaactactgcaacgagaagctgcagcagctgttcatccagctggtgctgaagcaggagcaggaggagtaccagagagagggcatcccctggaagcacatcgactacttcaacaaccagatcatcgtggacctggtggagcagcagcacaagggcatcatcgccatcctggacgacgcctgcatgaacgtgggcaaggtgaccgacgagatgttcctggaggccctgaacagcaagctgggcaagcacgcccacttcagcagcagaaagctgtgcgccagcgacaagatcctggagttcgacagagacttcagaatcagacactacgccggcgacgtggtgtacagcgtgatcggcttcatcgacaagaacaaggacaccctgttccaggacttcaagagactgatgtacaacagcagcaaccccgtgctgaagaacatgtggcccgagggcaagctgagcatcaccgaggtgaccaagagacccctgaccgccgccaccctgttcaagaacagcatgatcgccctggtggacaacctggccagcaaggagccctactacgtgagatgcatcaagcccaacgacaagaagagcccccagatcttcgacgacgagagatgcagacaccaggtggagtacctgggcctgctggagaacgtgagagtgagaagagccggcttcgccttcagacagacctacgagaagttcctgcacagatacaagatgatcagcgagttcacctggcccaaccacgacctgcccagcgacaaggaggccgtgaagaagctgatcgagagatgcggcttccaggacgacgtggcctacggcaagaccaagatcttcatcagaacccccagaaccctgttcaccctggaggagctgagagcccagatgctgatcagaatcgtgctgttcctgcagaaggtgtggagaggcaccctggccagaatgagatacaagagaaccaaggccgccctgaccatcatcagatactacagaagatacaaggtgaagagctacatccacgaggtggccagaagattccacggcgtgaagaccatgagagactacggcaagcacgtgaagtggcccagcccccccaaggtgctgagaagattcgaggaggccctgcagaccatcttcaacagatggagagccagccagctgatcaagagcatccccgccagcgacctgccccaggtgagagccaaggtggccgccgtggagatgctgaagggccagagagccgacctgggcctgcagagagcctgggagggcaactacctggccagcaagcccgacaccccccagaccagcggcaccttcgtgcccgtggccaacgagctgaagagaaaggacaagtacatgaacgtgctgttcagctgccacgtgagaaaggtgaacagattcagcaaggtggaggacagagccatcttcgtgaccgacagacacctgtacaagatggaccccaccaagcagtacaaggtgatgaagaccatccccctgtacaacctgaccggcctgagcgtgagcaacggcaaggaccagctggtggtgttccacaccaaggacaacaaggacctgatcgtgtgcctgttcagcaagcagcccacccacgagagcagaatcggcgagctggtgggcgtgctggtgaaccacttcaagagcgagaagagacacctgcaggtgaacgtgaccaaccccgtgcagtgcagcctgcacggcaagaagtgcaccgtgagcgtggagaccagactgaaccagccccagcccgacttcaccaagaacagaagcggcttcatcctgagcgtgcccggcaactag

SEQ ID NO: 185118 - DNA, 597 bp, Artificial Sequence
  derived and/or modified sequence
atgctgaagggccagagagccgacctgggcctgcagagagcctgggagggcaactacctggccagcaagcccgacaccccccagaccagcggcaccttcgtgcccgtggccaacgagctgaagagaaaggacaagtacatgaacgtgctgttcagctgccacgtgagaaaggtgaacagattcagcaaggtggaggacagagccatcttcgtgaccgacagacacctgtacaagatggaccccaccaagcagtacaaggtgatgaagaccatccccctgtacaacctgaccggcctgagcgtgagcaacggcaaggaccagctggtggtgttccacaccaaggacaacaaggacctgatcgtgtgcctgttcagcaagcagcccacccacgagagcagaatcggcgagctggtgggcgtgctggtgaaccacttcaagagcgagaagagacacctgcaggtgaacgtgaccaaccccgtgcagtgcagcctgcacggcaagaagtgcaccgtgagcgtggagaccagactgaaccagccccagcccgacttcaccaagaacagaagcggcttcatcctgagcgtgcccggcaactag

SEQ ID NO: 185119 - protein, 1609 aa, Artificial Sequence
  derived and/or modified sequence
MAGLRRPQPGCYCRTAAAVNLLLGVFQVLLPCCRPGGAQGQAIEPLPNVVELWQAEEGELLLPTQGDSEEGLEEPSQEQSFSDKLFSGKGLHFQPSVLDFGIQFLGHPVAKILHAYNPSRDSEVVVNSVFAAAGHFHVPPVPCRVIPAMGKTSFRIIFLPTEEGSIESSLFINTSSYGVLSYHVSGIGTRRISTEGSAKQLPNAYFLLPKVQSIQLSQMQAETTNTSLLQVQLECSLHNKVCQQLKGCYLESDDVLRLQMSIMVTMENFSKEFEENTQHLLDHLSIVYVATDESETSDDSAVNMYILHSGNSLIWIQDIRHFSQRDALSLQFEPVLLPTSTTNFTKIASFTCKATSCDSGIIEDVKKTTHTPTLKACLFSSVAQGYFRMDSSATQFHIETHENTSGLWSIWYRNHFDRSVVLNDVFLSKETKHMLKILNFTGPLFLPPGCWNIFSLKLAVKDIAINLFTNVFLTTNIGAIFAIPLQIYSAPTKEGSLGFEVIAHCGMHYFMGKSKAGNPNWNGSLSLDQSTWNVDSELANKLYERWKKYKNGDVCKRNVLGTTRFAHLKKSKESESFVFFLPRLIAEPGLMLNFSATALRSRMIKYFVVQNPSSWPVSLQLLPLSLYPKPEALVHLLHRWFGTDMQMINFTTGEFQLTEACPYLGTHSEESRFGILHLHLQPLEMKRVGVVFTPADYGKVTSLILIRNNLTVIDMIGVEGFGARELLKVGGRLPGAGGSLRFKVPESTLMDCRRQLKDSKQILSITKNFKVENIGPLPITVSSLKINGYNCQGYGFEVLDCHQFSLDPNTSRDISIVFTPDFTSSWVIRDLSLVTAADLEFRFTLNVTLPHHLLPLCADVVPGPSWEESFWRLTVFFVSLSLLGVILIAFQQAQYILMEFMKTRQRQNASSSSQQNNGPMDVISPHSYKSNCKNFLDTYGPSDKGRGKNCLPVNTPQSRIQNAAKRSPATYGHSQKKHKCSVYYSKHKTSTAAASSTSTTTEEKQTSPLGSSLPAAKEDICTDAMRENWISLRYASGINVNLQKNLTLPKNLLNKEENTLKNTIVFSNPSSECSMKEGIQTCMFPKETDIKTSENTAEFKERELCPLKTSKKLPENHLPRNSPQYHQPDLPEISRKNNGNNQQVPVKNEVDHCENLKKVDTKPSSEKKIHKTSREDMFSEKQDIPFVEQEDPYRKKKLQEKREGNLQNLNWSKSRTCRKNKKRGVAPVSRPPEQSDLKLVCSDFERSELSSDINVRSWCIQESTREVCKADAEIASSLPAAQREAEGYYQKPEKKCVDKFCSDSSSDCGSSSGSVRASRGSWGSWSSTSSSDGDKKPMVDAQHFLPAGDSVSQNDFPSEAPISLNLSHNICNPMTVNSLPQYAEPSCPSLPAGPTGVEEDKGLYSPGDLWPTPPVCVTSSLNCTLENGVPCVIQESAPVHNSFIDWSATCEGQFSSAYCPLELNDYNAFPEENMNYANGFPCPADVQTDFIDHNSQSTWNTPPNMPAAWGHASFISSPPYLTSTRSLSPMSGLFGSIWAPQSDVYENCCPINPTTEHSTHMENQAVVCKEYYPGFNPFRAYMNLDIWTTTANRNANFPLSRDSSYCGNV

SEQ ID NO: 185120 - DNA, 4830 bp, Artificial Sequence
  derived and/or modified sequence
atggccggcctgagaagaccccagcccggctgctactgcagaaccgccgccgccgtgaacctgctgctgggcgtgttccaggtgctgctgccctgctgcagacccggcggcgcccagggccaggccatcgagcccctgcccaacgtggtggagctgtggcaggccgaggagggcgagctgctgctgcccacccagggcgacagcgaggagggcctggaggagcccagccaggagcagagcttcagcgacaagctgttcagcggcaagggcctgcacttccagcccagcgtgctggacttcggcatccagttcctgggccaccccgtggccaagatcctgcacgcctacaaccccagcagagacagcgaggtggtggtgaacagcgtgttcgccgccgccggccacttccacgtgccccccgtgccctgcagagtgatccccgccatgggcaagaccagcttcagaatcatcttcctgcccaccgaggagggcagcatcgagagcagcctgttcatcaacaccagcagctacggcgtgctgagctaccacgtgagcggcatcggcaccagaagaatcagcaccgagggcagcgccaagcagctgcccaacgcctacttcctgctgcccaaggtgcagagcatccagctgagccagatgcaggccgagaccaccaacaccagcctgctgcaggtgcagctggagtgcagcctgcacaacaaggtgtgccagcagctgaagggctgctacctggagagcgacgacgtgctgagactgcagatgagcatcatggtgaccatggagaacttcagcaaggagttcgaggagaacacccagcacctgctggaccacctgagcatcgtgtacgtggccaccgacgagagcgagaccagcgacgacagcgccgtgaacatgtacatcctgcacagcggcaacagcctgatctggatccaggacatcagacacttcagccagagagacgccctgagcctgcagttcgagcccgtgctgctgcccaccagcaccaccaacttcaccaagatcgccagcttcacctgcaaggccaccagctgcgacagcggcatcatcgaggacgtgaagaagaccacccacacccccaccctgaaggcctgcctgttcagcagcgtggcccagggctacttcagaatggacagcagcgccacccagttccacatcgagacccacgagaacaccagcggcctgtggagcatctggtacagaaaccacttcgacagaagcgtggtgctgaacgacgtgttcctgagcaaggagaccaagcacatgctgaagatcctgaacttcaccggccccctgttcctgccccccggctgctggaacatcttcagcctgaagctggccgtgaaggacatcgccatcaacctgttcaccaacgtgttcctgaccaccaacatcggcgccatcttcgccatccccctgcagatctacagcgcccccaccaaggagggcagcctgggcttcgaggtgatcgcccactgcggcatgcactacttcatgggcaagagcaaggccggcaaccccaactggaacggcagcctgagcctggaccagagcacctggaacgtggacagcgagctggccaacaagctgtacgagagatggaagaagtacaagaacggcgacgtgtgcaagagaaacgtgctgggcaccaccagattcgcccacctgaagaagagcaaggagagcgagagcttcgtgttcttcctgcccagactgatcgccgagcccggcctgatgctgaacttcagcgccaccgccctgagaagcagaatgatcaagtacttcgtggtgcagaaccccagcagctggcccgtgagcctgcagctgctgcccctgagcctgtaccccaagcccgaggccctggtgcacctgctgcacagatggttcggcaccgacatgcagatgatcaacttcaccaccggcgagttccagctgaccgaggcctgcccctacctgggcacccacagcgaggagagcagattcggcatcctgcacctgcacctgcagcccctggagatgaagagagtgggcgtggtgttcacccccgccgactacggcaaggtgaccagcctgatcctgatcagaaacaacctgaccgtgatcgacatgatcggcgtggagggcttcggcgccagagagctgctgaaggtgggcggcagactgcccggcgccggcggcagcctgagattcaaggtgcccgagagcaccctgatggactgcagaagacagctgaaggacagcaagcagatcctgagcatcaccaagaacttcaaggtggagaacatcggccccctgcccatcaccgtgagcagcctgaagatcaacggctacaactgccagggctacggcttcgaggtgctggactgccaccagttcagcctggaccccaacaccagcagagacatcagcatcgtgttcacccccgacttcaccagcagctgggtgatcagagacctgagcctggtgaccgccgccgacctggagttcagattcaccctgaacgtgaccctgccccaccacctgctgcccctgtgcgccgacgtggtgcccggccccagctgggaggagagcttctggagactgaccgtgttcttcgtgagcctgagcctgctgggcgtgatcctgatcgccttccagcaggcccagtacatcctgatggagttcatgaagaccagacagagacagaacgccagcagcagcagccagcagaacaacggccccatggacgtgatcagcccccacagctacaagagcaactgcaagaacttcctggacacctacggccccagcgacaagggcagaggcaagaactgcctgcccgtgaacaccccccagagcagaatccagaacgccgccaagagaagccccgccacctacggccacagccagaagaagcacaagtgcagcgtgtactacagcaagcacaagaccagcaccgccgccgccagcagcaccagcaccaccaccgaggagaagcagaccagccccctgggcagcagcctgcccgccgccaaggaggacatctgcaccgacgccatgagagagaactggatcagcctgagatacgccagcggcatcaacgtgaacctgcagaagaacctgaccctgcccaagaacctgctgaacaaggaggagaacaccctgaagaacaccatcgtgttcagcaaccccagcagcgagtgcagcatgaaggagggcatccagacctgcatgttccccaaggagaccgacatcaagaccagcgagaacaccgccgagttcaaggagagagagctgtgccccctgaagaccagcaagaagctgcccgagaaccacctgcccagaaacagcccccagtaccaccagcccgacctgcccgagatcagcagaaagaacaacggcaacaaccagcaggtgcccgtgaagaacgaggtggaccactgcgagaacctgaagaaggtggacaccaagcccagcagcgagaagaagatccacaagaccagcagagaggacatgttcagcgagaagcaggacatccccttcgtggagcaggaggacccctacagaaagaagaagctgcaggagaagagagagggcaacctgcagaacctgaactggagcaagagcagaacctgcagaaagaacaagaagagaggcgtggcccccgtgagcagaccccccgagcagagcgacctgaagctggtgtgcagcgacttcgagagaagcgagctgagcagcgacatcaacgtgagaagctggtgcatccaggagagcaccagagaggtgtgcaaggccgacgccgagatcgccagcagcctgcccgccgcccagagagaggccgagggctactaccagaagcccgagaagaagtgcgtggacaagttctgcagcgacagcagcagcgactgcggcagcagcagcggcagcgtgagagccagcagaggcagctggggcagctggagcagcaccagcagcagcgacggcgacaagaagcccatggtggacgcccagcacttcctgcccgccggcgacagcgtgagccagaacgacttccccagcgaggcccccatcagcctgaacctgagccacaacatctgcaaccccatgaccgtgaacagcctgccccagtacgccgagcccagctgccccagcctgcccgccggccccaccggcgtggaggaggacaagggcctgtacagccccggcgacctgtggcccaccccccccgtgtgcgtgaccagcagcctgaactgcaccctggagaacggcgtgccctgcgtgatccaggagagcgcccccgtgcacaacagcttcatcgactggagcgccacctgcgagggccagttcagcagcgcctactgccccctggagctgaacgactacaacgccttccccgaggagaacatgaactacgccaacggcttcccctgccccgccgacgtgcagaccgacttcatcgaccacaacagccagagcacctggaacaccccccccaacatgcccgccgcctggggccacgccagcttcatcagcagccccccctacctgaccagcaccagaagcctgagccccatgagcggcctgttcggcagcatctgggccccccagagcgacgtgtacgagaactgctgccccatcaaccccaccaccgagcacagcacccacatggagaaccaggccgtggtgtgcaaggagtactaccccggcttcaaccccttcagagcctacatgaacctggacatctggaccaccaccgccaacagaaacgccaacttccccctgagcagagacagcagctactgcggcaacgtgtag

SEQ ID NO: 185121 - DNA, 4830 bp, Artificial Sequence
  derived and/or modified sequence
atggcaggactgagacgccctcagcccggatgttactgtcggaccgccgccgcagttaacctgctcctgggcgtgttccaggtcctcctgccgtgctgtagaccaggcggggcgcagggccaggccatcgaacccttgccgaacgtggtcgagctatggcaggctgaggaaggagagctcctcctcccaacacagggggattcagaggaaggtttagaggaaccatcccaggaacagagctttagcgataaattattctctggaaagggcttgcattttcagccttctgtactggacttcggcatacagtttcttgggcatcccgttgcaaagatcctacatgcatacaaccccagtcgggactccgaggtggtggtgaactccgtgttcgccgccgccggccacttccacgtgccacctgtgccatgcagggtgatcccggctatggggaaaacatcttttcgaattatttttctccccactgaggaaggttccatcgagtcttcactgtttataaacaccagctcatatggtgtgctctcctaccacgtgtctgggatcggcacaaggcgcatctccaccgaggggtccgcaaagcaactgccgaatgcctacttcttgctgcctaaagtccagtccattcagctatcccagatgcaagccgaaactaccaacaccagtctgctacaggtgcaactagaatgttctctccacaataaagtatgccagcagctgaaaggctgctatcttgagtccgatgacgttctccggttacagatgtccattatggtcaccatggagaactttagtaaagaattcgaagaaaacacccagcatctactggatcacttgtcaatcgtatatgtggctacagatgagtcagagacttctgatgatagcgccgtaaatatgtacatcctccacagcgggaacagtcttatttggattcaagacataagacacttttctcaaagagacgccctgagtctccagtttgaaccggtgcttcttcccacgagtaccacaaacttcactaaaattgcaagctttacctgcaaggctacatcttgtgattccggcatcatcgaggacgtgaagaaaaccacccacactcccaccctgaaagcttgcctgttctcttcagtggcccagggctattttagaatggacagcagcgccacccagttccatatcgagactcatgagaacacgagcggcctgtggtctatatggtaccgcaaccactttgatcggagcgtggtcctgaatgacgtgtttctatctaaagagacaaagcacatgctgaagattcttaattttactggtccccttttcctgcccccaggatgttggaacatcttcagcctgaagctggctgtcaaggacatcgcgatcaacctttttactaacgtctttcttaccacaaacattggcgccatattcgctatcccactgcagatctacagcgcccccaccaaggaggggagtctggggtttgaagttatcgcgcactgcggtatgcactatttcatgggtaagtcaaaagccggcaaccccaattggaatggatccctgagtcttgaccagtccacctggaacgttgattctgagctggcaaataagttgtatgagcgctggaagaaatacaaaaacggggacgtgtgtaaacgcaacgtcctgggaaccacaagattcgcccacttaaaaaaaagcaaagagtccgaatccttcgtctttttcttgcctcggctgattgccgaacccggcctcatgctgaacttctccgcaactgccctgcgtagccggatgatcaaatattttgtggtccaaaacccatcatcttggcctgtctctttacagctgctgcctctttcactgtaccctaagcccgaagctttggtccaccttctacacagatggttcggtacagatatgcagatgatcaattttaccacaggcgagttccaactgaccgaggcttgcccataccttggtactcattccgaagaatccaggttcggcattctgcacctacatttgcagccactggaaatgaaacgcgtgggagtggtctttacacctgcagactacggaaaagttacttccctgatcctcatccgaaacaacctgaccgtcattgacatgataggtgttgaaggctttggagcgcgcgagctgctgaaggtgggcggcagactacccggcgctggaggaagtctccgcttcaaggttcccgaaagcacattgatggattgtaggagacaactcaaggactctaaacagattttgtcaatcacgaaaaacttcaaggtggagaacatcggcccattgccaatcacagtgtcctcattaaagatcaacggttacaattgccagggttacgggttcgaggtgctggactgtcaccagttttccctcgacccgaatacatctcgcgacatcagtatagtgttcacaccagactttaccagtagctgggtgatccgtgacctcagcttggtgactgccgccgacctcgagttccgattcacactgaatgttacccttccccaccatctcctgccactgtgtgcagatgtcgttcctggtcctagctgggaagaatccttctggcgtctcactgtgttcttcgtgagcttgagcctgctgggcgtcatcctcatagcttttcaacaggcgcagtatatcctcatggagtttatgaaaacacgacagagacagaatgcctccagttccagtcaacaaaacaatggccccatggacgtcatcagtccccattcttacaagagcaattgcaagaacttcctggatacttacggtccaagtgacaaaggcaggggtaaaaactgtctcccagttaatacaccccagtcaagaattcagaacgctgccaagaggagcccagcaacctatggccacagccagaagaaacataaatgcagcgtttactatagcaaacacaaaaccagcactgccgctgcttcttctactagtaccacaacggaagaaaagcaaacatcacctctggggtcctctcttcctgctgccaaggaagatatttgcaccgacgccatgcgagaaaactggattagtctgagatacgcgtcgggtattaatgttaatctgcagaagaatttaaccctgccaaagaatctcctgaacaaggaggaaaacacattgaagaatacaattgtcttctccaaccccagctctgaatgtagcatgaaggaggggatccaaacctgcatgttcccgaaggagactgacataaagacatctgagaacacggctgaattcaaagagagagaactctgccccctcaagacttccaagaagttgcccgagaatcacctgcccagaaattcacctcagtatcatcagcctgatctgccagaaattagtagaaagaacaatgggaacaaccagcaggtgcctgtgaaaaatgaagtggatcactgtgaaaatttgaagaaggtggacaccaagccatctagcgaaaagaagatccacaaaacatcgcgagaggatatgtttagtgaaaaacaggatatcccctttgtggaacaagaggacccgtataggaaaaagaagttgcaagaaaagcgagagggtaatcttcagaacctgaactggtctaagagccgcacctgtcgcaagaataaaaaacgtggcgtggccccagtgagccgcccacccgagcaatccgacctgaagctagtgtgttccgatttcgagcgatctgaacttagtagcgacattaacgtccgcagttggtgtatccaggagagtacccgggaagtatgcaaggcggacgcagaaatagcctcgtctctgcctgcagcccaacgggaagccgaggggtactaccagaagcccgaaaaaaaatgcgtcgacaagttctgctcagactctagcagtgattgcggctcatcttcgggctccgtcagggcctcaaggggttcatggggaagctggtcatctacctcttctagcgatggcgacaagaagcctatggtggacgcacagcatttcctaccagctggtgattcagttagccaaaatgattttcccagtgaagcacctatcagcttgaatctctcacacaacatctgcaacccaatgacagtgaacagcttgccgcaatatgccgagccctcctgtccaagcctcccagccgggccaaccggagtcgaggaggataagggactgtactctcccggagatctgtggcctacccccccggtgtgtgtcacctcatccctaaactgcacactcgagaatggagttccatgcgtcatccaagagtccgcccccgtgcataacagtttcatcgattggtccgctacgtgcgaagggcaattctctagtgcatattgccctcttgaactcaatgactataatgcctttcccgaagaaaacatgaactatgcaaatggctttccctgccccgcagacgtccagacagacttcatcgaccataactcgcagtcaacctggaacacaccgcctaatatgccagccgcgtgggggcatgctagctttatttccagtcctccttaccttactagcacacggagtctgagtccaatgtccggtctgtttggaagtatttgggccccacagagcgacgtttacgagaactgttgtcccatcaaccctactactgaacattctactcatatggagaatcaagcagtagtttgtaaggagtattatccgggtttcaatccctttagggcttacatgaaccttgacatttggacgaccaccgcaaatcgtaacgccaattttccactaagtcgggactcctcatattgtgggaacgtgtag

SEQ ID NO: 185122 - DNA, 5017 bp, Artificial Sequence
  derived and/or modified sequence
agcgagctagcggcgagcgcggcgagcaacggagaggagcgcgagcagcagcatggcggggctccgacgcccgcagcccggctgctactgccgcaccgcggcggccgtgaacctcctgctgggcgtcttccaggtcctgctgccctgctgtcgcccgggaggggctcagggacaagcgattgagccgttgccgaacgtggtggagctgtggcaggcagaagaaggggaactcctgctgcccactcagggtgattctgaagagggtctggaggagccttctcaagaacagagcttctcggacaaactatttagtggaaaaggcttacattttcagccatcagttttagattttggaatacagttcctgggacatcctgtagcaaagattctccatgcttacaaccctagtagggacagcgaggttgtggtgaattcagtgtttgcagctgctggacatttccatgtaccgccagttccctgcagggtaattccagcaatggggaaaacttccttcagaattattttcttacctactgaagaaggaagcattgaaagttccttatttattaatacctcttcgtatggagtcctttcctatcatgtatctggaattggcactcgtagaatctctacagaagggtctgcaaagcagctaccaaatgcttattttctgcttccaaaggtccagagcattcagctgtctcaaatgcaggcagaaaccactaatactagcctcttgcaggtgcaactggaatgcagtttacataataaagtgtgtcagcaattaaagggttgttatctggaatctgatgatgttttgcgtctacaaatgagcataatggtaacaatggaaaacttttcaaaagaatttgaagaaaacacacaacatttgttagatcatctctctattgtttacgtagctacagatgaatctgagacctcagatgattcagcagtaaatatgtatatattacattcaggaaacagccttatatggatacaggatatacgccatttctcacagagagatgctctgtctctgcagtttgaaccagtactactacctacttctacaacaaactttacaaaaattgcttcttttacctgcaaagctacatcatgtgacagtggaattatagaagatgtgaagaaaacaacacacactccaacactaaaagcatgcctcttctcttctgtggctcaggggtattttagaatggactcttctgcaacccagtttcacatagagactcatgagaacacatcaggactttggtcaatatggtaccgcaaccattttgaccgtagtgttgtattaaatgatgtgtttctttccaaggagaccaagcacatgttaaagattctgaatttcactggccctttatttctacctccaggctgttggaatatattttctttgaaacttgctgttaaagacattgccataaatctattcaccaatgtatttttgactacaaacataggtgccatttttgcaatacctctacagatttattcagcaccaaccaaggaagggagtctgggttttgaagtgatagcacattgtggcatgcattatttcatgggaaaatcaaaagcaggaaatcctaattggaatgggagcctttctctggatcaatctacctggaatgtggattctgaacttgcaaataaattgtatgaaagatggaagaaatataaaaatggtgacgtctgcaagaggaatgttttgggaacaactcgatttgctcacttgaagaaatccaaggagtcagagtcctttgttttctttttgcctcgtttgatcgcagagcctggcctcatgttaaacttcagcgcaactgcccttaggagcaggatgatcaagtactttgtggtgcagaacccgtcctcttggccggtctccttgcagctcctgcctctctccttgtaccctaaacccgaagccctagtgcacctgctccacagatggtttggcactgatatgcagatgattaatttcacaactggtgaattccagctcaccgaagcttgcccttacctgggtacgcattctgaggaatccaggtttggcatcctccacttacatctgcagcctttggaaatgaaaagggttggcgtagttttcacacctgctgactatggaaaagttacctcactcatactaatccggaataacttgactgttattgacatgattggcgtggaaggatttggagcaagagagttattaaaagtgggtggaagacttcctggtgcaggaggctcactccgatttaaggtgcccgagtccacgctgatggactgccgtagacaactgaaagacagtaagcaaattttatctattacaaagaactttaaagttgagaatattggacctcttcctataactgtttcgtctctgaaaattaatgggtataactgccaaggttatggattcgaggtgctggattgtcatcagttttccctggacccaaacacatcccgcgatatcagcattgtgttcactccagactttacctcctcctgggtaattcgggacctaagtcttgtaaccgcagcggacctagaatttcgcttcactctcaatgtgactctccctcatcacctgttgcccttgtgtgcagacgtggttccaggacccagctgggaggagtcattttggaggctcacggtcttctttgtcagtttgtccctgttgggtgtgattttaatagccttccaacaagcacagtacattctcatggaattcatgaaaacaagacagaggcaaaatgctagctcctcttcacagcaaaacaatggtcctatggatgtaatcagcccccattcttacaaaagcaattgcaagaactttctcgatacatatggcccctctgataaaggcagggggaagaactgccttccagtgaacactccccaaagcaggatccagaatgctgcaaagaggagcccagccacctatggtcattctcagaagaagcacaaatgctcagtgtattacagtaaacacaaaaccagcacagctgcggccagcagcaccagcacgactactgaggaaaaacagacttcacccctgggcagctcactgcctgctgctaaagaggacatttgcactgatgccatgcgtgagaactggatcagcctcagatatgcaagtggcataaatgtcaacctgcagaagaatttaacccttcccaaaaacttactgaataaagaagaaaacacactgaaaaacacaattgttttcagtaatccttcttcagaatgtagtatgaaggagggaatacagacatgtatgtttcctaaggaaactgacattaaaacttcagagaacacagccgagttcaaggaacgggagctctgtccactgaagacctccaagaaactacctgaaaaccatttaccaagaaactcacctcagtaccaccagccagacttgccagaaatttccaggaaaaataatgggaataaccagcaagtacctgtcaagaatgaagtagatcattgtgaaaatttgaagaaggtggacacaaagccttcttcagaaaagaagattcacaaaacatctagagaagacatgttttctgagaaacaggacatacctttcgtagagcaagaagatccttataggaagaaaaagcttcaggagaaaagagaaggaaatttacaaaatttaaattggagtaaaagtcgaacatgtagaaagaacaagaaaaggggtgttgctccagtctcaaggcctcctgaacagagtgatctaaagcttgtgtgcagtgactttgagaggtctgagctgagcagtgacatcaatgtaagaagctggtgtatacaggaaagcactagggaggtttgtaaagcagatgccgaaattgcaagcagtttacctgctgcccagagagaggcagaaggttactaccagaagcctgagaagaaatgtgtggacaagttctgctccgattccagctctgactgtgggagctcctctggcagcgtgcgtgccagccggggcagctgggggagctggagcagcaccagcagctccgacggggataagaagcccatggtggacgcccagcacttcctgccggccggagacagtgtttcacaaaatgattttccttctgaagctcccatctccttgaatctttctcataacatctgcaatcccatgaccgtgaatagtctcccacaatacgcagagccttcctgtcccagccttcctgccgggcccacaggtgttgaagaagataaaggtctttactcacctggagacctgtggcccactccgccagtgtgtgtgacaagcagcttaaactgcaccctggagaacggcgtgccttgtgtgattcaggagtcggccccggttcataatagtttcattgattggagtgcaacatgcgaaggccagttttccagcgcatactgtccattggaattgaacgattacaatgcctttccagaagaaaacatgaactatgccaatggcttcccctgtcctgcagatgttcagacagactttattgatcacaactctcagtctacctggaacaccccacccaacatgcctgctgcctggggacatgccagtttcatcagctctccgccctacctcacaagcacccgaagcttgtctccaatgtctggactttttggttccatctgggccccgcaaagcgatgtgtatgaaaattgctgccccatcaaccccaccacggaacattcgacccacatggaaaaccaagcggtcgtgtgcaaggaatactacccggggttcaacccgtttcgcgcctatatgaacctggacatatggactaccacagcgaataggaatgcaaatttcccactgtctagagactcgagttactgtgggaatgtgtgaaaataattggatttttaaacaatgtgaataaagaggcttgtgttttgattactagtgtaaactggttattgagatagattatgacattggtggatattttggcacttttatatgaaaataaattttttaatgaaa

SEQ ID NO: 185123 - DNA, 4830 bp, Artificial Sequence
  derived and/or modified sequence
atggccggcctgcggcggccccagcccggctgctactgcaggacagctgctgctgtgaacctgctgctgggcgtcttccaggtgctgctgccctgctgcaggcctggaggagcccagggccaggccatcgagcccctgcccaacgtggtggagctgtggcaggccgaggagggggagctgctgctgcccacccagggcgacagcgaggagggcctggaggagcccagccaggagcagagcttcagtgacaagctgttcagcggcaagggcctgcacttccagcccagcgtgctggactttggcatccagttcctgggccaccctgtggccaagatcctgcacgcctacaaccccagccgggacagcgaggtggtggtgaacagcgtgtttgctgctgctggccacttccacgtgccccctgtgccctgcagggtcatcccagccatgggcaagaccagcttccgcatcatcttcctgcccacagaggagggcagcattgagagcagcctcttcatcaacaccagcagctatggagtgctgagctaccacgtgtctggaattggcacccggcgcatcagcacagagggcagcgccaagcagctgcccaatgcctacttcctgctgcccaaggtgcagagcatccagctgagccagatgcaggccgagaccaccaacaccagcctgctgcaggtgcagctggagtgcagcctgcacaacaaggtgtgccagcagctgaagggctgctacctggagagtgatgatgtgctgcggctgcagatgagcatcatggtgaccatggagaacttcagcaaggagtttgaggagaacacccagcacctgctggaccacctgagcatcgtgtatgtggccacagatgagagcgagaccagtgatgacagcgctgtgaacatgtacatcctgcacagcggcaacagcctcatctggatccaggacatccgccacttcagccagagagatgccctgagcctgcagtttgagcctgtgctgctgcccaccagcaccaccaacttcaccaagatcgccagcttcacctgcaaggccaccagctgtgacagcggcatcattgaagatgtgaagaagaccacccacacccccaccctgaaggcctgcctcttcagctctgtggcccagggctacttcaggatggacagcagcgccacccagttccacatcgagacccatgagaacaccagcggcctgtggagcatctggtacagaaaccactttgacagatctgtggtgctgaatgatgtgttcctgagcaaggagaccaagcacatgctgaagatcctgaacttcaccggccccctcttcctgcccccaggctgctggaacatcttcagcctgaagctggccgtgaaggacatcgccatcaacctcttcaccaacgtgttcctgaccaccaacattggagccatctttgccatccccctgcagatctacagcgcccccaccaaggagggcagcctgggctttgaagtcatcgcccactgcggcatgcactacttcatgggcaagagcaaggccggcaaccccaactggaatggcagcctgagcctggaccagagcacctggaatgtggacagcgagctggccaacaagctgtatgagcgctggaagaagtacaagaatggagatgtgtgcaagagaaatgtgctgggcaccaccaggtttgcccacctgaagaagagcaaggagagcgagagctttgtgttcttcctgccccggctgattgctgagcccggcctgatgctgaacttcagcgccacagccctgcggagcaggatgatcaagtactttgtggtgcagaaccccagctcctggcctgtgtccctgcagctgctgcccctgagcctgtaccccaagccagaggccctggtgcacctgctgcaccgctggtttggaacagacatgcagatgatcaacttcaccaccggggagttccagctgacagaggcctgcccctacctgggcacccacagcgaggagagcagatttggcatcctgcacctgcacctgcagcccctggagatgaagagggtgggcgtggtgttcaccccagctgactatggcaaggtgaccagcctcatcctgatccggaacaacctgactgtgattgacatgattggagtggagggctttggagcccgggagctgctgaaggtgggcggccgcctgcccggggccggcggcagcctgcgcttcaaggtgcctgagagcaccctgatggactgccggcggcagctgaaggacagcaagcagatcctgagcatcaccaagaacttcaaggtggagaacatcggccccctgcccatcaccgtgagcagcctgaagatcaatggctacaactgccagggctacggctttgaggtgctggactgccaccagttcagcctggaccccaacaccagccgggacatcagcatcgtgttcaccccagacttcaccagctcctgggtgatccgggacctgagcctggtgacagctgctgacctggagttccgcttcaccctgaatgtgaccctgccccaccacctgctgcccctgtgtgctgatgtggtgcccggccccagctgggaggagagcttctggaggctgaccgtcttctttgtgtccctgagcctgctgggcgtcatcctgattgccttccagcaggcccagtacatcctgatggagttcatgaagacccggcagaggcagaatgccagcagcagcagccagcagaacaacggccccatggatgtgatcagcccccacagctacaagagcaactgcaagaacttcctggacacctacggccccagcgacaagggccggggcaagaactgcctgcctgtgaacaccccccagagccgcatccagaatgctgccaagaggagccctgccacctacggccacagccagaagaagcacaagtgcagcgtgtactacagcaagcacaagaccagcacagctgctgccagcagcaccagcaccaccacagaggagaagcagaccagccccctgggcagcagcctgcctgctgccaaggaggacatctgcacagatgccatgagggagaactggatcagcctgcgctatgccagcggcatcaacgtgaacctgcagaagaacctgaccctgcccaagaacctgctgaacaaggaggagaacaccctgaagaacaccatcgtgttcagcaaccccagcagcgagtgcagcatgaaggagggcatccagacctgcatgttccccaaggagacagacatcaagaccagcgagaacacagctgagttcaaggagcgggagctgtgccccctgaagaccagcaagaagctgcctgagaaccacctgcccaggaacagcccccagtaccaccagcctgacctgcctgagatcagcaggaagaacaacggcaacaaccagcaggtgcctgtgaagaatgaggtggaccactgtgagaacctgaagaaggtggacaccaagcccagcagcgagaagaagatccacaagaccagccgggaggacatgttttctgagaagcaggacatcccctttgtggagcaggaggacccctacaggaagaagaagctgcaggagaagcgggagggcaacctgcagaacctgaactggagcaagagcaggacctgcaggaagaacaagaagaggggcgtggcccctgtgtccaggcctcctgagcagagcgacctgaagctggtgtgcagcgactttgagaggtctgagctgagcagtgacatcaacgtgcgctcctggtgcatccaggagagcacccgggaggtgtgcaaggcagatgctgagatcgccagcagcctgcctgctgcccagcgggaggccgagggctactaccagaagccagagaagaagtgtgtggacaagttctgcagcgacagcagcagtgactgtggcagcagcagcggctctgtgcgggccagccggggctcctggggctcctggagcagcaccagcagcagtgatggagacaagaagcccatggtggatgcccagcacttcctgcctgctggggacagcgtgtcccagaatgacttccccagcgaggcccccatcagcctgaacctgagccacaacatctgcaaccccatgacagtgaacagcctgccccagtatgcagagcccagctgccccagcctgcctgctggccccactggagtggaggaggacaagggcctgtacagccctggggacctgtggcccaccccacctgtgtgtgtgaccagcagcctgaactgcaccctggagaatggagtgccctgtgtgatccaggagagcgcccctgtgcacaacagcttcatcgactggagcgccacctgtgagggccagttcagcagcgcctactgccccctggagctgaatgactacaatgccttccctgaggagaacatgaactatgccaacggcttcccctgcccagcagatgtgcagacagacttcatcgaccacaacagccagagcacctggaacaccccacccaacatgcctgctgcctggggccacgccagcttcatcagcagccccccctacctgaccagcaccaggagcctgagccccatgagcggcctgtttggcagcatctgggccccccagagtgatgtgtatgagaactgctgccccatcaaccccaccacagagcacagcacccacatggagaaccaggccgtggtgtgcaaggagtactacccaggcttcaaccccttccgggcctacatgaacctggacatctggaccaccacagccaacagaaatgccaacttccccctgagccgggacagcagctactgtggaaatgtgtag

SEQ ID NO: 185124 - DNA, 4830 bp, Artificial Sequence
  derived and/or modified sequence
atggccggcctgcggcggccccagcccggctgctactgccggaccgctgctgccgtaaacctgctcctgggggtgttccaggtactgcttccctgctgtcggcctgggggagcccaaggtcaagcaatcgaaccgctgccaaacgtagtcgagctttggcaggcagaggaaggggagctattgctgccaacacaaggcgacagtgaggagggcttagaagagccgagccaggagcagtctttttccgacaaattgttctccgggaaggggttacactttcaaccaagcgtcctggacttcgggatacagttcctggggcatcccgtggcaaaaatcctgcacgcgtacaatccttcccgagatagtgaagtagtggtgaattcagtgttcgctgctgccgggcacttccacgtacctcccgtgccttgcagggtgattcctgctatggggaaaactagcttccggattattttcttgccaactgaggagggcagcatcgagagcagtctgttcatcaacacgagctcatatggtgtgctctcttatcatgtgtcaggaattggcactcgtaggatcagcactgaggggagcgccaagcagcttcccaatgcctactttctgctgcccaaggtccaaagcattcaactgtcccagatgcaggcggagaccactaacacctcactcctccaggttcagctcgagtgtagcctgcataacaaggtgtgtcagcagcttaagggatgctacctggagtctgacgatgtgttaagattacaaatgtcaatcatggtgactatggagaatttttccaaggagtttgaagagaatacccagcatcttctcgatcatttatccattgtctacgtagcgacagatgagtctgaaaccagcgacgattcagcagttaacatgtacattcttcacagcggcaattctctaatttggatacaggacatccggcacttcagccagagggacgcattatctctgcagttcgagcccgtcctgcttccgacgtccactaccaatttcactaaaatcgctagctttacatgtaaagcaacatcctgcgactcgggtataatagaggatgtcaagaagaccacccacaccccaactttgaaagcctgcctattctcctccgttgcccagggctatttcaggatggattcatccgcgacccaattccacattgaaacccacgaaaacacgtccgggctctggtccatttggtatcgcaatcatttcgacagaagcgtagttttgaatgacgtgttcttatcaaaagagacgaagcacatgctgaaaatacttaatttcactggtcctcttttcctgccacctgggtgttggaacattttcagcctcaaactggctgtaaaagacatcgctataaaccttttcacaaacgtgttcctgacaacaaacattggcgcaattttcgcaatcccactccagatttattccgcacccaccaaggaaggctccctggggtttgaagtgatagcacattgtgggatgcactactttatgggaaaatctaaagcagggaacccaaactggaacggcagtctgtccctcgatcaatcaacctggaacgtcgattcggagttggccaacaagctctatgagcgttggaagaagtacaagaacggggacgtctgcaaaagaaacgtcctggggacaacaaggtttgcccacttaaaaaagtctaaagagagcgagagtttcgtgttcttcttgccgagacttatcgccgagcctggactgatgctcaatttttccgcaacagctttgaggagccgcatgattaagtattttgtggtgcaaaatccgtcatcctggcctgtgtccctccagctgctgcccctgtcactgtaccccaagcctgaagcattggtgcatctcttgcatcggtggttcggaaccgatatgcagatgatcaactttacaactggtgaattccagcttaccgaggcttgcccgtatttaggcacgcactccgaggaatccagattcggtatcctgcacctgcacctacagccgctggagatgaagagagtgggagtggtatttacacctgccgattacgggaaagtgacaagcttgatcctgattcggaataacctaacagttatcgacatgattggagttgaagggttcggtgctcgcgagctgctcaaagtgggcggcaggctgcccggagccggaggctccctcaggtttaaggtaccagagtccaccctgatggattgccggcggcaattgaaggattctaagcaaatcctgagtatcacaaagaatttcaaggttgaaaatattggacctcttcctatcaccgtgtcatcgctcaaaatcaacgggtacaactgtcagggatacggatttgaagttttggactgtcaccagttttctctagaccccaatacctcacgcgacatctcgattgtcttcactccagattttaccagtagctgggtcataagagatctgagcttggtgacagcagcggacctcgaattcaggttcacactaaatgtgactctgccacatcacctactccctctgtgtgctgatgtcgtaccgggcccaagctgggaggagtcgttttggagattgacagtattcttcgtgtctctcagtctcctgggagtcattctcatcgccttccagcaggctcagtatattctgatggaattcatgaagacccgccagcggcagaatgctagttcaagctcgcagcagaataatgggccaatggacgtcatctcccctcactcatataaatccaattgtaaaaattttctagacacatatgggccaagtgataaaggtaggggcaagaactgcctacccgttaataccccccagtcacggatccagaatgctgctaaaaggtccccagctacctatggacacagtcagaaaaaacacaaatgctctgtgtactactcgaagcacaaaaccagtaccgcagccgcctcttcgacgtccaccacaactgaagaaaagcagactagccctctcggatcttctttgcccgccgcgaaagaggacatatgtacagatgctatgagagagaattggatttccttacgatatgccagcggcataaacgtgaacctgcaaaaaaacctgaccctgcctaagaacttattgaacaaagaggaaaacacgctcaaaaacacgattgtgttctccaatccttcttctgaatgttcaatgaaagagggtattcagacttgtatgtttcctaaggagaccgacatcaagacgtcagaaaacacagccgagttcaaggagcgtgaactctgtccattaaagaccagcaagaaacttccggagaatcacctgcctcggaactctccgcagtatcatcagcctgacctacctgagatctctagaaagaataatgggaacaaccagcaggtgcccgttaagaatgaagtcgaccactgcgaaaatctgaaaaaggttgatactaagccatcaagtgaaaagaaaatccacaagacatcccgggaggacatgttttccgaaaaacaggatatcccttttgtggaacaagaggacccatatcgtaaaaagaagttgcaggaaaagcgggagggcaatcttcaaaatctcaattggtctaagagtcggacatgtcggaagaataagaagcgaggcgttgctcctgtgtctcgacctcctgagcaatccgatctcaagctcgtttgcagcgacttcgagcggtccgaacttagctcggatatcaatgtgcgcagttggtgcatccaagagtctacaagggaggtgtgcaaagcggacgcagagatcgcaagctctctcccagccgcacagcgagaggcggaaggctactaccagaaacccgagaagaaatgcgtggacaagttctgctccgactcttcaagcgactgcgggtcatctagcgggtccgtccgcgctagccgaggctcttggggatcatggagcagcactagctcaagcgacggtgacaagaaaccaatggtggacgctcagcacttcctgcctgctggggactccgtgagccagaatgattttccctctgaggcacctatctccctcaatctctcccataacatatgtaatccgatgacagtcaactcgctcccgcagtatgctgaaccgagctgcccatccctgcccgcaggtccaaccggggtggaggaggacaagggactctacagccccggcgatctgtggccgactccacccgtctgcgtcacttcaagcctgaactgcaccttggagaatggagtgccatgtgtcattcaggaatccgccccagttcataactctttcatcgactggtccgctacgtgtgagggccagttttcaagcgcttactgccctttggaactcaacgactataatgcgttccctgaggagaatatgaattacgctaacggctttccttgtcctgccgacgtgcagactgacttcatagatcacaactcccagtctacttggaatactccccccaacatgcctgcagcgtgggggcacgcgtcatttataagcagcccaccgtatctaacctcgaccagatctctctccccaatgagcggcctttttggttcaatctgggctccacagagcgacgtgtatgagaactgttgccctatcaatcctaccacagaacactctacgcacatggagaatcaggcggtggtttgcaaggagtactacccaggattcaaccctttcagggcctatatgaacttagacatatggactacaactgctaaccggaatgctaattttcctcttagccgggactcttcctactgtggaaacgtttag

SEQ ID NO: 185125 - DNA, 4830 bp, Artificial Sequence
  derived and/or modified sequence
atggcaggcctgaggcggcctcagcccggttgttattgtagaactgcggctgccgtaaatcttttgcttggcgtgtttcaggtgttattgccttgctgtcggccaggcggtgcacagggtcaggccatcgaaccattacctaatgtagtcgagttatggcaggccgaggagggggagcttttactccccacacagggagattccgaggaagggctcgaagagccgtcgcaggagcaatctttttccgacaagctattctctgggaagggacttcacttccagcctagcgttcttgactttgggatacagtttttgggccacccagtcgccaagattcttcatgcctataaccctagtagagattctgaagtcgttgtcaactcggtttttgccgctgccggtcatttccatgtaccacccgtgccatgtagggtgatcccagctatggggaagacctcattccgcatcatttttctaccaaccgaggagggcagtattgaaagctcattgtttattaatacctctagctacggggtcctcagctaccacgtttccggcatcgggaccaggcgtatttccacagaaggcagcgcaaagcagctgcctaacgcttacttcctcttaccgaaagtgcagagcatacagttgagtcaaatgcaggctgagacaaccaacacatccctgctgcaggttcagcttgaatgtagtctccacaacaaggtgtgccagcaacttaaaggctgctatctggagtccgatgacgtgctgcgcctgcagatgagcattatggtcaccatggagaatttttctaaggagttcgaggagaacacacaacacttgctagatcatttgagcattgtatacgtcgcaactgatgaatctgaaacatctgacgactctgctgttaacatgtacattttgcattctggtaattccctcatctggatccaggatattagacattttagccagagggatgcgttgtcgctccagtttgagcctgttctgctgccaacatccacgacgaacttcacaaagattgccagcttcacctgtaaggctacaagctgcgacagcggtataatcgaagatgtcaaaaagacgacccacactcccacccttaaggcatgcttgttctcgtcagttgctcaggggtacttccggatggacagctcagctactcaatttcatattgaaactcacgaaaacacatccggcctatggtcaatttggtatcgaaatcacttcgaccggagcgttgtcttgaacgacgttttcctgtctaaagagacgaagcacatgctcaagattctcaatttcactggacctctgtttctgcctcctgggtgttggaacatcttctcgctcaagctggccgtcaaggacatcgcaatcaacctgttcaccaatgtcttccttaccacaaacattggggcaatatttgccattcccttacaaatctatagcgccccaacgaaagaagggtctctgggctttgaggttatagcccactgcgggatgcactacttcatgggtaagtccaaagccggaaaccccaattggaatgggtctctatcactggatcaatctacatggaatgtggattcagagctggcgaataaactgtatgagcgatggaagaagtacaaaaacggcgacgtgtgcaaaagaaacgtcctgggaacaacccgattcgcccacctgaagaagtctaaggagagtgagagtttcgtgttttttctgcctagactgatcgctgaaccagggctcatgctgaacttctccgccacagccctcaggtctaggatgatcaaatatttcgttgttcagaacccctcaagttggcctgtgagtctgcaattgctgccactgagcctgtaccccaagccggaagcactggtacatctccttcaccgttggttcgggaccgacatgcaaatgattaatttcacaaccggcgagttccagcttacagaggcgtgcccctatctgggcacccatagtgaagaatcaaggtttggtattctccatctgcaccttcaacccctggagatgaaacgcgtcggtgtagtattcacacctgcagattatggtaaggtgactagcctcatcctcatccggaacaacttgacagtaatcgacatgatcggggtcgagggttttggcgctcgggagctgctgaaggtgggcggaagactgccaggcgctggcggttccctgcggtttaaggtacccgaatctaccctcatggactgccgcagacagctgaaagactccaaacagatcttgagtataacaaagaattttaaagtggagaatatcgggccactcccgatcacagtctcgtccctgaagattaacggttacaactgccaggggtatgggttcgaagtcttggattgccatcagtttagcttggatccaaacacttcccgggatatcagcattgtgtttacgccagacttcaccagttcatgggttattcgcgacctcagtttggttactgccgctgacctggagtttcggttcacattaaacgtcacattgccacaccaccttctgccactctgcgcagacgttgtgcctggaccttcgtgggaggaatccttctggcgcctgacggtgttctttgtgtcgctgagtctcctgggagtcatcctcatcgcctttcaacaagcgcaatacatacttatggagttcatgaagactaggcaaaggcagaacgccagttcgtctagtcagcaaaataatggccctatggacgtgattagcccacactcgtacaagtccaactgtaaaaatttcctggatacatatggtccatcagataaaggccgaggcaaaaactgcttgcccgtgaatactcctcagtcccgcatccagaacgcggcaaaaaggtctcctgctacatacggccatagtcagaagaagcataagtgttccgtatactattcgaaacataagacctcaaccgccgcagcctcttcgacaagtactaccaccgaggagaaacagacctccccactgggaagtagtttacctgcggcaaaggaggacatctgcacagacgccatgcgggagaactggattagcctacggtatgcaagcggaatcaatgtaaacctgcagaaaaacctgaccctgccaaagaacctgctgaataaggaggaaaacaccctcaagaataccatagtgttttctaatccctcttccgaatgttccatgaaggagggcatacagacttgcatgttcccgaaggagactgatattaaaacaagcgaaaacactgccgaatttaaggagagagagctttgtcctttaaagacttcaaaaaaactgcctgagaatcacttgccaaggaatagcccccagtaccatcagcctgatctccccgaaatttctcggaaaaacaacggtaacaaccaacaggttccggtgaagaacgaggtggaccattgcgagaacctgaagaaggtagacacgaagcctagttcggagaaaaagattcataagactagccgggaggatatgttcagcgagaagcaggacatccctttcgtagagcaggaagacccatacagaaaaaaaaaattacaggagaagagggaaggtaatctacagaacctcaattggtctaagtctcggacctgtcgcaaaaacaagaagcggggagttgcacccgttagcaggccacctgaacagtcggatctgaagctggtgtgttctgactttgaaagatcggagctgtcaagcgatatcaatgtgagatcctggtgcatccaggagagtactagggaggtgtgtaaagccgatgctgaaattgccagctctctcccagccgctcagcgggaggctgaggggtattatcaaaaacctgagaaaaaatgtgtcgacaaattttgttccgacagttccagtgattgcgggtcctcttccggaagcgtgagggctagccggggtagctggggatcctggtctagtaccagctccagcgacggcgacaagaagcccatggtggatgcccaacatttcttgcccgctggagacagcgtatcccaaaacgatttcccctcagaggcccctatttcactcaacctctcccacaatatttgcaacccaatgacagtgaactccctaccacagtacgccgaacccagctgcccttctctcccagcaggtcctactggagtggaagaggacaagggcctttattcacccggagatctttggcccacacctccggtttgtgtgacaagctctttgaattgcacacttgaaaacggcgtaccatgcgttatacaggaatcagccccagtccataatagttttattgactggagcgctacatgtgagggccagttctcctctgcgtactgtcccttagagctgaacgactacaacgcttttcccgaggagaacatgaactacgcaaacgggttcccttgccctgcagatgtgcaaactgatttcatagatcataattcccaatctacctggaatactccccctaatatgcctgctgcctggggtcacgccagctttatatcctcccccccttacctgacctctactcggtcattgtcccccatgagcggcctgtttggaagtatttgggcaccgcagagcgacgtctatgagaactgctgcccgatcaacccgactacagaacacagtactcatatggaaaatcaggcagtggtgtgcaaggaatactaccccggattcaatccatttagagcatacatgaatctagatatatggactacgacagctaatcgtaatgccaacttcccccttagccgggatagcagttactgtggtaacgtttag

SEQ ID NO: 185126 - protein, 889 aa, Artificial Sequence
  derived and/or modified sequence
MAERGRLGLPGAPGALNTPVPMNLFATWEVDGSSPSCVPRLCSLTLKKLVVFKELEKELISVVIAVKMQGSKRILRSHEIVLPPSGQVETDLALTFSLQYPHFLKREGNKLQIMLQRRKRYKNRTILGYKTLAAGSISMAEVMQHPSEGGQVLSLCSSIKEAPVKAAEIWIASLSSQPIDHEDSTMQAGPKAKSTDNYSEEEYESFSSEQEASDDAVQGQDLDEDDFDVGKPKKQRRSIVRTTSMTRQQNFKQKVVALLRRFKVSDEVLDSEQDPAEHIPEAEEDLDLLYDTLDMEHPSDSGPDMEDDDSVLSTPKPKLRPYFEGLSHSSSQTEIGSIHSARSHKEPPSPADVPEKTRSLGGRQPSDSVSDTVALGVPGPREHPGQPEDSPEAEASTLDVFTERLPPSGRITKTESLVIPSTRSEGKQAGRRGRSTSLKERQAARPQNERANSLDNERCPDARSQLQIPRKTVYDQLNHILISDDQLPENIILVNTSDWQGQFLSDVLQRHTLPVVCTCSPADVQAAFSTIVSRIQRYCNCNSQPPTPVKIAVAGAQHYLSAILRLFVEQLSHKTPDWLGYMRFLVIPLGSHPVARYLGSVDYRYNNFFQDLAWRDLFNKLEAQSAVQDTPDIVSRITQYIAGANCAHQLPIAEAMLTYKQKSPDEESSQKFIPFVGVVKVGIVEPSSATSGDSDDAAPSGSGTLSSTPPSASPAAKEASPTPPSSPSVSGGLSSPSQGVGAELMGLQVDYWTAAQPADRKRDAEKKDLPVTKNTLKCTFRSLQVSRLPSSGEAAATPTMSMTVVTKEKNKKVMFLPKKAKDKDVESKSQCIEGISRLICTARQQQNMLRVLIDGVECSDVKFFQLAAQWSSHVKHFPICIFGHSKATF

SEQ ID NO: 185127 - DNA, 2670 bp, Artificial Sequence
  derived and/or modified sequence
atggccgagagaggcagactgggcctgcccggcgcccccggcgccctgaacacccccgtgcccatgaacctgttcgccacctgggaggtggacggcagcagccccagctgcgtgcccagactgtgcagcctgaccctgaagaagctggtggtgttcaaggagctggagaaggagctgatcagcgtggtgatcgccgtgaagatgcagggcagcaagagaatcctgagaagccacgagatcgtgctgccccccagcggccaggtggagaccgacctggccctgaccttcagcctgcagtacccccacttcctgaagagagagggcaacaagctgcagatcatgctgcagagaagaaagagatacaagaacagaaccatcctgggctacaagaccctggccgccggcagcatcagcatggccgaggtgatgcagcaccccagcgagggcggccaggtgctgagcctgtgcagcagcatcaaggaggcccccgtgaaggccgccgagatctggatcgccagcctgagcagccagcccatcgaccacgaggacagcaccatgcaggccggccccaaggccaagagcaccgacaactacagcgaggaggagtacgagagcttcagcagcgagcaggaggccagcgacgacgccgtgcagggccaggacctggacgaggacgacttcgacgtgggcaagcccaagaagcagagaagaagcatcgtgagaaccaccagcatgaccagacagcagaacttcaagcagaaggtggtggccctgctgagaagattcaaggtgagcgacgaggtgctggacagcgagcaggaccccgccgagcacatccccgaggccgaggaggacctggacctgctgtacgacaccctggacatggagcaccccagcgacagcggccccgacatggaggacgacgacagcgtgctgagcacccccaagcccaagctgagaccctacttcgagggcctgagccacagcagcagccagaccgagatcggcagcatccacagcgccagaagccacaaggagccccccagccccgccgacgtgcccgagaagaccagaagcctgggcggcagacagcccagcgacagcgtgagcgacaccgtggccctgggcgtgcccggccccagagagcaccccggccagcccgaggacagccccgaggccgaggccagcaccctggacgtgttcaccgagagactgccccccagcggcagaatcaccaagaccgagagcctggtgatccccagcaccagaagcgagggcaagcaggccggcagaagaggcagaagcaccagcctgaaggagagacaggccgccagaccccagaacgagagagccaacagcctggacaacgagagatgccccgacgccagaagccagctgcagatccccagaaagaccgtgtacgaccagctgaaccacatcctgatcagcgacgaccagctgcccgagaacatcatcctggtgaacaccagcgactggcagggccagttcctgagcgacgtgctgcagagacacaccctgcccgtggtgtgcacctgcagccccgccgacgtgcaggccgccttcagcaccatcgtgagcagaatccagagatactgcaactgcaacagccagccccccacccccgtgaagatcgccgtggccggcgcccagcactacctgagcgccatcctgagactgttcgtggagcagctgagccacaagacccccgactggctgggctacatgagattcctggtgatccccctgggcagccaccccgtggccagatacctgggcagcgtggactacagatacaacaacttcttccaggacctggcctggagagacctgttcaacaagctggaggcccagagcgccgtgcaggacacccccgacatcgtgagcagaatcacccagtacatcgccggcgccaactgcgcccaccagctgcccatcgccgaggccatgctgacctacaagcagaagagccccgacgaggagagcagccagaagttcatccccttcgtgggcgtggtgaaggtgggcatcgtggagcccagcagcgccaccagcggcgacagcgacgacgccgcccccagcggcagcggcaccctgagcagcaccccccccagcgccagccccgccgccaaggaggccagccccaccccccccagcagccccagcgtgagcggcggcctgagcagccccagccagggcgtgggcgccgagctgatgggcctgcaggtggactactggaccgccgcccagcccgccgacagaaagagagacgccgagaagaaggacctgcccgtgaccaagaacaccctgaagtgcaccttcagaagcctgcaggtgagcagactgcccagcagcggcgaggccgccgccacccccaccatgagcatgaccgtggtgaccaaggagaagaacaagaaggtgatgttcctgcccaagaaggccaaggacaaggacgtggagagcaagagccagtgcatcgagggcatcagcagactgatctgcaccgccagacagcagcagaacatgctgagagtgctgatcgacggcgtggagtgcagcgacgtgaagttcttccagctggccgcccagtggagcagccacgtgaagcacttccccatctgcatcttcggccacagcaaggccaccttctag

SEQ ID NO: 185128 - DNA, 2670 bp, Artificial Sequence
  derived and/or modified sequence
atggctgagcgcggaaggttaggattgcccggggcacccggcgccctgaacacacccgtccccatgaatctcttcgctacatgggaggttgacgggtccagcccgagctgtgtgccccgcctgtgctccctcacactgaaaaaactggtagtcttcaaggagcttgagaaagaattgatcagtgtggtgattgcagtgaagatgcagggctccaaaaggatactgcgcagccacgaaattgtcctgccgccatccgggcaggtagagacggatctcgcgctgacgttcagtctgcagtatccccatttcctcaagcgtgaggggaacaagctgcagattatgcttcagcgcaggaaacggtacaaaaatcgtacaatacttggttataaaactctggcggctgggagtatctctatggccgaggtgatgcagcacccgagcgaagggggtcaggttctctcactgtgctcaagtatcaaagaggctcccgtgaaggccgccgaaatctggatcgctagtctttcctcacagccaatcgatcacgaggatagcacaatgcaggctggtccaaaggcaaagtctactgacaattacagtgaggaagaatacgagtctttcagctccgaacaagaagcctcagacgatgccgttcagggacaggatcttgatgaggacgatttcgacgtagggaagcccaaaaaacagcgcagatccatcgtcaggaccacatccatgacgcgccaacagaactttaaacagaaagtggtggctttgcttaggcgattcaaagtgagcgatgaggtgttggacagcgagcaagacccagctgaacacataccagaggcagaggaggacttagatttgctgtatgacacactggacatggagcaccctagcgattctgggcccgacatggaggatgacgactctgtcctctccacgcccaagcctaagcttagaccctacttcgaaggcttgtcgcacagctcaagtcagacagagattggaagcattcacagcgcccggagtcacaaggagccaccttccccagccgacgtgccggagaagactaggtctctcggaggcagacagcctagtgactctgtctcggatactgtagcccttggggtgcccggtccgcgggagcacccaggacaaccagaagattctcccgaggctgaagcgtccaccttggacgtgttcaccgagcggctccccccttctgggcgcattaccaagaccgaatccctggtgattccatccacaaggtctgagggtaaacaggctggccgacgagggagaagtacgagtctgaaagaacggcaggccgctaggccccagaacgagagagcaaacagcttggacaatgaaagatgtcccgacgccaggtcgcagctgcagatccctcgtaaaaccgtgtatgatcagctcaaccacatattgatatccgatgatcagttgcccgagaacatcattctcgtgaacacgtcagattggcagggacagttcctttccgacgtgttacagcggcatactctgccagtggtgtgtacttgcagccctgctgatgttcaagccgccttcagcacgattgtgtccaggatccaacgctattgtaattgtaattcccagccccctaccccggttaaaatcgccgtggccggcgcccagcactacctctcagccatacttaggctatttgtggaacagttgtctcataaaacacccgactggcttgggtatatgaggtttctggtcatacctttaggcagccatcccgtggcacgctacctcggatccgtggattatcggtataataatttctttcaggaccttgcatggcgggacctcttcaacaaactggaggcacagtcagcagtgcaagatacccctgacatagtatcccgaatcacgcagtacatcgctggagctaattgcgcccatcagctgcccatcgcagaagcgatgcttacctacaaacagaaaagccccgacgaggagtcgtcccaaaagtttatccccttcgtgggtgtggtaaaagttggcatcgtagagccttcctccgccaccagtggcgactcggacgatgctgcgccttctggctctggcaccctgagtagcaccccgccatccgcgtccccagctgctaaggaggctagtcccactccgccatcgtcgccgagcgtgtctggagggctgtctagtccaagccaaggcgtgggagcagagctgatgggtctccaggttgactattggactgctgctcagcctgccgatcggaagcgggatgctgagaaaaaagacctcccagtgactaaaaataccctcaaatgtactttcagatctctccaggtcagccgtttaccttctagcggggaggctgcagcgactcctacgatgtctatgactgtggttaccaaagagaaaaacaaaaaggtaatgttcctgccaaagaaggcaaaagacaaagatgttgagtccaagagccaatgtatcgaaggcattagccgccttatctgcacggctaggcagcagcagaatatgcttagggttttgatcgacggagtggagtgttcagatgttaaatttttccagcttgccgcacaatggtcctcccacgttaaacacttcccaatctgtatctttgggcatagcaaggccacattttag

SEQ ID NO: 185129 - DNA, 2670 bp, Artificial Sequence
  derived and/or modified sequence
atggccgagcggggccgcctgggcctgcccggggcccctggggccctgaacacccctgtgcccatgaacctgtttgccacctgggaggtggatggcagcagccccagctgtgtgccccggctgtgcagcctgaccctgaagaagctggtggtgttcaaggagctggagaaggagctgatctctgtggtgattgctgtgaagatgcagggcagcaagaggatcctgcggagccatgagatcgtgctgcccccatctggccaggtggagacagacctggccctgaccttcagcctgcagtacccccacttcctgaagcgggagggcaacaagctgcagatcatgctgcagaggaggaagcgctacaagaacagaaccatcctgggctacaagaccctggccgccggcagcatctccatggccgaggtgatgcagcaccccagcgagggcggccaggtgctgagcctgtgcagcagcatcaaggaggcccctgtgaaggctgctgagatctggatcgccagcctgagcagccagcccatcgaccacgaggacagcaccatgcaggccggccccaaggccaagagcacagacaactacagcgaggaggagtatgagagcttcagcagcgagcaggaggccagtgatgatgctgtgcagggccaggacctggatgaagatgactttgatgtgggcaagcccaagaagcagaggaggagcatcgtgaggaccacctccatgacccggcagcagaacttcaagcagaaggtggtggccctgctgcggcgcttcaaggtgtctgatgaggtgctggacagcgagcaggaccctgctgagcacatccctgaggccgaggaggacctggacctgctgtatgacaccctggacatggagcaccccagcgacagcggccctgacatggaggatgatgacagcgtgctgagcacccccaagcccaagctgcggccctactttgagggcctgagccacagcagcagccagacagaaattggcagcatccacagcgcccggagccacaaggagccccccagccctgcagatgtgcctgagaagaccaggagcctgggcggccggcagcccagcgacagcgtgtctgacacagtggccctgggcgtgcccggcccccgggagcaccctggccagcctgaggacagccctgaggccgaggccagcaccctggatgtgttcacagagcggctgccccccagcggccgcatcaccaagacagagagcctggtgatccccagcaccaggtctgagggcaagcaggccggcagaagaggccgcagcaccagcctgaaggagcggcaggccgcccggccccagaatgaaagagccaacagcctggacaatgaacgctgcccagatgcccggagccagctgcagatccccaggaagacagtgtatgaccagctgaaccacatcctgatcagtgatgaccagctgcctgagaacatcatcctggtgaacaccagtgactggcagggccagttcctgagtgatgtgctgcagaggcacaccctgcctgtggtgtgcacctgcagccctgcagatgtgcaggccgccttcagcaccatcgtgagccgcatccagcgctactgcaactgcaacagccagccccccacccctgtgaagattgctgtggccggggcccagcactacctgagcgccatcctgcggctgtttgtggagcagctgagccacaagaccccagactggctgggctacatgaggttcctggtgatccccctgggcagccaccctgtggcccgctacctgggctctgtggactaccgctacaacaacttcttccaggacctggcctggagggacctcttcaacaagctggaggcccagagcgctgtgcaggacaccccagacatcgtgagccgcatcacccagtacatcgccggggccaactgtgcccaccagctgcccatcgccgaggccatgctgacctacaagcagaagagcccagatgaggagagcagccagaagttcatcccctttgtgggcgtggtgaaggtgggcatcgtggagcccagcagcgccaccagcggggacagtgatgatgctgcccccagcggcagcggcaccctgagcagcaccccaccttctgccagccctgctgccaaggaggccagccccaccccacccagcagccccagcgtgtctgggggcctgagcagccccagccagggcgtgggcgctgagctgatgggcctgcaggtggactactggacagctgcccagcctgctgacaggaagagagatgctgagaagaaggacctgcctgtgaccaagaacaccctgaagtgcaccttccgcagcctgcaggtgtcccggctgcccagcagtggagaggccgccgccacccccaccatgtccatgacagtggtgaccaaggagaagaacaagaaggtgatgttcctgcccaagaaggccaaggacaaggatgtggagagcaagagccagtgcatcgagggcatcagccgcctcatctgcacagcccggcagcagcagaacatgctgcgggtgctgattgatggagtggagtgcagtgatgtgaagttcttccagctggccgcccagtggagcagccacgtgaagcacttccccatctgcatcttcggccacagcaaggccaccttctag

SEQ ID NO: 185130 - DNA, 2670 bp, Artificial Sequence
  derived and/or modified sequence
atggccgagcggggccggctgggcctgcccggcgcccccggcgcccttaatacccccgtgccaatgaatctgtttgcaacgtgggaagtggacggctcctcaccaagttgcgtgccccgcctgtgtagccttactttgaaaaagcttgtggtattcaaggagctcgaaaaggaattgattagtgtggtaatcgctgtgaagatgcagggttctaagaggatattacggtcccatgaaattgtgctgcccccctcaggccaggtggagacggaccttgcactcacattctcactgcagtatccccactttcttaaaagagagggaaacaagctgcagataatgcttcagaggaggaaaaggtataaaaataggacaattcttggctataaaaccttggcagccggatcaataagtatggcagaagtgatgcaacaccctagcgaaggtggccaagttcttagtctgtgcagcagcattaaagaggcacccgttaaagctgccgaaatctggattgctagtctctctagtcagcctatcgatcatgaggactctacaatgcaagccggaccaaaggcgaagtccaccgataattattcggaagaagagtacgaaagcttctcctcagagcaggaggcctctgatgacgcagtacagggccaggatctggatgaggatgattttgatgtaggaaagcctaagaagcaacgtagatccatcgtgcgcacgacgtccatgacacggcagcagaacttcaagcaaaaggtggtggcactgctgcggcgattcaaggttagtgacgaagtgctcgactccgaacaggacccagcagagcatatcccagaagccgaagaggatctggaccttctttacgatacgctggatatggaacatcctagcgatagcgggccagacatggaagacgatgatagtgtgctgagtacgcctaaacctaagctgcggccctacttcgaaggtctgagtcattcctcatctcaaaccgagattggcagcatccatagcgcccgctcccataaagagcccccaagcccagcagatgtcccggagaagactcgctccctcgggggcaggcagccatctgatagcgtctctgacactgttgccctcggagtgcccgggcctagagagcacccagggcaacccgaggactcgcctgaagccgaggcgtctacacttgatgtatttaccgagagactcccaccaagcggccgcatcacaaaaactgagtctctggttattcctagcactcgctctgaaggaaaacaggcggggcggaggggccggtccacctcccttaaggagaggcaggccgccagaccccagaacgaaagggcaaacagcctggataacgagcgatgtcctgatgcacggagccagctacagattcctcgcaagaccgtctacgaccaactgaatcatattctgatcagcgacgaccagctgcccgagaacatcatcctggtcaacacaagcgactggcagggtcagttcctgtccgacgtgcttcaacggcacaccctgcccgtggtctgtacttgttcacctgccgacgtccaggccgcgttctctactatcgtgagcaggatccagcggtactgtaactgcaactcccagcctcctactcctgtgaagattgctgtggctggtgcccagcactacctttctgctatactgagattatttgtggagcaattgagccataagactccggactggctgggttatatgcggttcctggtgattcccctgggtagccatcccgtcgctaggtacctgggtagtgtggattatcgatacaataacttctttcaggacctggcatggcgggatctctttaataaactggaagcccaatctgctgtccaagatacaccagacatagtgagtagaataacacaatacatcgccggcgcaaattgtgcccaccaacttcctatcgcagaagcgatgctgacctacaaacagaagagccccgacgaagagagctcacagaagttcatccccttcgtgggggtagtgaaggtaggcatcgttgagccttcatctgccactagcggagactccgatgatgcggcaccatccgggtctgggactttatccagcactcctccatctgcttcgccggccgccaaggaggctagtccaactcccccttcctcgccctcagttagcggcggactctccagtccaagtcagggagtcggagcagaacttatgggattgcaggtcgactattggaccgctgcccaacccgccgatagaaagcgggatgccgagaaaaaggacctccccgtgacaaagaatacccttaaatgcacttttcgaagccttcaagtttccaggttaccctcctctggcgaggctgcagccacccccactatgagtatgaccgtggtcaccaaagaaaaaaacaagaaggtaatgtttctacctaagaaggccaaggacaaagatgtcgaatcaaagtcccagtgtatcgaaggcatcagccggctgatctgcacagcccggcagcagcaaaatatgctgcgcgtgctcatagacggtgtagagtgctctgatgtcaaattctttcaactggctgctcagtggagttcccacgttaaacacttcccaatctgtatatttggccactctaaggccaccttctag

SEQ ID NO: 185131 - DNA, 3708 bp, Artificial Sequence
  derived and/or modified sequence
ggtggacccccacgactctcccggcccttgcccgcggctcccggggggcggggcggggcgccccgggcggggtctgtgcgcaggcgcgtgagtgcgcgctctcgcgcaccggcgggcggggacgccccgtgaggcgccgccggaggaagcgcgcgcgcacctcacttccggcgcgcgctgcgccggcggcgattggacccgaggcggcgagctggcgccccgcccagccaatcggcggcgccggcgcgggtcggagggcgccgggcgcgcgcggggcggccgggggcgcgcggggcgcgggcggggcgccgggcggggcggggcggagcggccgcagctcgtcgccgcccgcgggcctgtccgacgccggggcccggcccgtcccctccgccgcccggcagccatgtgaccgcgccgccgccctccgcgcgcccggcccgcccgccgcgcgtccgcggcccggccgcagccccaggccgccgagggagcggcggggccggcgccatggccgagcgaggccgcctcggcctccccggcgcgcccggcgcgctcaacacgcccgtgcccatgaacctgttcgccacctgggaggtggacggctccagccccagctgcgtgcccaggttgtgcagcctgactctgaagaagctggtggtcttcaaggagctggagaaggagctgatctccgtggtgatcgctgtcaagatgcagggctccaaacgaatcctgcggtcccatgagattgtgctgccccccagtggacaagtggagacagacctggccctgaccttctccttgcagtatcctcacttcttgaagagggaaggcaacaagcttcagatcatgctgcagcgcagaaagcgctacaagaacagaaccatcctgggctacaagacgctggccgcgggctccatcagcatggctgaggtgatgcaacacccgtctgaaggtggccaggtgctgagcctctgcagcagcatcaaggaggcccccgtcaaggcggccgagatctggatcgcctccctgtccagccagcccattgaccacgaagacagcaccatgcaggccggccccaaggccaagtccacggataactactccgaggaggagtatgagagcttctcctccgagcaggaggccagtgacgacgccgtgcaggggcaggacttggacgaggacgactttgacgtggggaagccgaagaagcagcggagatcgattgtaagaacgacgtccatgaccaggcaacagaacttcaagcagaaagtggtagcgctgctgcggaggttcaaagtgtccgacgaggtcctggactcggagcaggaccctgcggagcacatccccgaggcagaggaggacctggacctcctgtatgacaccctggacatggagcaccccagcgacagcggccccgacatggaggatgacgacagcgtcctcagcacccccaagccgaagctgcggccatactttgaaggcctgtcgcactcgagctcgcagacggagattgggagcatccacagcgcccgcagccacaaggagcccccaagcccggctgacgtgcccgagaagacgcggtccctgggaggcaggcagccgagcgacagtgtctctgacacggtggccctcggtgtgccaggcccgagggagcaccctggacagcctgaggacagccccgaggctgaggcctccaccctggatgtgttcacggagaggctgccgcccagcgggaggatcaccaagacagagtcccttgtcatcccctccaccaggtccgaggggaagcaggctggccgacggggccggagcacatccttgaaggagcggcaggcagcacggccccagaatgagcgggccaacagcctggacaacgagcgctgcccggacgcccggagccagctacagatccccaggaagactgtgtatgaccagctcaaccacatcctcatctccgatgaccagcttcccgaaaacatcatccttgtcaacacctcggactggcaggggcagttcctctccgacgtcctgcagaggcacacgctccccgtggtgtgcacgtgctctcctgcggacgtccaggcggccttcagcaccatcgtctcacggatacagagatactgcaactgcaattcccagcccccgacccccgtgaagatcgccgtggcgggagcgcagcattacctcagtgccatcctgcggctctttgtggagcagctgtcccacaagacacccgactggctcggctacatgcgcttcctggtcatcccactgggctcccaccccgtggccaggtacctaggctccgtggactaccgctacaacaacttcttccaggacctggcctggagagacctgttcaacaagctggaggcccagagtgcggtacaggacacgccagacattgtgtcacgcatcacgcagtacatcgcaggggccaactgtgcccaccagctccccatcgcagaggccatgctgacctacaagcagaagagccctgacgaagagtcctcccaaaagttcattccctttgtcggggttgtgaaggttggaattgtggagccatcctcggccacatcaggcgactcggacgacgcggccccctcgggctctggcacgctctcctccaccccgccgtccgcatctcctgcggccaaggaggcctcacccaccccgccctcctccccgtcggtgagcggaggcctgtcctcccccagccagggtgtcggcgccgagctgatggggctgcaggtggactactggacggcagcacagcctgcggacaggaagagggacgccgagaagaaggacctgcctgtcaccaaaaacacgctcaagtgcactttccggtccctccaggtcagcaggctgcccagcagcggcgaggctgcagccacgcccaccatgtccatgaccgtggtcaccaaggagaagaacaagaaggtgatgtttctgcccaagaaagcgaaggacaaggacgtggagtctaagagccagtgcattgagggcatcagccggctcatctgcactgccaggcagcagcagaacatgctgcgggtcctcatcgacggcgtggagtgcagcgacgtcaagttcttccagctggccgcgcagtggtcctcgcacgtgaagcacttccccatctgcatcttcggacactccaaggccaccttctagccccacccaccagggggcccacctcctgccccatgctgtgaggggcccagctgcatttctgttaacatttcagtttactacagagacagacgcttaaaacacaaagagaaacagtcttaagtatgaatgtgctcacaacgtggaaactaacgggggagctcctgccaggagccgaataactgctctgcttattaacccgaacgttcggcccggggctgggaagccagaaggacgatgctgagccatggatcgcggaaggcgtcctctggcctcaggagccacccagagcctcacaggctgagttcttgcctctgtgtcctgtccttcctggaagtcaggactctgcttcctcagggagcccggggaaggcggagctcagtggccacaggccgagggccatggggccgctcagtcccgttggggttgtcctgagttgagcctgggggggccgtcctgcccgcctaagagatgcccccagcaccgcacactcgtggttcccaataaactcctgcctgcggcggaggttttatagca

SEQ ID NO: 185132 - DNA, 2670 bp, Artificial Sequence
  derived and/or modified sequence
atggccgaaaggggtagattaggactccctggagcacccggagcccttaatacaccagtgcccatgaatctgttcgcaacctgggaagtggatggatcatcaccgagctgtgtgcccaggctttgcagccttaccctgaaaaaattggtcgtgtttaaggagctcgagaaagagctgattagcgtcgttatcgcagtcaagatgcagggttcaaaaagaatcctgaggtctcatgagatcgtcctgcctccaagtggccaggtagagactgatttggcgttaacatttagtctacaatatccgcactttctgaaacgcgaggggaataaactgcagatcatgctccagcgcagaaaaagatacaaaaaccggacaattctgggctacaagactctggctgccggaagcattagtatggccgaagtaatgcagcacccgagcgaggggggacaggtgctatccctgtgttcatctataaaggaagcccctgttaaggcagctgagatttggattgcgagcctttcatctcagcccattgatcacgaggatagcaccatgcaggcgggaccaaaagccaagagtacagacaactacagtgaagaggaatacgaaagcttcagtagcgagcaggaggcctcagacgatgctgtacagggtcaagatctcgatgaggacgatttcgatgttggtaagccaaagaaacaacgcaggtctatagttagaaccacgtccatgaccaggcaacaaaacttcaagcagaaggtagtggccctcctgagaagatttaaggtgtcagatgaggtcttggactcagaacaagacccagccgagcatattccagaagccgaggaggatttagatctgctctatgacacacttgatatggaacatccttccgatagcggccctgacatggaggatgacgattcggtgctctccacaccgaaaccgaagcttcgcccttatttcgaggggctgtcccactcttcctctcagaccgagatcggctccatccattcggcgaggagccataaagagccacctagccccgctgacgtgcctgaaaagactcggtcactgggcggacggcagcctagcgattctgtttctgatacagtggcattaggagttcctggtcccagggagcaccctgggcaaccagaagatagccccgaagcagaagcctctaccttagacgtgtttactgagcgccttcctccaagcggtcggataacgaagactgagagcttggtgatcccaagtacaaggtctgaaggaaagcaagccggaaggcgcggtcgttcgaccagcttaaaggagcggcaggctgccagaccgcagaatgaaagagccaattccctcgataacgagcgctgtcccgacgccaggtctcagctgcagattccccgtaaaacagtatatgaccagcttaaccatatcctgatcagtgatgatcagctgcccgaaaacatcatcctggtgaacaccagcgattggcagggccaattcctctctgatgttttgcaacggcataccctgccggtcgtgtgcacatgctcaccagccgacgtgcaggcagccttttcgacaatagtgtcccggatccagagatactgcaattgtaacagccagccgcctaccccagtcaagatagcggtcgccggtgcacagcactacctgagcgctatactgcgtctgttcgtggagcaactgtctcataaaactccggattggctggggtacatgcggttcctcgtcatcccactcgggagtcatcccgttgctagatacctcggcagcgtagactaccggtacaacaacttcttccaggatttagcgtggcgggacctgttcaacaagctggaagcccagagtgcggtgcaggataccccagacatcgtctcgcgaattacccagtatatcgccggagctaactgtgcccaccagcttccaattgcggaagccatgctaacgtataagcagaagtcaccagatgaggagtcttctcaaaagtttataccatttgttggggtcgtgaaagttggtatcgtggagccctcaagtgctacttccggggactctgacgatgccgcaccatctgggagcgggacgctctccagcactccccctagcgcctctccagctgctaaagaagcttccccgacaccgccaagtagtccttctgtaagtggaggcctttcttcgccatcccaaggtgttggagcggaactcatgggtctacaggtagattattggaccgccgctcagcctgccgatcggaagcgggacgccgaaaaaaaggatctgcctgtcactaagaatactctcaagtgcacattccgctcactgcaagtgtctcgcttaccatcatcgggggaagccgcagccacacccaccatgtccatgacagtggtcacaaaggagaagaataagaaggtaatgttcctcccaaagaaggccaaggacaaggatgtggagtcgaagtcccagtgtattgagggaattagtaggctcatttgcactgctagacagcaacaaaatatgctaagggtcctgattgatggtgtggagtgctcagatgtgaagttttttcagctagcggcacagtggagttcgcacgttaaacacttccctatttgtatctttgggcactccaaagccactttttag

SEQ ID NO: 185133 - protein, 1261 aa, Artificial Sequence
  derived and/or modified sequence
MDAPRASAAKPPTGRKMKARAPPPPGKAATLHVHSDQKPPHDGALGSQQNLVRMKEALRASTMDVTVVLPSGLEKRSVLNGSHAMMDLLVELCLQNHLNPSHHALEIRSSETQQPLSFKPNTLIGTLNVHTVFLKEKVPEEKVKPGPPKVPEKSVRLVVNYLRTQKAVVRVSPEVPLQNILPVICAKCEVSPEHVVLLRDNIAGEELELSKSLNELGIKELYAWDNRRETFRKSSLGNDETDKEKKKFLGFFKVNKRSNSKGCLTTPNSPSMHSRSLTLGPSLSLGSISGVSVKSEMKKRRAPPPPGSGPPVQDKASEKVSLGSQIDLQKKKRRAPAPPPPQPPPPSPLIPNRTEDKEENRKSTMVSLPLGSGSHCSPDGAPQVLSEAEETVSVGSCFASEDTTEDSGVMSSPSDIVSLDSQQDSMKYKDKWATDQEDCSDQDLAGTPDLGPQKSPLWEKNGSENSHLRTEKAVTASNDEEDLLIAGEFRKTLAELDEDLEEMEDSYETDTSSLTSSIHGASNHCPQDAMIPHGDTDAIPVTFIGEVSDDPVDSGLFSNRNNNAGSFDSEGVASRRDSLAPLQAEHSQPHEKAREEVPALHPASHDVGKGIRVALSNISKDGNLMETAPRVTSFASNLHTDNLNAKVKDKVYGCADGERTQATERVNSQPVNEKDSNDKNAALAPTSWHQRGQNPGKSYRLKHGLTTYKIIPPKSEMRCYDRDVSLSTGAIKIDELGNLVSPHATGIRIISLSSSVPEAESQPIGKVREFWRCNSVEKHLGRPSESSARGPPSTPVPTQTQNPESRLQADPKPISPQQKSAHHEGRNPLGEGRNQPPTMGMGHVRVPAAHTTEVTFLKPQRRTSSQYVASAIAKRIGAPKVHADVVRPHGYAEKGYAGKAPVLAAPPVTVKDDRTSSPHSETQGWKDGAQWPCVTPPNNHGEDLAVGAPPRGEVIGPHRKLSTQDRPAAIHRSSCFSLVQSSQRDRVSVGQSCGFSGKQSTSSQEASSASEPRRAPDGTDPPPPHTSDTQACSRELVNGSVRAPGHGEPSHPPGGSGTESHILLEREEKPSVFSTDGNETDSIWPPSIFGPKKKFKPVVQRPVPKDTSLHSALMEAIHSAGGKDRLRKTAEHTGEGRPAKLSYTEAEGERSALLAAIRGHSGTCSLRKVASSASEELQSFRDAALSAQGSESPLLEDLGLLSPPAIPPPPPPPSQALSAPRTASRFSTGTLSNTADARQALMDAIRSGTGAARLRKVPLLV

SEQ ID NO: 185134 - DNA, 3786 bp, Artificial Sequence
  derived and/or modified sequence
atggacgcccccagagccagcgccgccaagccccccaccggcagaaagatgaaggccagagccccccccccccccggcaaggccgccaccctgcacgtgcacagcgaccagaagcccccccacgacggcgccctgggcagccagcagaacctggtgagaatgaaggaggccctgagagccagcaccatggacgtgaccgtggtgctgcccagcggcctggagaagagaagcgtgctgaacggcagccacgccatgatggacctgctggtggagctgtgcctgcagaaccacctgaaccccagccaccacgccctggagatcagaagcagcgagacccagcagcccctgagcttcaagcccaacaccctgatcggcaccctgaacgtgcacaccgtgttcctgaaggagaaggtgcccgaggagaaggtgaagcccggcccccccaaggtgcccgagaagagcgtgagactggtggtgaactacctgagaacccagaaggccgtggtgagagtgagccccgaggtgcccctgcagaacatcctgcccgtgatctgcgccaagtgcgaggtgagccccgagcacgtggtgctgctgagagacaacatcgccggcgaggagctggagctgagcaagagcctgaacgagctgggcatcaaggagctgtacgcctgggacaacagaagagagaccttcagaaagagcagcctgggcaacgacgagaccgacaaggagaagaagaagttcctgggcttcttcaaggtgaacaagagaagcaacagcaagggctgcctgaccacccccaacagccccagcatgcacagcagaagcctgaccctgggccccagcctgagcctgggcagcatcagcggcgtgagcgtgaagagcgagatgaagaagagaagagccccccccccccccggcagcggcccccccgtgcaggacaaggccagcgagaaggtgagcctgggcagccagatcgacctgcagaagaagaagagaagagcccccgcccccccccccccccagccccccccccccagccccctgatccccaacagaaccgaggacaaggaggagaacagaaagagcaccatggtgagcctgcccctgggcagcggcagccactgcagccccgacggcgccccccaggtgctgagcgaggccgaggagaccgtgagcgtgggcagctgcttcgccagcgaggacaccaccgaggacagcggcgtgatgagcagccccagcgacatcgtgagcctggacagccagcaggacagcatgaagtacaaggacaagtgggccaccgaccaggaggactgcagcgaccaggacctggccggcacccccgacctgggcccccagaagagccccctgtgggagaagaacggcagcgagaacagccacctgagaaccgagaaggccgtgaccgccagcaacgacgaggaggacctgctgatcgccggcgagttcagaaagaccctggccgagctggacgaggacctggaggagatggaggacagctacgagaccgacaccagcagcctgaccagcagcatccacggcgccagcaaccactgcccccaggacgccatgatcccccacggcgacaccgacgccatccccgtgaccttcatcggcgaggtgagcgacgaccccgtggacagcggcctgttcagcaacagaaacaacaacgccggcagcttcgacagcgagggcgtggccagcagaagagacagcctggcccccctgcaggccgagcacagccagccccacgagaaggccagagaggaggtgcccgccctgcaccccgccagccacgacgtgggcaagggcatcagagtggccctgagcaacatcagcaaggacggcaacctgatggagaccgcccccagagtgaccagcttcgccagcaacctgcacaccgacaacctgaacgccaaggtgaaggacaaggtgtacggctgcgccgacggcgagagaacccaggccaccgagagagtgaacagccagcccgtgaacgagaaggacagcaacgacaagaacgccgccctggcccccaccagctggcaccagagaggccagaaccccggcaagagctacagactgaagcacggcctgaccacctacaagatcatcccccccaagagcgagatgagatgctacgacagagacgtgagcctgagcaccggcgccatcaagatcgacgagctgggcaacctggtgagcccccacgccaccggcatcagaatcatcagcctgagcagcagcgtgcccgaggccgagagccagcccatcggcaaggtgagagagttctggagatgcaacagcgtggagaagcacctgggcagacccagcgagagcagcgccagaggcccccccagcacccccgtgcccacccagacccagaaccccgagagcagactgcaggccgaccccaagcccatcagcccccagcagaagagcgcccaccacgagggcagaaaccccctgggcgagggcagaaaccagccccccaccatgggcatgggccacgtgagagtgcccgccgcccacaccaccgaggtgaccttcctgaagccccagagaagaaccagcagccagtacgtggccagcgccatcgccaagagaatcggcgcccccaaggtgcacgccgacgtggtgagaccccacggctacgccgagaagggctacgccggcaaggcccccgtgctggccgccccccccgtgaccgtgaaggacgacagaaccagcagcccccacagcgagacccagggctggaaggacggcgcccagtggccctgcgtgaccccccccaacaaccacggcgaggacctggccgtgggcgccccccccagaggcgaggtgatcggcccccacagaaagctgagcacccaggacagacccgccgccatccacagaagcagctgcttcagcctggtgcagagcagccagagagacagagtgagcgtgggccagagctgcggcttcagcggcaagcagagcaccagcagccaggaggccagcagcgccagcgagcccagaagagcccccgacggcaccgaccccccccccccccacaccagcgacacccaggcctgcagcagagagctggtgaacggcagcgtgagagcccccggccacggcgagcccagccacccccccggcggcagcggcaccgagagccacatcctgctggagagagaggagaagcccagcgtgttcagcaccgacggcaacgagaccgacagcatctggccccccagcatcttcggccccaagaagaagttcaagcccgtggtgcagagacccgtgcccaaggacaccagcctgcacagcgccctgatggaggccatccacagcgccggcggcaaggacagactgagaaagaccgccgagcacaccggcgagggcagacccgccaagctgagctacaccgaggccgagggcgagagaagcgccctgctggccgccatcagaggccacagcggcacctgcagcctgagaaaggtggccagcagcgccagcgaggagctgcagagcttcagagacgccgccctgagcgcccagggcagcgagagccccctgctggaggacctgggcctgctgagcccccccgccatccccccccccccccccccccccagccaggccctgagcgcccccagaaccgccagcagattcagcaccggcaccctgagcaacaccgccgacgccagacaggccctgatggacgccatcagaagcggcaccggcgccgccagactgagaaaggtgcccctgctggtgtag

SEQ ID NO: 185135 - DNA, 5291 bp, Artificial Sequence
  derived and/or modified sequence
ccagccccttccgtccgccgcgctccgccgctgtcctccgccggcccgcgtgggaggacgatgggtcagcgcggaaaaagtgaatgagggcggcagcggtggcggcggtagccagcgcctgactcggcgggcccggagcaccgcccgcgtcccggcccccggcaccatggacgcgccgcgcgcctcggcggccaagcccccgaccgggaggaagatgaaggctcgtgctcccccacctcctggaaaggctgccactctgcatgtgcacagtgaccagaagcccccccacgatggggccctcgggtcgcagcagaacttggttcgcatgaaggaggcgctgagggccagcaccatggacgtcaccgtggtcctgcctagtgggctggagaagaggagcgtgctcaatgggagccatgcgatgatggacctactggttgaactttgccttcagaaccacctgaatccatcccaccatgcccttgaaattcggtcttcagaaacccaacaacctttgagttttaagccaaatactttgattgggaccctgaatgtgcatactgtgtttctgaaagaaaaagttcctgaagagaaggttaagcctggtccccctaaggtgcctgagaaatctgtgcgtttggtcgtgaattacctgcggacacaaaaagctgttgtgcgtgtgagccctgaggttcctctccagaatattctcccagtcatttgtgcaaagtgtgaggtcagcccagagcacgtggttctcctcagggacaacattgccggagaggagctggagctgtccaagtccctgaacgagctcgggataaaggagctctacgcgtgggacaacagaagagaaacctttaggaaatcatcacttggcaatgatgagacagataaagagaagaaaaaatttctgggatttttcaaagttaataaaagaagcaatagtaagggctgtttaacgacccccaactccccatccatgcactcacgttctcttacgctgggtccatccctctcgctgggcagcatctcaggggtgtccgtgaagtcggagatgaagaagcgccgagcccctcctcctccaggttcagggccacctgtgcaagacaaggcatcggaaaaggtatctcttgggtcacagattgatttacagaagaagaagcggcgagcgccagctccccctccaccacagccaccaccaccgagtcccctgatccccaaccgcactgaggataaggaggagaacaggaagagcacgatggtaagcctgcccctggggtctggcagccactgcagcccggatggagccccgcaggtgctgtcagaggcggaggagaccgtgtcagttggcagctgttttgcgtcggaggacacgaccgaggactcaggagtgatgagttccccctcagacatcgtctctctggactcgcagcaggacagcatgaaatacaaagacaagtgggccacagaccaggaagactgcagtgaccaggacctcgctggaaccccagacctgggtccccagaagagccccttgtgggagaagaatggctctgagaactcacatctgagaactgaaaaagctgtcacagcctcaaatgatgaagaagacctattaattgctggagagttccgtaaaacccttgcagaacttgatgaagacctggaagaaatggaagacagctatgaaacagacaccagctccctcaccagctccatccatggtgcatccaaccactgcccacaggatgccatgatccctcacggcgacacagatgcaatcccagtaacattcataggggaagtttcagatgatcctgtggattcggggttgttttccaatagaaacaacaatgctgggtctttcgactcggagggtgttgccagcaggagagactccctggcgccacttcaagctgagcacagccagccccatgaaaaggcaagggaggaagtacctgccctgcaccccgcttcccatgacgtcggaaaaggaatccgtgtggccttatctaacatctctaaagatgggaatctaatggaaacggcgcccagggtgacttcttttgcttcgaatcttcacacagacaacctaaatgcaaaagtgaaagacaaagtgtatggctgtgctgacggggagaggactcaagccacagagagagtgaattcccaaccggtgaatgaaaaggacagcaacgataaaaacgctgccttggcaccaacatcatggcaccaacgaggccaaaacccagggaaaagctacagacttaagcacggcctcacaacgtataaaatcattcctccaaagtcagagatgcgatgttacgacagagatgtgtccctctccaccggagccattaagattgacgagctggggaacttggtgagtcctcacgccaccggcatcaggatcatttccctgtcttcgtctgtgcctgaagcagaatctcagcccattgggaaagtcagagagttctggaggtgcaactctgtggaaaaacacctgggccgaccctcagagagctctgccaggggacccccctccacccctgtgcccacgcagacgcagaatccagagagcagactccaagcagaccccaagccaatatcgccccagcagaagtctgcccaccatgagggccggaaccccctaggggaggggagaaaccagccccccaccatgggcatgggtcacgtgagggtgccagcagctcacaccacagaagtcacatttctcaagcctcagagaagaacgtccagccagtatgtggcctctgccattgccaagcgcataggagccccaaaagtccatgctgatgtggtgaggccacacggttatgccgagaagggttatgcaggcaaggcgccagtgctggctgcaccacctgtcactgtgaaagatgacaggacatccagcccacactcagagacacaaggatggaaggatggtgcccagtggccctgtgtcactcctcccaacaaccacggggaagatttggcagtgggagcccctcctaggggggaggtcattggcccacacaggaagttgtctactcaggacagacctgctgctatccacagaagctcctgtttctcactggttcagtcttcccagagggatcgtgtttctgtgggacagagctgtggtttcagtggaaagcaaagcacaagtagccaggaggccagctcagcatctgagcccagacgcgcacctgatggtacagacccaccccctccacacacatctgacactcaggcctgcagcagggagctggtcaatggctctgtgcgcgccccaggccacggcgagccttcccaccctccaggagggtctggcacagaaagccacattctcctagaaagagaggaaaagcccagtgtgttctctacagatggaaatgaaacagacagtatttggccacccagcatttttgggccgaagaaaaaattcaaacctgttgtccagagaccagtcccaaaagacacatccctgcactctgccctgatggaagccatccactctgcgggagggaaggacagactacgcaagacggcagaacacaccggggagggcaggccagcgaaactgtcctacacggaggcagagggcgaacgatctgcactgctggcagctatccgcgggcacagcggcacctgcagcctgaggaaggtggcatcctctgcttctgaggagctccagagcttccgagatgccgcactctctgctcagggctcggaaagtcctctgctagaagaccttggtcttctgtccccaccagccattcccccaccaccccctccaccctcccaggctctctctgcaccaaggacggcctccaggttcagcacgggcaccctcagcaacaccgcagacgcaaggcaagccttgatggacgccatccgctccggcacaggggctgcgagactgagaaaggtgcccttgctcgtgtgaatgaacagaggccagagaattgcagaaacccacctgtaatatgcccacaggcgtcactcaaggagtctgcatagccaggaacatcaagttttggtgttactttcttgtctacaggccaaatgcgcacagttgattttcggtgtgttcctgtataacggcttgaaaggaaaggagaagatgctgtgtcgctgcgcagctcgtgtgccaaggaaatgtgttttgcctctgaatatcttaagttgctaataaacgattcttgttggcaggttaatgggactataaatgctggagcccagcactcacacttaattatatttatgggcaaagtaaaaagaatcatgccttagactgattttggacctttgagacttttaccacatacagatggatgaaactacttactgatttaagatcttttgaattttagaaaaaacatatgaatcagatggaacaatctgaatgtgatatgctccatgatgctgtgtgttttggtagtaagaaaaaaaaattgggaggcttttcaaaggtggctttgttaggtagtaaaactgctggattcttcttcctcaaatatttggggctaacacttcacagagggtcacagtccatgatctgaccaactaagcttttaaaaatcaactattaccacccagaaaacagtcctacgtgatcatgtggccagggcatgcccgagtcctgcaagggtggcgggtggctgaggtcacaccaccactggagtggatgggcagtgccccacatggacagccattccccaggctatgaagtgacataggcctcccccacggtgcctgtgtacggagcctgatgacttcactgggagccttctggaatcctgcagagggtcaaggagcagggatgttggatgcccacctgtcaagagttcagatcaaagttgcgctgagagcatcacaattttggttcagccttgacgcgtttgtccaacagctcattggctccctttgtatgatatcgtggtcttctcacatggtgcccagtcaccaatatttataatgaggtctaactacagcagtagtttttcatatatatctctaaaacattttgttatattgaaaaaagtaatagaaatcaagatgtgttgatgaaataaaatgtgtatctgagtgagaaaacaagtatggtgaggtcactttaatgtttcacagcgatctcagatctaggcctcaggtagaatggaagctgttctgcattcactgattaacgttgctaaactcttggtgaggcacgagctaccagccaattgctcttcatcacagctatctgtcttttagtgccacaaataaaagaaaatcaaatctta

SEQ ID NO: 185136 - DNA, 3786 bp, Artificial Sequence
  derived and/or modified sequence
atggatgcgcctcgggcctccgccgccaaaccgccaacaggccgcaagatgaaggctagggctcctccacctcccggcaaggccgccactctgcacgtgcactcggaccagaagccacctcatgacggtgctctcggttcccagcaaaacttggtgcgcatgaaagaagcccttagagcctcaacaatggacgtgaccgtcgttctacctagcggtttagagaaacggagcgtattgaatgggagtcatgctatgatggatctcctagtcgaactctgcctccagaaccacctaaacccatcccaccacgccctggagattagatctagtgagacccagcagccactcagtttcaaaccgaacacacttatcggaacattaaatgtgcatacagtattcctgaaggagaaagtccctgaggaaaaggtcaaaccaggaccgcccaaggttcccgagaagtcagtccgtctcgtggtgaactatctaaggacccagaaggccgtggtgcgggtctcaccggaagtaccattgcagaacattcttccagtcatctgtgctaagtgtgaggtgtccccagagcacgtggttttgctccgggataatattgccggggaggagctggagttaagcaagtccctgaatgaactgggtataaaggaactctatgcctgggacaataggagggaaacgttcaggaagtcatcactcgggaatgacgaaactgacaaagaaaaaaaaaagtttttggggttttttaaagtgaacaaacggtcaaatagcaagggatgtttgaccacccctaattctccctccatgcacagtagatcgttaaccctgggaccgagtctgagccttggttccatcagcggtgtctctgtcaagtctgagatgaaaaagcgccgcgcgccaccaccaccagggagcgggccacccgtgcaggacaaggcgtctgaaaaggtctccttgggcagtcagattgatctgcagaaaaaaaagcgtcgcgctccagcacctccacccccacagcccccaccaccatcaccgctgatacctaatagaaccgaagataaggaagaaaacagaaaaagcaccatggtctcccttccactggggtcaggttcccactgttcacccgacggggcacctcaggtgctttcagaggctgaagagactgtgagtgtgggcagttgttttgctagtgaggataccactgaggactctggggtgatgagttctcctagcgatattgtatctctcgactcgcagcaagactctatgaagtataaggacaagtgggccactgatcaggaggactgttcagaccaggatctggccggtacgcccgatctcggcccacaaaaaagccccctgtgggagaagaatggctctgagaactctcatttgaggactgaaaaagctgtgacggcatcaaacgatgaggaggatttgcttatcgcaggagagtttcgcaaaaccctggccgagctggatgaagatttggaggagatggaggactcctacgaaaccgacacctcgtccctgacctcatccatccacggcgcaagcaaccattgcccccaggatgcaatgattccacatggagacactgacgcaatccctgtgacttttatcggggaagtgagtgacgacccagtggatagcggtctgttctcaaatcgcaataataatgccggctcctttgattccgaaggagtggcatcacgccgggactctctggcacctctccaggccgaacactctcagccgcatgagaaagcccgcgaagaggtccccgcccttcacccagcatcacacgatgtggggaagggcatccgggttgccctgtcaaacattagtaaagatggaaacctgatggagaccgcccccagggtgacaagctttgctagtaatctgcatactgataatctgaacgcaaaggtgaaggacaaggtgtacgggtgcgccgacggggaaaggacacaagctacagagagggtaaatagccagcctgtgaatgaaaaggactcgaatgacaaaaatgcggccctggccccaacatcttggcatcagcgcggtcagaatccagggaaaagttaccgccttaaacacgggctgaccacttacaagattattcctccaaagtctgagatgcggtgctacgatcgggatgtatccctgtccacaggcgcaattaaaatcgacgagctgggcaatcttgtatcacctcacgccactggcatccgaattatctctctctctagttctgtgccagaggctgaatcccagccaatcgggaaagtgagggaattctggcgatgcaattctgttgaaaaacaccttggccgacccagcgagagctccgctcggggtccgccaagcacccccgttcccacccaaactcaaaacccagaatcccgtctgcaggccgatccgaagccaataagcccacagcagaaatctgcacatcacgaaggtcgtaatcctttgggggaaggacgcaaccagcctccgacaatgggaatggggcacgtacgagttcccgccgctcacaccactgaggttacattcttaaagccgcagagaagaacatcaagccagtacgttgcaagcgccatcgccaagcggatcggtgcaccaaaggttcacgcagacgtggttagaccccatggctacgcagaaaagggctacgctgggaaggcaccagtgctggccgccccaccagtaacggtcaaggacgatcggacaagcagtccacacagtgaaacccaggggtggaaggacggggcgcagtggccttgcgtgactccccccaataaccatggggaggacctggctgtcggggccccgcctagaggcgaagtcataggaccacaccgtaagctatcgacacaggataggcccgctgcaattcatcgtagtagctgctttagccttgtgcagtcaagccagagagatagagtgtctgtggggcagtcttgtggattctcgggaaaacaatccacttcgtctcaggaggcttcctccgctagtgaaccccgacgcgctccagacggaaccgatccgccaccaccgcacaccagcgatacacaggcttgtagccgggaactggtcaatggatctgtgagggccccaggtcatggcgagccctcgcatccgcctggaggtagcgggacagaatcacacatcctcctagaaagagaagagaaaccctccgtgttttccactgatgggaatgaaaccgattccatctggcctccatcgatattcggaccgaaaaagaagtttaagcctgtcgtacagcgacccgtgcctaaggatacgtcccttcactcagcactaatggaggcaatccacagtgccggcggcaaagatcgcctgcggaagactgctgaacatacaggagaaggaaggcctgctaagctgtcatacaccgaagcggaaggcgagcgctctgcactgctcgccgctattcgcggtcacagcgggacgtgctccctcagaaaagtggctagttctgcaagtgaggagctgcagtccttcagagacgctgcgctgtccgctcagggcagcgaaagccccctcctggaagatctcggtctcctgtcgccacctgctatccccccgcccccgcccccaccatcacaagcgctgtccgctccacggaccgctagtcggtttagcaccggcacactgagtaacactgctgacgccagacaagccttaatggacgccataagaagtggcactggtgccgcaaggctgagaaaagtaccgctgctggtttag

SEQ ID NO: 185137 - DNA, 3786 bp, Artificial Sequence
  derived and/or modified sequence
atggatgccccccgggccagcgctgccaagcccccaactggaaggaagatgaaggcccgggcccctcctcctcctgggaaggccgccaccctgcacgtgcacagcgaccagaagccccctcatgatggagccctgggcagccagcagaacctggtgaggatgaaggaggccctgcgggccagcaccatggatgtgacagtggtgctgcccagcggcctggagaagaggtctgtgctgaatggcagccacgccatgatggacctgctggtggagctgtgcctgcagaaccacctgaaccccagccaccacgccctggagatccgcagcagcgagacccagcagcccctgtccttcaagcccaacaccctcatcggcaccctgaatgtgcacacagtgttcctgaaggagaaggtgcctgaggagaaggtgaagccaggcccccccaaggtgcctgagaagtctgtgcggctggtggtgaactacctgcggacccagaaggctgtggtgcgggtgtccccagaggtgcccctgcagaacatcctgcccgtcatctgtgccaagtgtgaggtgtccccagagcacgtggtgctgctgcgggacaacattgctggggaggagctggagctgagcaagagcctgaatgagctgggcatcaaggagctgtatgcctgggacaacagaagagagaccttcaggaagagcagcctgggcaatgatgaaacagacaaggagaagaagaagttcctgggcttcttcaaggtgaacaagaggagcaacagcaagggctgcctgaccacccccaacagccccagcatgcacagccgcagcctgaccctgggccccagcctgagcctgggcagcatctctggagtgtctgtgaagtctgagatgaagaagaggcgggcccctcctcctcctggcagcggcccccctgtgcaggacaaggccagcgagaaggtgtccctgggcagccagattgacctgcagaagaagaagagaagagccccagcccctcctccaccccagcccccaccacccagccccctcatccccaacagaacagaggacaaggaggagaacaggaagagcaccatggtgtccctgcccctgggcagcggcagccactgcagcccagatggagccccccaggtgctgtctgaggccgaggagaccgtgtctgtgggcagctgctttgccagcgaggacaccacagaagattctggagtgatgagcagccccagcgacatcgtgtccctggacagccagcaggacagcatgaagtacaaggacaagtgggccacagaccaggaggactgcagcgaccaggacctggccggcaccccagacctgggcccccagaagagccccctgtgggagaagaatggaagtgagaacagccacctgaggacagagaaggctgtgacagccagcaatgatgaggaggacctgctgattgctggggagttcaggaagaccctggccgagctggatgaggacctggaggagatggaggacagctatgaaacagacaccagcagcctgaccagcagcatccatggagccagcaaccactgcccccaggatgccatgatcccccatggagacacagatgccatccctgtgaccttcatcggggaggtgtctgatgatcctgtggacagcggcctcttcagcaacagaaacaacaatgccggcagctttgattctgaaggagtggccagcagaagagacagcctggcccccctgcaggccgagcacagccagccccatgagaaggcccgggaggaggtgcctgccctgcacccagccagccatgatgtgggcaagggcatccgggtggccctgagcaacatcagcaaggatggcaacctgatggagacagccccccgggtgaccagctttgccagcaacctgcacacagacaacctgaatgccaaggtgaaggacaaggtgtatggctgtgctgatggagagaggacccaggccacagagcgggtgaacagccagcctgtgaatgagaaggacagcaatgacaagaatgctgccctggcccccacctcctggcaccagaggggccagaaccctgggaagagctaccgcctgaagcacggcctgaccacctacaagatcatcccccccaagtctgagatgcgctgctatgacagagatgtgtccctgagcactggagccatcaagattgatgagctgggcaacctggtgagcccccacgccaccggcatccgcatcatcagcctgagcagctctgtgcctgaggccgagagccagcccatcggcaaggtgcgggagttctggcgctgcaacagcgtggagaagcacctgggccggcccagcgagagcagcgcccggggcccccccagcacccctgtgcccacccagacccagaaccctgagagccggctgcaggccgaccccaagcccatcagcccccagcagaagagcgcccaccacgagggcaggaaccccctgggggagggcaggaaccagccccccaccatgggcatgggccacgtgcgggtgcctgctgcccacaccacagaggtgaccttcctgaagccccagaggaggaccagcagccagtatgtggccagcgccatcgccaagagaattggagcccccaaggtgcatgctgatgtggtgcggccccacggctacgccgagaagggctacgccggcaaggcccctgtgctggccgcccctcctgtgacagtgaaggatgacaggaccagcagcccccacagcgagacccagggctggaaggatggagcccagtggccctgtgtgaccccacccaacaaccacggggaggacctggccgtgggcgcccccccaagaggagaggtgattggcccccacaggaagctgagcacccaggacaggcctgctgccatccacaggagcagctgcttcagcctggtgcagagcagccagagggacagagtgtctgtgggccagagctgtggcttcagcggcaagcagagcaccagcagccaggaggccagcagcgccagcgagccccggcgggccccagatggaacagatcctcctccaccccacaccagtgacacccaggcctgcagccgggagctggtgaatggatctgtgcgggcccctggccacggggagcccagccaccccccaggcggcagcggcacagagagccacatcctgctggagcgggaggagaagcccagcgtcttcagcacagatggaaatgaaacagacagcatctggcccccatccatcttcggccccaagaagaagttcaagcctgtggtgcagaggcctgtgcccaaggacaccagcctgcacagcgccctgatggaggccatccacagcgctgggggcaaggaccggctgaggaagacagctgagcacactggagagggccggcctgccaagctgagctacacagaggccgagggggagaggtctgccctgctggccgccatccggggccacagcggcacctgcagcctgaggaaggtggccagcagcgccagcgaggagctgcagagcttcagagatgctgccctgagcgcccagggcagcgagagccccctgctggaggacctgggcctgctgagccccccagccatccccccacctcctcctccacccagccaggccctgagcgcccccaggacagccagccgcttcagcacaggcaccctgagcaacacagcagatgcccggcaggccctgatggatgccatccgctctggaactggagctgcccggctgaggaaggtgcccctgctggtgtag

SEQ ID NO: 185138 - DNA, 3786 bp, Artificial Sequence
  derived and/or modified sequence
atggacgccccccgggccagcgccgccaagccccccaccggccggaaaatgaaggcacgggcacccccaccccctggcaaggctgcaactctgcatgttcacagcgaccagaagcctccacatgacggcgctttgggaagccaacaaaatctcgtgcggatgaaagaagctttacgtgcttcaaccatggatgtaacagtggtcctgccatcagggttggagaagagaagtgtgcttaacggcagtcacgccatgatggaccttctagtggagctctgtctgcagaatcatttgaatccttcacatcacgctctggaaatcagatcttcagaaacccagcagcctttgtctttcaaaccaaatactctgattggaacactaaatgttcacacagtgttccttaaagaaaaagtgcctgaggagaaagtgaaacctggcccacctaaggtgcccgaaaaatcagtgaggctcgtcgtgaattacctgcgcacacagaaggccgtggtccgagtaagtcccgaggtcccactgcagaatattttgccggtgatttgcgccaaatgtgaagtttctcccgagcatgtggttctgctgcgcgacaacatagcaggtgaggaactggaattgtccaagtcacttaacgagctgggcattaaggaactgtacgcgtgggacaatagacgtgaaactttccgaaaatcctccctcggaaacgacgaaaccgataaggagaagaagaagtttctggggttttttaaagtgaacaaacggtctaactctaagggctgcctgaccacccccaattcgccttctatgcactcccgttccttgactctggggcccagcctttccctggggtctattagcggggttagcgtcaagtcggagatgaagaaacgacgggccccccccccccccgggtccggcccaccggtccaggacaaggcgagtgagaaagtatctcttggctcgcaaatcgatctgcaaaaaaaaaagagaagggctcccgcccccccccctcctcagccgccacccccgtctcccctgatccccaaccggacagaggataaggaagaaaacagaaagagcacaatggtctccctcccactgggtagtggtagccattgctctcccgatggcgcacctcaggtattaagtgaagccgaagaaactgtgtctgtgggcagctgtttcgcctctgaggatactaccgaggacagcggggtaatgagctcaccgtcagatattgtgagcctagactcacagcaggactctatgaaatataaggataaatgggccactgatcaagaggactgtagcgatcaggacctcgctggtacccccgacttgggccctcaaaaatcccccctgtgggagaagaatggctctgagaattcccacctgagaactgaaaaagccgttaccgcctctaacgacgaagaagatttgttgattgccggagagttccgcaaaacccttgctgagctggatgaagatctggaggaaatggaggattcttacgaaaccgacacctcaagcctgacatctagtatccacggagcatcgaaccactgcccccaggatgccatgatcccccacggggatactgatgccattcccgttaccttcatcggggaggtctccgatgacccagttgacagtgggctgttctccaatcggaacaataatgcaggctcttttgattccgagggcgtggctagccgcagagattctctcgccccactacaggccgaacacagccaaccccacgagaaggcccgggaggaggtgcccgcgctgcaccctgcaagccacgatgtaggcaagggaatacgtgtggctctcagtaacattagcaaagacgggaacttgatggagaccgcgccaagggtgacttcctttgccagcaacctccatactgataacctcaatgccaaagtaaaggataaagtgtatggctgtgccgatggagagcggacacaagccaccgagagagttaattcccagccagttaatgagaaggactctaacgataaaaatgcagccctcgcccctacctcttggcatcaacgtggccagaatccaggcaaatcgtaccgcctaaaacacggtctgacaacatacaaaataattcctccaaagtccgaaatgcgatgctatgacagggacgttagcctttccactggagcaattaaaatcgacgagctgggaaatcttgtctcccctcacgctactggtatccggatcatctcactttcttcttccgtgccagaagccgagtcacaacccataggcaaggtgcgtgagttttggagatgcaacagcgtagagaagcacctcggacgtccatctgagagtagcgctaggggacccccctcgacccctgttcccacccagacacaaaaccctgaaagccgtctacaggctgatcctaaacccataagcccacagcaaaaaagcgcacaccacgagggacggaaccctctgggcgaaggccggaaccagcctcctaccatggggatgggacacgtgcgagtaccagccgcccatacaactgaggtgacattcttgaaacctcagcgccggacaagctcccagtacgtggcctcagctatcgcaaaaagaataggagcacctaaggtccacgccgacgtggtacgacctcacggctatgctgaaaaaggctatgcagggaaagcgccagtactagctgcaccacctgtgaccgttaaggatgaccggacctcttcaccgcatagcgagacacagggatggaaggatggagctcagtggccatgcgtgaccccccccaataaccacggtgaggacttggccgttggggcgcctccaagaggagaagtgattggcccgcacagaaaactgagcacccaggatagaccagctgccatccaccgcagttcatgcttttccctggtgcaatcctcccaaagagaccgtgttagcgtaggtcagtcctgtggattctcaggcaagcagagcacctcgtcacaggaggcaagcagcgcctctgagccgaggcgagcacccgacggtactgaccctcctcccccccacactagcgacacccaggcctgctctcgggaattagtcaatggcagtgttagggctcccggccacggagagccaagtcaccctcctgggggctctggcactgaaagtcacatcctgctcgagcgggaagaaaaaccctcagtattcagcactgacggaaacgagaccgacagtatctggccaccttccatcttcgggccaaaaaaaaaattcaaacccgtggtccagcggccggtgcctaaagacacaagcctgcatagcgctctcatggaagcgatacactccgccggaggaaaggatagattaagaaaaactgcggagcacacgggggaaggccgccccgccaagcttagctacacagaggctgagggcgaacggtctgcccttttagcagctattcgtggccacagtggtacctgctcacttaggaaggtagctagttcggcctcagaggagctgcagagctttagggatgcagccctgagtgcccagggttcggagtctcccctgttggaggatctcggcctgctgtcaccgcctgcgattcccccgccaccaccgccaccctcgcaagcgctgtctgctccccgcacggcctctagattttccaccggaaccctctcgaacaccgctgacgcccgccaggcattgatggacgcaatacgatccggtacaggcgccgctagactcaggaaggttcctttactcgtgtag

SEQ ID NO: 185139 - DNA, 3786 bp, Artificial Sequence
  derived and/or modified sequence
atggacgcaccccgagcctccgccgcaaagccccctaccgggagaaagatgaaagctagggcacctccccctcctgggaaggctgccacgcttcacgtccacagcgaccaaaaaccgccacacgatggagctctcggctcccagcaaaatctagtccggatgaaagaagctctgagagcttccaccatggacgtgactgtggtgctgccttccggcttggaaaagagatccgtcctgaacggctcacatgctatgatggacctgctagtggaactgtgccttcagaatcatctcaatcccagtcatcatgccctagagataaggtcctctgaaacccagcagccattgagttttaagcccaacacactgataggaacactgaatgtacacaccgtcttcctcaaggagaaggtgcccgaggaaaaagtgaaacctggaccacctaaggtccccgaaaaaagcgtgaggcttgtggtcaactaccttcgcacgcagaaagccgtcgtgagggtatctcctgaggttccacttcagaacatcctgcctgttatttgcgccaaatgtgaagtttctcctgaacacgtggtgcttttgcgggataacattgctggagaagaactcgagctgagtaagtctctgaatgaacttgggatcaaagagctatatgcatgggacaaccgcagagaaaccttcagaaaaagcagtttaggaaatgacgaaacagacaaggaaaaaaaaaaattcctcggattcttcaaggtaaataaaagaagtaattctaagggctgccttacgaccccaaactcaccatccatgcacagtagatctctaaccctgggcccttcgttgtcactcggatctatttctggtgtctccgtgaaatcggagatgaagaagaggagagctccgccaccccctggctctggccctcccgtccaagataaggcgtcagaaaaggtttccctgggcagtcaaatagacctacagaaaaagaagcgacgtgcccctgccccaccaccaccgcagcctcctcccccatctccacttataccaaacaggacagaagacaaggaagagaaccggaagtcgactatggtgtctctgcccttaggaagtgggagtcactgttctcccgacggagcaccgcaggtcctctcagaggcggaggaaaccgtgtccgtgggttcctgctttgcctctgaagacactaccgaagacagtggcgtgatgagcagtccttccgatattgtttccttagactcacagcaagattctatgaagtataaggataagtgggcaacagaccaggaagactgctctgaccaggacttggctggaacccccgatctggggccacaaaagtcacctctgtgggaaaagaatgggtccgagaatagccacctccgcaccgagaaggccgtgaccgcttcaaatgacgaggaagaccttctcattgctggcgagtttcgcaaaaccctagcagagcttgacgaggacttggaggaaatggaagacagttatgagacagacacctctagcctgacttcttccatacatggagccagcaatcattgtccgcaagatgccatgattccacacggtgataccgatgccattcctgtaaccttcatcggcgaggttagcgacgaccccgtcgattcgggcctgtttagtaacagaaacaacaacgcagggagctttgactctgaaggtgttgcaagccgaagagacagtcttgcgcctctccaagcagagcattctcagcctcacgaaaaagcgagagaggaggtccctgctctgcaccccgcatctcatgatgtgggcaaaggcatcagagtggccctgagtaatattagcaaagacggcaacttgatggagaccgcaccgagggtgacatcattcgctagtaacctgcacactgacaatttgaatgccaaggtgaaggataaagtgtatgggtgtgcagacggggagaggacacaggcaactgagcgcgtcaactcccagccggtgaatgagaaagattcgaacgacaagaacgcagctctggccccaaccagttggcaccaacgcggtcagaatccaggcaagtcctaccgtctcaagcacggactgacaacgtacaaaattatcccacccaagagcgagatgaggtgctacgaccgtgacgtaagtctgtccacaggggctattaaaattgacgagctcggaaacctggtgtccccacacgccacgggcataagaatcataagcctttcatcctccgtccctgaggccgagtctcagccaattggcaaagtgcgagagttctggcgctgcaatagcgtcgaaaaacatctagggagaccctcggagagcagcgcacgtggccctccttctacaccagtgccgactcagacccagaatcccgagagtagactgcaggctgacccgaagcctataagtccgcagcagaaatcagctcatcacgaggggaggaatcccctcggggagggcagaaatcagcctcctacaatgggtatggggcatgttagagtgcccgcagcccatactacggaagtgacatttctgaaaccgcagcgcaggactagcagtcaatacgttgcctccgccattgctaagcgcataggagctcccaaggtgcacgctgatgtggtgcggcctcacgggtacgcggagaaaggctacgctggcaaggcgcctgtgctggcagctcctccagttacagtcaaagacgacaggaccagcagcccccactccgagactcagggctggaaagatggggctcagtggccgtgtgtgaccccgccaaacaatcacggtgaggacctggccgtgggggctcctccccgaggtgaggtgatcggtccgcacaggaagctctctactcaggacagacctgcagctatacatagaagttcttgcttcagcctggttcaaagctctcagagggacagggtctccgtaggccagagctgcggtttttccggcaaacaaagtactagttcccaggaagcgtcctctgctagcgaaccaaggcgggcacccgatggcaccgacccaccgccaccccatacttctgacacacaggcttgcagtcgagaacttgtcaatgggtccgtccgtgcaccagggcacggagaaccgtcacatcctccaggagggtcaggaactgaaagccatatacttctagaacgtgaagagaagcctagtgtcttctctacagacggcaacgagacagatagtatttggccaccttccatcttcggccctaagaagaagttcaaaccggtagtgcagcgcccagtgcctaaagacacatccctgcactccgccctcatggaggccattcattcagccggaggcaaggaccgactgcggaagactgctgagcacaccggggagggaagaccggctaaattatcatacactgaagcggagggtgaaaggtcggctcttctagctgctatcaggggacatagtggaacctgctctctgagaaaggtagctagctcggcttccgaggagttgcaatcatttagggatgctgcactctctgcacagggctctgaatcccccctgctcgaggatctggggctcttatcccctcccgctatccccccaccccctcccccacctagccaagccttgagcgcccctaggaccgcctcccggttttctacaggaactctatctaataccgccgatgctagacaggctctcatggatgcaataaggagcggcaccggagccgctcgcctgaggaaagtgcctctgctggtctag

SEQ ID NO: 185140 - protein, 1053 aa, Artificial Sequence
  derived and/or modified sequence
MAFLKLRDQPSLVQAIFNGDPDEVRALIFKKEDVNFQDNEKRTPLHAAAYLGDAEIIELLILSGARVNAKDSKWLTPLHRAVASCSEEAVQVLLKHSADVNARDKNWQTPLHIAAANKAVKCAEALVPLLSNVNVSDRAGRTALHHAAFSGHGEMVKLLLSRGANINAFDKKDRRAIHWAAYMGHIEVVKLLVSHGAEVTCKDKKSYTPLHAAASSGMISVVKYLLDLGVDMNEPNAYGNTPLHVACYNGQDVVVNELIDCGAIVNQKNEKGFTPLHFAAASTHGALCLELLVGNGADVNMKSKDGKTPLHMTALHGRFSRSQTIIQSGAVIDCEDKNGNTPLHIAARYGHELLINTLITSGADTAKRGIHGMFPLHLAALSGFSDCCRKLLSSGFDIDTPDDFGRTCLHAAAAGGNLECLNLLLNTGADFNKKDKFGRSPLHYAAANCNYQCLFALVGSGASVNDLDERGCTPLHYAATSDTDGKCLEYLLRNDANPGIRDKQGYNAVHYSAAYGHRLCLQLIASETPLDVLMETSGTDMLSDSDNRATISPLHLAAYHGHHQALEVLVQSLLDLDVRNSSGRTPLDLAAFKGHVECVDVLINQGASILVKDYILKRTPIHAAATNGHSECLRLLIGNAEPQNAVDIQDGNGQTPLMLSVLNGHTDCVYSLLNKGANVDAKDKWGRTALHRGAVTGHEECVDALLQHGAKCLLRDSRGRTPIHLSAACGHIGVLGALLQSAASMDANPATADNHGYTALHWACYNGHETCVELLLEQEVFQKTEGNAFSPLHCAVINDNEGAAEMLIDTLGASIVNATDSKGRTPLHAAAFTDHVECLQLLLSHNAQVNSVDSTGKTPLMMAAENGQTNTVEMLVSSASAELTLQDNSKNTALHLACSKGHETSALLILEKITDRNLINATNAALQTPLHVAARNGLTMVVQELLGKGASVLAVDENGYTPALACAPNKDVADCLALILATMMPVSSSSPLSSLTFNAINRYTNTSKTVSFEALPIMRNEPSSYCSFNNIGGEQEYLYTDVDELNDSDSETY

SEQ ID NO: 185141 - DNA, 3162 bp, Artificial Sequence
  derived and/or modified sequence
atggcctttcttaagcttcgcgaccagcccagcctggtgcaggccatcttcaacggagaccccgatgaggtccgcgcactgattttcaagaaggaggatgtgaattttcaagataatgagaagcgtacccccctccacgccgcagcctacttgggcgacgctgagataattgaattgctcatcctctcaggcgcaagggtcaatgcaaaagattcaaaatggctcaccccccttcacagggctgtggcctcttgttcagaggaggcagtgcaggtcctgctgaagcactctgccgacgtgaatgcacgcgataaaaattggcagacccccttgcacatagccgctgccaataaagccgtgaagtgtgcagaagccctggttcccctgctgagtaacgttaatgtatctgatagggccggaaggactgccttgcaccacgccgcattttctggacatggagagatggtaaaattgctgctttctcgaggagctaacatcaatgcctttgacaagaaggatcgtcgcgctatccactgggccgcctatatggggcacattgaggtggtaaagctcctcgtatcccacggagcagaggtgacctgcaaggacaaaaagtcgtatactccactgcacgcggctgcaagttcggggatgatttctgtcgtcaaatatttgctggatctcggcgttgacatgaatgaacccaatgcctacgggaacacacccttgcatgtggcgtgttacaacggacaggatgtagtggttaatgagcttatcgactgtggggccatagtaaaccagaaaaacgaaaaaggattcacccctctccacttcgctgccgcgtccacgcatggggcgttgtgcctcgagctgttagtgggcaatggtgccgacgtgaatatgaagtctaaagatggcaagacccctctgcacatgaccgccctccacggaaggttctctagatcccaaactatcattcagtctggagcagtaatcgattgtgaggataagaacggaaatacccctctgcatatagccgcacgctatggacacgaactcttgataaacactctgattacaagtggagctgacactgccaagcggggaatccacggcatgttcccactgcacctagctgctctcagtggcttctccgactgttgccgtaagttgctaagtagtgggttcgacatcgatacccctgatgacttcgggcgcacgtgcctccatgccgccgccgccggtggaaacctggaatgcttaaatctgctgttgaataccggggcagatttcaataaaaaggataagttcggacgatctcccctacactacgcagccgccaattgcaattatcagtgtctgtttgccctggtgggtagcggtgccagcgtgaacgacctcgatgagcggggctgtactccgctccattacgccgccactagtgacactgatggcaaatgcctggagtacctgctgagaaatgacgccaaccccggcatacgagacaaacaaggctacaatgcagttcactattccgccgcctatggtcatcgcctctgcctgcaactaatagcatccgagactcccctggatgtgctcatggagacttccggaaccgacatgcttagcgacagcgacaacagagccaccatctccccactgcacctagctgcttaccatggacatcaccaggctctggaggtgctcgtgcagagcctactcgatctggacgtgcggaactcaagcggtagaacacctcttgatcttgctgcgttcaaagggcatgtcgagtgtgttgatgtgttaattaaccagggcgcaagtattctcgtgaaggattacatattaaaacgcacccccatccacgctgccgcaaccaatggacattccgaatgcttaagactcctcattggcaatgcagaaccacagaatgcagtggacattcaggacggcaacggccaaacgccactaatgctatctgttctgaatggccacaccgactgcgtgtattcactactgaataaaggcgcaaacgttgacgcaaaggataaatgggggcgaactgcgctgcatcgcggggccgtcactgggcatgaggagtgtgtagacgcgctcttgcagcatggtgctaagtgcttactgcgggatagtcgggggcggacacccatacatctgagcgctgcatgcgggcatattggtgtcctgggagcccttttgcagagcgcggcttcaatggacgcgaatccagctaccgctgacaaccatgggtacactgccctgcactgggcctgttacaatggccacgaaacttgcgtagagttgttgttggaacaggaggtatttcagaaaaccgaggggaacgccttctctccacttcattgcgcagtgataaatgacaacgagggcgcagctgagatgctgatcgatacgttgggcgcctctatagttaacgcaaccgattccaaaggcagaacccctctgcacgcagctgcgtttaccgaccacgtggagtgtctgcaactgcttctgtctcacaacgctcaggtcaacagtgtggactcaacaggcaaaactccgctgatgatggccgctgaaaatggccagaccaataccgtcgaaatgttggtctccagcgcaagcgctgagctcacacttcaggacaattccaagaacaccgcgctgcacttggcctgtagcaaaggtcatgaaacatccgcccttctgattctcgagaagatcaccgataggaatctgattaatgctacgaacgctgcattgcaaactcccctgcacgtcgcagcccgtaatggattgactatggtagtgcaggaactcctgggcaaaggggccagcgtattggcagtggatgagaatggttatacccccgcacttgcgtgtgcccccaacaaggatgtcgccgactgtctcgccctgattttggccaccatgatgcctgttagcagttcgagtcctctgagcagtttaacgtttaacgccattaatcgctatacgaacacttctaaaacagttagtttcgaggcccttccgatcatgaggaacgaaccttcatcatattgttccttcaacaacatcggaggcgagcaggagtatctttacaccgatgtcgatgaactaaatgactcggattctgagacctattag

SEQ ID NO: 185142 - DNA, 3162 bp, Artificial Sequence
  derived and/or modified sequence
atggcattcttgaaattgcgggatcagccaagcctggtacaagctatctttaacggggatcctgatgaagtgcgggctctgattttcaaaaaggaggacgtgaactttcaggacaatgaaaaacgcacgcctctgcacgcggctgcttatctgggggacgcagagattatcgaactgctaatattgtctggtgcgcgggtcaacgccaaagacagcaagtggctgacgcctcttcatagggccgtggcttcttgctcagaggaggccgtccaagtgcttctaaagcacagcgcagacgttaacgctcgggataagaactggcaaacccctctgcacatcgcagcagccaacaaagccgtcaaatgcgctgaagcgctggtcccactactgtcaaatgtaaatgtaagcgatagagccgggaggacggcactgcatcacgcagcctttagcggtcatggggaaatggtcaagctgctcctgagtcgcggggccaatattaatgctttcgataagaaagacagacgggccatacattgggctgcatatatgggtcacattgaagtggttaaattgctggtcagtcacggtgctgaagttacttgcaaggacaagaagtcgtatactcccttacacgcagctgcttcctctgggatgatctccgtggtgaaatacctgctcgacttgggagtggatatgaatgagccgaatgcttacggcaatacccctctgcatgttgcctgctataacggccaggatgtagtggtgaacgaactgattgactgtggcgcaatcgtcaatcagaagaatgaaaagggctttacccctctgcacttcgccgcggcaagcacgcacggggcactgtgtttagaattactcgtcggcaacggggccgacgttaacatgaagtcaaaagatgggaagacaccccttcatatgacagcactacatggccgtttttcaagatcccagacaattattcagtccggagccgtgatcgattgcgaagataaaaatggcaacacccccctgcacattgctgccaggtatgggcacgagctgctgattaatacattaattacctctggtgccgatactgcgaagcgggggattcatgggatgttccctctgcatcttgctgcattgagcggcttcagcgactgctgtagaaaacttctgagctcgggattcgatattgatacgccagatgactttggaaggacttgcctgcacgcggccgctgctggcggaaacctcgaatgcttgaacctgcttctgaacaccggcgctgatttcaataagaaggacaaattcggcagatcgcccctgcattacgccgcagccaactgcaactaccagtgtctgtttgcgctcgtgggctctggagcctcagtcaacgatttggacgaaaggggatgcacacctttacactacgccgcgacttccgacaccgacggcaaatgcctcgaatacttgctgaggaatgatgcaaacccaggaatcagggataagcagggatataatgcagtccactacagcgccgcgtacggacaccggctctgccttcagctgatcgcatctgagacccctctcgatgtgctgatggagacctccggcacagacatgctgtccgattcagataaccgggccaccatatcacctctgcacctcgcagcctaccacggtcatcatcaggctctggaagtcctggttcaatcattgctcgatctagatgtgcgaaacagttccggtagaaccccccttgacctggcagccttcaagggtcacgttgagtgtgtggatgtgctaattaatcaaggcgcctctattctggtgaaggactatatcctaaagcgaacgcctatccacgccgctgccaccaacggccattcagagtgcctcagattgttaataggcaatgccgaacctcagaacgctgtcgacatccaggacggtaacgggcagacaccactaatgctctctgttctgaacgggcatacggactgcgtgtacagtttgctgaacaaaggtgctaacgtagacgcgaaagataagtgggggcggactgcgttacaccgcggggcggtcacagggcacgaagagtgcgtggacgctttgctgcagcacggagccaagtgccttctgcgggacagcagagggcggaccccgattcacttatcagcagcatgcggccacattggagtgctgggagcactgctgcagagcgccgcatccatggatgccaatcccgcaacagcagacaaccatgggtataccgctttgcattgggcttgctataatggtcacgagacctgtgtggaactgctgttggagcaggaagtgttccagaagactgagggaaacgccttttctccgttacactgtgcagtgatcaatgacaacgagggtgccgccgagatgctaattgacactctgggggcgtctatcgtgaatgcgactgacagtaagggccgaactcctcttcacgccgccgcttttaccgaccacgtcgaatgcttgcaactcctgttaagtcacaacgctcaggttaacagcgtggactccactgggaaaacacctctcatgatggctgcagagaatggacagacaaacaccgtggaaatgctggtgtcttccgcgtctgcggaattaactctccaggataattccaaaaacactgcgctccatctggcatgctctaagggccatgagacctctgcactcttaatcctggagaagatcactgatcgtaacctaatcaatgccacaaatgcagccctccagacacccctgcatgtggcagcccgtaacggcctcactatggtggtccaggagttgctcggcaaaggtgccagcgttctggctgtggatgagaacggctatactcctgccctcgcatgtgctcccaacaaggacgtagctgactgcctggcccttatacttgccacaatgatgccagtgtcatcgagctctcctctctcctccctgacttttaatgccattaacagatatactaacaccagcaagactgtatccttcgaggccctaccaatcatgcgcaatgaacctagtagctactgttcatttaataacataggaggagagcaagaatatctgtacaccgacgtggacgagctgaatgactccgactctgaaacttattag

SEQ ID NO: 185143 - DNA, 3162 bp, Artificial Sequence
  derived and/or modified sequence
atggccttcctgaagctgcgggaccagcccagcctggtgcaggccatcttcaacggggaccctgatgaggtgcgggccctgatcttcaagaaggaggatgtgaacttccaggacaatgagaagaggacccccctgcatgctgctgcctacctgggagatgctgagatcatcgagctgctgatcctgagcggggcccgggtgaatgccaaggacagcaagtggctgacccccctgcacagagctgtggccagctgcagcgaggaggccgtgcaggtgctgctgaagcacagcgcagatgtgaatgcccgggacaagaactggcagacccccctgcacatcgctgctgccaacaaggctgtgaagtgtgccgaggccctggtgcccctgctgagcaatgtgaatgtgtctgacagagctggccgcacagccctgcaccacgccgccttcagcggccacggggagatggtgaagctgctgctgagcagaggagccaacatcaatgcctttgacaagaaggaccggcgggccatccactgggccgcctacatgggccacatcgaggtggtgaagctgctggtgtcccatggagctgaggtgacctgcaaggacaagaagagctacacccccctgcacgccgccgccagcagcggcatgatctctgtggtgaagtacctgctggacctgggcgtggacatgaatgagcccaatgcctacggcaacacccccctgcacgtggcctgctacaacggccaggatgtggtggtgaatgagctgattgactgtggggccatcgtgaaccagaagaatgagaagggcttcacccccctgcactttgctgctgccagcacccacggggccctgtgcctggagctgctggtgggcaatggagcagatgtgaacatgaagagcaaggatggcaagacccccctgcacatgacagccctgcacggccgcttcagccgcagccagaccatcatccagagcggggccgtcatcgactgtgaggacaagaatggaaacacccccctgcacatcgccgcccgctatggccacgagctgctgatcaacaccctcatcaccagcggggctgacacagccaagaggggcatccacggcatgttccccctgcacctggccgccctgagcggcttcagtgactgctgcaggaagctgctgagcagcggctttgacatcgacaccccagatgactttggccgcacctgcctgcatgctgctgctgctgggggcaacctggagtgcctgaacctgctgctgaacacaggagctgacttcaacaagaaggacaagtttggccgcagccccctgcactatgctgctgccaactgcaactaccagtgcctgtttgccctggtgggcagcggggcctctgtgaatgacctggatgagcggggctgcacccccctgcactacgccgccaccagtgacacagatggcaagtgcctggagtacctgctgagaaatgatgccaaccctggcatccgggacaagcagggctacaatgctgtgcactacagcgctgcctacggccaccggctgtgcctgcagctgattgccagcgagacccccctggatgtgctgatggagaccagcggcacagacatgctgagtgacagcgacaacagagccaccatcagccccctgcacctggccgcctaccacggccaccaccaggccctggaggtgctggtgcagagcctgctggacctggatgtgaggaacagcagcggccgcacccccctggacctggccgccttcaagggccacgtggagtgtgtggatgtgctgatcaaccagggcgccagcatcctggtgaaggactacatcctgaagaggacccccatccatgctgctgccaccaacggccacagtgaatgtctgcggctgctgattggaaatgctgagccccagaatgctgtggacatccaggatggaaatggccagacccccctgatgctgtctgtgctgaatggccacacagactgtgtgtacagcctgctgaacaagggggccaacgtggatgccaaggacaagtggggccgcacagccctgcacagaggagctgtgacaggccacgaggagtgtgtggatgccctgctgcagcacggggccaagtgcctgctgcgggacagccggggccgcacccccatccacctgtctgctgcctgtggccacatcggcgtgctgggcgccctgctgcagagcgctgcctccatggatgccaacccagccacagctgacaaccacggctacacagccctgcactgggcctgctacaacggccacgagacctgtgtggagctgctgctggagcaggaggtgttccagaagacagagggcaatgccttcagccccctgcactgtgctgtgatcaatgacaatgaaggagctgctgagatgctgattgacaccctgggcgccagcatcgtgaatgccacagacagcaagggccgcacccccctgcatgctgctgccttcacagaccacgtggagtgcctgcagctgctgctgagccacaatgcccaggtgaacagcgtggacagcacaggcaagacccccctgatgatggccgcagaaaatggccagaccaacacagtggagatgctggtgagcagcgccagcgctgagctgaccctgcaggacaacagcaagaacacagccctgcacctggcctgcagcaagggccacgagaccagcgccctgctgatcctggagaagatcacagacaggaacctgatcaatgccaccaatgctgccctgcagacccccctgcacgtggccgccagaaatggcctgaccatggtggtgcaggagctgctgggcaagggggcctctgtgctggccgtggatgaaaatggctacaccccagccctggcctgtgcccccaacaaggatgtggccgactgcctggccctgatcctggccaccatgatgcctgtgagcagcagcagccccctgagcagcctgaccttcaatgccatcaaccgctacaccaacaccagcaagacagtgtcctttgaggccctgcccatcatgagaaatgagcccagcagctactgcagcttcaacaacattggaggagagcaggagtacctgtacacagatgtggatgagctgaatgacagcgacagcgagacctactag

SEQ ID NO: 185144 - DNA, 3162 bp, Artificial Sequence
  derived and/or modified sequence
atggccttcctgaagctgcgggaccagcccagcctggtgcaggccattttcaatggcgaccccgatgaagtgcgtgctttgatattcaagaaagaggatgtaaatttccaggataatgagaaaagaaccccactgcatgccgccgcttatctgggagacgctgaaattattgaactcctgattttgagcggtgcgcgtgtgaatgcaaaagattcaaagtggctgacaccgcttcacagggctgtggccagttgcagtgaggaggcagttcaagttctgttaaagcactccgcagatgtgaatgcccgggacaagaattggcagacgcctcttcacatcgcggctgccaacaaagctgtcaaatgcgctgaagctctggtcccactgctcagtaatgtcaatgtgtccgatcgggccgggaggactgcactgcaccatgccgccttcagtgggcacggagagatggtgaagctactgctctcacgtggggctaatatcaatgcatttgacaaaaaagatagacgggccatacattgggcggcttacatgggccatatcgaagtcgtcaaattgctcgtgtcacatggagccgaggtcacctgcaaggataagaaatcttatacccccctgcatgctgcagcaagctcaggaatgatatcagtagtcaagtaccttttagacctcggcgtggacatgaatgaacctaacgcttacggaaatacacccctgcacgtggcatgctacaacggacaggatgtcgtagtcaatgagttgattgattgtggagcaattgtaaatcagaaaaatgagaagggcttcacaccactgcatttcgcggccgctagcactcacggtgctctgtgtttggaattgctagtcggaaatggcgctgatgtgaatatgaagagtaaggacggaaaaacacctctccacatgacagccttgcatggacggttctcaagatcacagacaataatccagagcggggcagtgattgattgcgaggacaagaacggcaacacacctctgcatattgccgcacggtacggtcatgaattactaatcaatacccttatcaccagtggagccgataccgctaaaaggggaatccacggaatgttccccctgcacctggcagccctctccgggttctccgactgttgtagaaagctgctgtccagcgggtttgacattgacactccagatgactttggaagaacctgtctccatgccgcagctgcaggcgggaacttggagtgcctcaacctcctgcttaacacgggggcagattttaacaagaaggacaaatttggcaggtctccacttcattacgccgccgccaattgcaattatcagtgtttattcgcccttgtcgggtccggggcttcagtgaatgatcttgatgagcgaggctgtacgccattacactatgccgcgacttctgacacggacgggaagtgtcttgaatacttgctgcggaacgatgccaaccccggcattcgggacaaacaggggtacaatgctgtgcactacagcgcggcttacgggcataggctctgcctgcagctcattgcaagcgagactcccctcgacgtgttaatggaaacatctggcactgacatgctatccgacagtgacaatcgcgccacaatttccccacttcatttggccgcgtatcatggacaccaccaggctttggaagtgctggtacagtctctcctggacctcgacgttcggaattcctctgggagaactcctctcgacctggctgcgtttaagggccacgtggagtgtgtggatgtgcttatcaatcaaggagctagcatcctggtgaaggattatattctgaagcgcacaccaatccacgcagcagctacaaatggacatagtgaatgcctaaggctgcttatcgggaacgctgagcctcagaatgcggtggacattcaggatggcaatggtcagacgccactgatgctttctgttttgaatggtcacactgattgcgtctacagtctcttaaacaaaggcgccaacgtggacgccaaagacaagtgggggagaacagccctgcaccgtggggccgtcactggccatgaagaatgtgtggatgctctcctccagcatggtgccaagtgcctgctgagggattcccgaggtcggacacctatccacctgtccgcagcatgtgggcacataggggttctgggcgcactgctacagagtgcggcctctatggacgctaaccccgctaccgcagataaccacgggtacaccgctctccactgggcctgttacaatggacacgagacgtgtgttgagctgctgcttgaacaggaggttttccagaagactgaaggaaacgcattttccccactgcattgcgccgtgataaacgacaacgagggtgccgccgagatgctgatagatacgctcggagccagcatcgtgaatgccacagattccaaaggcagaacccccttgcacgcagccgcatttaccgatcacgtggagtgcctgcagcttttgctgagccataatgcccaggtgaacagtgtcgactccacgggcaaaactcccttgatgatggcagcagagaatggccaaactaacaccgtcgagatgcttgtgtcctctgcctcggccgagctcaccttgcaggacaactccaagaacaccgctctgcacttagcttgctccaaaggtcacgagacctccgctctgctgattctggaaaaaatcaccgacaggaacctaattaacgctactaacgctgcactgcaaaccccactgcacgtcgccgccaggaatggcctgaccatggtggtccaggagttgctgggtaagggggcttctgtgcttgcagtcgacgagaacggatacactcctgccctggcctgtgcgccaaacaaggacgtcgccgattgcttggccctcattctggcaacaatgatgccggtgtctagcagcagtcctcttagcagcctgacattcaatgcaatcaatagatacactaatacatccaagactgtatcctttgaagcactgcccattatgcggaacgagccgtcttcatactgttcatttaacaatataggaggagagcaggaatatctctacacagatgttgacgaactgaacgattcagattcagaaacgtattag

SEQ ID NO: 185145 - DNA, 3162 bp, Artificial Sequence
  derived and/or modified sequence
atggccttcctgaagctgcgggaccagcccagcctggtgcaggccattttcaacggcgaccccgatgaggtgcgagcccttatctttaaaaaagaggatgttaatttccaggacaatgagaaacgcacaccccttcacgctgcggcttatcttggggacgccgagattatcgagcttctgatcctgagcggcgctcgcgttaatgcaaaggactccaaatggttaaccccccttcatcgcgccgtcgctagctgctcagaagaggcggtgcaggtgctccttaagcattccgccgacgtgaatgcccgtgataagaattggcagacaccgcttcatattgccgccgctaacaaagctgtgaagtgcgcagaagcactggtaccattgctgagtaatgtgaatgtgtccgaccgagctggtcgcaccgcactccaccatgctgctttttccggtcacggggagatggtaaagcttctcctgtctcgtggcgccaatatcaatgcatttgataaaaaagacaggagagcgattcattgggcagcatacatgggacacattgaagtggttaaactcctggtcagtcatggagccgaagtgacctgcaaagacaaaaagtcctacacaccactccatgcagctgcgagctcggggatgataagcgtggtgaagtacctgttggacctaggggtcgatatgaacgagccaaacgcctacggcaatactcccctccatgtggcatgctataatgggcaggatgtcgtggtgaatgaactgatcgactgtggagcaattgtcaaccagaagaacgagaaaggattcacccccctgcattttgccgctgcatccactcatggcgcactttgcctcgagctgttggtcgggaatggcgccgatgtgaatatgaagtctaaagatggcaaaacccccttacacatgaccgcattgcatggtaggtttagccggtcccaaaccatcattcagtcaggtgccgtgatcgactgtgaggacaagaacggaaacacaccactgcacattgccgctaggtatggtcacgagctgctgataaataccctgataacatccggcgcagatacagcgaaacgtggtatacatgggatgttccctctgcatctggctgccctgtccgggtttagtgattgttgccgaaagctgctttcctctggatttgacatcgacaccccggatgacttcggacggacttgcctgcatgccgccgccgccgggggcaaccttgaatgtctcaatcttctgcttaacaccggcgctgattttaataaaaaggacaagtttggcaggagccccctccactatgccgccgccaactgcaactaccagtgccttttcgccctcgtcggatccggcgccagcgtcaatgatctggatgagcgggggtgcacacccttgcactacgcggcgacatctgatacagacggcaagtgtttggagtacctgttacggaatgatgccaatcccgggataagagacaagcagggctacaatgcggtacactattccgcggcatatggccatcgcttatgcctccagttgatagcaagtgaaacccccctcgatgtgctgatggagacatccggaactgacatgttgtcggactctgataaccgggccactatctcccctctgcatctcgccgcctaccacggacaccatcaagctctggaggtgttagtgcagagtttgctcgacctggacgtcagaaatagctctggaaggaccccattggatctggctgcttttaaggggcacgtcgagtgtgttgacgtgctcataaaccagggcgcatctatcctggtaaaagattacattttgaagcggacccccatccacgctgccgctacaaatgggcactccgagtgtctcagactgctgatcggaaatgccgagccccagaatgcggtggacatacaggatgggaatgggcagacaccattaatgcttagtgtactcaatggccacaccgattgcgtgtattcgttgctgaacaagggtgctaatgtagatgctaaggacaaatggggtcgcacggctcttcatagaggtgctgtgactggacatgaagaatgcgtggatgccttattacagcatggcgccaaatgtctgctgagagacagccggggtagaacccccatccacttatctgcagcttgcggtcacataggggtcctcggagctctgctccagagtgcagcctctatggatgccaatcctgccactgccgacaatcacggctatacggctctgcattgggcatgctacaacggacatgaaacttgtgtcgagttactccttgagcaggaagtttttcaaaagaccgagggtaatgcgttttccccactccactgcgccgtgatcaacgataacgagggagccgcagaaatgttgattgatacactgggagccagtatcgtgaacgctacggattcaaagggtcgaacccccctgcacgctgccgccttcaccgatcacgtcgaatgcttgcaactgttactgagtcacaatgcacaggtgaactctgtggatagcaccggcaagacacccctcatgatggccgccgaaaacggccagactaacacggttgaaatgctcgtgtcttcagccagtgctgaactgactctccaggataactctaaaaacactgcactccacttggcctgttctaagggacacgaaacgagcgcactgctgatattagagaagataaccgacaggaatctgataaatgccactaatgccgccctgcagaccccactacacgtggcagctcgaaacggcttaacaatggttgttcaggagctgctagggaaaggggcttctgttcttgctgtggatgagaacggttacacgccagcccttgcctgcgctcccaataaagatgtagctgactgtctggcattgattctggccacaatgatgcccgtgtcttcaagcagccccctctcgtcattaacatttaacgcaattaatagatataccaacaccagtaaaactgtgtcatttgaggcattgccaatcatgagaaacgaaccctcctcatactgctctttcaataacataggcggagaacaggagtatctgtatacagacgttgacgagctgaatgattccgattcagaaacgtactag

SEQ ID NO: 185146 - DNA, 6564 bp, Artificial Sequence
  derived and/or modified sequence
gcggccgcgggggctgccagggtatttcgggaagggggcgtgaggaggcggcggcggcagcggcgggtagggcaggcagcagagggaaggagaaagaaaggaaggaagagggcggggagtcctcagaggaggaggcgggaccggccgggcacctcacctctcggcggcggcggcggcggcggcggcggcgggcggccggggaggcggcgccgccccctgcccgcaggtcttctcagcgcagtcggccgcggacccgctggtcccgggcagcggccaaggctactggggcgggagcagtgggccggtcggcggcggcagcggcagcggcggaggaggaggaggctggagtgggcgcggaggcgaccgccatggcgttcctcaaactccgtgaccagccatcactggtgcaagctatatttaacggagatcctgatgaagttcgagcactaatatttaagaaagaagatgttaactttcaggacaatgaaaagcgaaccccattgcacgccgcagcttaccttggagatgcagaaatcattgaacttcttattttatctggagctagagttaatgccaaagacagcaaatggttgacacctttacacagagcagttgcatcttgtagtgaggaagcagttcaggtacttttgaagcattctgcagatgttaatgctcgagacaaaaattggcaaacccctttacatatagctgctgctaataaagctgtaaagtgtgctgaagctttggtacctcttctgagtaatgtaaacgtatctgatcgagcagggaggactgcattacatcatgcagctttcagtggacatggtgagatggtcaaactactcttgtctagaggtgccaatattaatgcttttgacaagaaagataggcgtgctatccattgggcagcatatatgggtcacattgaagtagtgaaattgcttgtgtcgcatggagctgaagtgacatgcaaggataaaaagtcttatacacctcttcatgcagcagcctctagtggaatgatcagcgtagtcaagtaccttctagatcttggagttgatatgaatgaaccaaatgcctatggaaatacacctcttcatgtagcctgctataatggacaagatgttgtagtgaatgaacttatagactgtggtgctattgtgaatcaaaagaatgaaaaaggatttactcctttgcactttgctgctgcatcaacacatggagcattgtgtttagagcttctagttggcaatggggccgatgtcaatatgaagagtaaagatgggaaaaccccactacacatgactgctctccacggtagattctcccgatcacaaaccattatccagagtggagctgtaatcgactgtgaggataagaatggaaatacccctttgcacatagcagcacggtatggccatgagctgctgatcaacactcttattacaagtggtgctgacactgcaaagcgtggcatacatggaatgttccccctccatttggcagccttaagcggcttttcagattgctgcagaaaacttctttcttcaggatttgatatagataccccagatgattttggcaggacttgtctacatgcagctgcagctggagggaatttggagtgcctaaaccttctgctgaatactggtgcagactttaataaaaaggacaaatttgggagatctccactgcactacgctgctgccaactgcaattaccagtgcctgtttgctcttgtgggatcaggagcaagtgtgaatgaccttgatgaaagaggctgcacacccctgcactatgcagctacatcagacacagatggcaagtgcctggaatacttattaagaaacgatgcaaatccagggatccgtgataagcaaggatacaacgcagttcattattcagctgcttatggtcaccgtctatgtcttcagctgattgcaagtgaaactcctctagatgttttaatggaaacctcaggaacagacatgctgagtgattcagataatagagcaacaataagccctttacacttggctgcctatcatggtcaccatcaagcactggaagtgttggtacagtctttgttagatcttgatgtcagaaatagtagtggaagaacacccctagatcttgcagcttttaagggccatgttgaatgtgtggatgtactcattaatcagggagcctcaatcttagtaaaagattacattttgaagaggacacctattcatgcagcagcaacaaatggtcattcagaatgcttacggctattaataggaaatgcagaaccacagaatgcagtggatattcaagatggaaatggacagacgcctctgatgctatctgttctcaacgggcacacagactgtgtttactcattgctgaacaaaggagcaaatgtagatgccaaagataagtggggaaggacagcgttgcatagaggggcagttacaggccatgaagaatgtgtagatgcattacttcaacatggtgctaagtgcttacttcgggatagcaggggccggacgcctatacacctgtctgctgcctgtggacacattggtgttcttggagcccttttgcagtcagcagcatctatggatgcaaatccagccacagcagacaatcatggatatacggcacttcactgggcttgctacaatggtcacgagacatgtgtagaactgcttttagaacaggaagttttccagaaaacggaaggaaatgcttttagtccattgcattgtgccgtgataaatgacaacgaaggtgctgctgagatgttaattgatacattaggtgccagcattgtgaacgccacagattcaaaaggaagaactcctctccatgcagccgccttcacagaccatgtagagtgtttacagctgctgctcagccataatgctcaagtcaattctgtggactctacagggaaaacacctcttatgatggctgcagaaaatggacaaacaaatacagttgagatgctggttagcagtgctagtgcagaactgactttacaagataacagtaaaaatactgccctccatttggcttgtagcaagggtcatgaaactagtgccttgttaatactggaaaagataacagatagaaacctcatcaatgcaaccaacgcagccttgcaaacacctctgcatgttgctgcccgaaatgggctaacaatggtggttcaggaacttttgggaaaaggagcaagtgtgcttgcagtagatgaaaatggctataccccagctttggcctgtgctcccaataaggatgtggctgattgcctggctctcattttggccaccatgatgcctgtctcatcaagtagtcctttatcatccttaacattcaatgccattaaccgttataccaacacctcaaaaacagtcagctttgaagctttgcccatcatgaggaatgaacctagctcctattgcagtttcaataacattggaggggaacaggagtacttatacactgacgtggatgagctcaacgactccgattctgagacctactgagaggctgaggaggagggagttctcacagtaaagcttcaaactgtgctttttcaggaaaaaggcactttgatattcacgtagaaattcaacctaagaggaaagatcccacagtgagccaatgttaagagatctgatggcattaggaggaagagttttaaaggcaagttttacaaaaggaacttctagaatcttgaaatagacctgactgaggaaaacacattgatgtcagaattctttgtggaattgtttaatttggttttgcagtgccaggaacaattggggacactgtgcactctaacctgcttacacaagcaacactattgtaacagaagaaataaagacactagatttaaattttatcaataaaattacaactaaatttaaaggcaataaaagtttggtacagtaggcattatgtgcacagcaaattgcaaaaggaccaaataactgaaaggtttttttaataaaatgccattttgtggaaactggagtagattaaatgaaacattacctaaaccaaactgcaatatttctggaaatgaagctgagatttggttttaaatgttgagtttttttgggttttgttttttttttaagaaaacatctgaaagccttccaatgctgtattaaaccatgagagaaagcagatgtatttttacatttttttcttttacagaactatttcaaatttccaatttttatactattagaattaaaaaccagctgactgggtgcaatacgggtgaaaatacttgtgacatagacattgagatggattggggtcaggctgttgccctgttttgaatggtttgggtttaaaatagtactatttttgtttgaaaatgtaaagaatttcctagaaaaaaattcatgaaatcaaaaagtagactatttcaccctattgcagctaagtggtcctggggcatggagtcttcaacctctctatgaatggcacaccttagtcacttatgttacttttgtgtccccaccatgggttgggggattttttgtttattctgatctatgagttttgaaaaagtgaataatcaaaaggaaaataattccttgttgttcataaattaagcatcactaaagtctcttgaaaggcatttctgtattgggcaagatttaaaatactaaagccttaggtcctattcatatttaaagtagcatgtttgtaacctgttactatttggagagagaagcagttgcctgccaaattgaagactacctttcaaatagcaaaagagagagagaaggctgatatttcggcttttaaataaagatttgtgtggttctgcttttactgtaactgtcactttcccagtgaaaatgatttcatatacattgagggtcttacaggtatgggtaaagttctataaattgcaacaaaatgatacccaatttcattttatcctttttgtattgtgaaactggaaactttatgacattgtaaattatcagctggtttttctgaatataaagtgtgaaaacacagaacagtattttgatctatttgataattttgtgggttttttgaagaattaatgagcatgtacatagaaatagtgactgcttgaatactgtatttacttgcactctttcagtacatcaagattcctgtatattttagagtataataaaacacagatgtgagttgtatttaatgaataatgtatttgtatctgtgcatattatctacaaatctataaagtttctagggcattgactactagattttaagcattttttctaaaatatttacagaaattataaatctaatcccccatcttttctttataatataaagaagtcataatgaacccttcctaattattagtagtaggaaggtgaatatgcattttaatgacagtggactacattttctattgtaccttttgaaaaaaaaaaaaatcaagcagattctaaaagtatacatatgtgtgctttctctttccttttaggaattctcttctgaattccctgagggaattttctagaatctcagaattgaaagagacctgaggttcatccagtctctaacctcttaacaaatgcaggagtcccttctacaagggtgatctttccaccttgaacacttccaagtgactctacctcaccaagcagtccattcagttgttgagcagctctaactgttagaaaggtcttccttagatggagttgaagcctccctcccggtaacttctgtctttgggcctgggtctgtcctccaagagaaccctgagaatgttggaaggatgaatctcgcacattctgccatgtcttctcttttacaggctgtttgacttctctgctgaagtgatttccagaaggactcatttgacacactattagatttaccacatctaatgaaatccaaggtgtagctataaagtgacaagctgtttttaatttatcacatacaccagaacttctatcctgcatcacttatatgtaaatgatgctgttaccaaaaacattaaggtagttcttgcgaatgccaccccactaagaaaactatttcattacttttgtaatccatctgtgagagtctgccccccagcttaaccacttcctttggtctgcacccaatgaagggaaaccccaaagtactgtctcaaatggtatttgaactacgccagtattgttggaataagtacattaattacttgaatgaatgaacacagcaccgtagaaatttcctttatggttacaccttgtatgtctaaagcattcaggccctgttctgtagtgtttcttatcctcacacagagtagaaaagcctgtttgctttatttaacttatacataaaagatgacatctgaaatatctgatgtgtattataataccagcttctgctctagaactactttgggtgaaatggtggtaatagcaaatgacctcctttaacaagacactcatctcaaacaatgccatttagttcaggagatctctaagtgtagctgtaaattttggggttaatttggcttatattggaccttttaaaagaaataaagttttttaatgcaataaa

SEQ ID NO: 185147 - DNA, 4408 bp, Artificial Sequence
  derived and/or modified sequence
gggcgcggaggcgaccgccatggcgttcctcaaactccgtgaccagccatcactggtgcaagctatatttaacggagatcctgatgaagttcgagcactaatatttaagaaagaagatgttaactttcaggacaatgaaaagcgaaccccattgcacgccgcagcttaccttggagatgcagaaatcattgaacttcttattttatctggagctagagttaatgccaaagacagcaaatggttgacacctttacacagagcagttgcatcttgtagtgaggaagcagttcaggtacttttgaagcattctgcagatgttaatgctcgagacaaaaattggcaaacccctttacatatagctgctgctaataaagctgtaaagtgtgctgaagctttggtacctcttctgagtaatgtaaacgtatctgatcgagcagggaggactgcattacatcatgcagctttcagtggacatggtgagatggtcaaactactcttgtctagaggtgccaatattaatgcttttgacaagaaagataggcgtgctatccattgggcagcatatatgggtcacattgaagtagtgaaattgcttgtgtcgcatggagctgaagtgacatgcaaggataaaaagtcttatacacctcttcatgcagcagcctctagtggaatgatcagcgtagtcaagtaccttctagatcttggagttgatatgaatgaaccaaatgcctatggaaatacacctcttcatgtagcctgctataatggacaagatgttgtagtgaatgaacttatagactgtggtgctattgtgaatcaaaagaatgaaaaaggatttactcctttgcactttgctgctgcatcaacacatggagcattgtgtttagagcttctagttggcaatggggccgatgtcaatatgaagagtaaagatgggaaaaccccactacacatgactgctctccacggtagattctcccgatcacaaaccattatccagagtggagctgtaatcgactgtgaggataagaatggaaatacccctttgcacatagcagcacggtatggccatgagctgctgatcaacactcttattacaagtggtgctgacactgcaaagcgtggcatacatggaatgttccccctccatttggcagccttaagcggcttttcagattgctgcagaaaacttctttcttcaggatttgatatagataccccagatgattttggcaggacttgtctacatgcagctgcagctggagggaatttggagtgcctaaaccttctgctgaatactggtgcagactttaataaaaaggacaaatttgggagatctccactgcactacgctgctgccaactgcaattaccagtgcctgtttgctcttgtgggatcaggagcaagtgtgaatgaccttgatgaaagaggctgcacacccctgcactatgcagctacatcagacacagatggcaagtgcctggaatacttattaagaaacgatgcaaatccagggatccgtgataagcaaggatacaacgcagttcattattcagctgcttatggtcaccgtctatgtcttcagctgattgcaagtgaaactcctctagatgttttaatggaaacctcaggaacagacatgctgagtgattcagataatagagcaacaataagccctttacacttggctgcctatcatggtcaccatcaagcactggaagtgttggtacagtctttgttagatcttgatgtcagaaatagtagtggaagaacacccctagatcttgcagcttttaagggccatgttgaatgtgtggatgtactcattaatcagggagcctcaatcttagtaaaagattacattttgaagaggacacctattcatgcagcagcaacaaatggtcattcagaatgcttacggctattaataggaaatgcagaaccacagaatgcagtggatattcaagatggaaatggacagacgcctctgatgctatctgttctcaacgggcacacagactgtgtttactcattgctgaacaaaggagcaaatgtagatgccaaagataagtggggaaggacagcgttgcatagaggggcagttacaggccatgaagaatgtgtagatgcattacttcaacatggtgctaagtgcttacttcgggatagcaggggccggacgcctatacacctgtctgctgcctgtggacacattggtgttcttggagcccttttgcagtcagcagcatctatggatgcaaatccagccacagcagacaatcatggatatacggcacttcactgggcttgctacaatggtcacgagacatgtgtagaactgcttttagaacaggaagttttccagaaaacggaaggaaatgcttttagtccattgcattgtgccgtgataaatgacaacgaaggtgctgctgagatgttaattgatacattaggtgccagcattgtgaacgccacagattcaaaaggaagaactcctctccatgcagccgccttcacagaccatgtagagtgtttacagctgctgctcagccataatgctcaagtcaattctgtggactctacagggaaaacacctcttatgatggctgcagaaaatggacaaacaaatacagttgagatgctggttagcagtgctagtgcagaactgactttacaagataacagtaaaaatactgccctccatttggcttgtagcaagggtcatgaaactagtgccttgttaatactggaaaagataacagatagaaacctcatcaatgcaaccaacgcagccttgcaaacacctctgcatgttgctgcccgaaatgggctaacaatggtggttcaggaacttttgggaaaaggagcaagtgtgcttgcagtagatgaaaatggctataccccagctttggcctgtgctcccaataaggatgtggctgattgcctggctctcattttggccaccatgatgcctgtctcatcaagtagtcctttatcatccttaacattcaatgccattaaccgttataccaacacctcaaaaacagtcagctttgaagctttgcccatcatgaggaatgaacctagctcctattgcagtttcaataacattggaggggaacaggagtacttatacactgacgtggatgagctcaacgactccgattctgagacctactgagaggctgaggaggagggagttctcacagtaaagcttcaaactgtgctttttcaggaaaaaggcactttgatattcacgtagaaattcaacctaagaggaaagatcccacagtgagccaatgttaagagatctgatggcattaggaggaagagttttaaaggaattctcttctgaattccctgagggaattttctagaatctcagaattgaaagagacctgaggttcatccagtctctaacctcttaacaaatgcaggagtcccttctacaagggtgatctttccaccttgaacacttccaagtgactctacctcaccaagcagtccattcagttgttgagcagctctaactgttagaaaggtcttccttagatggagttgaagcctccctcccggtaacttctgtctttgggcctgggtctgtcctccaagagaaccctgagaatgttggaaggatgaatctcgcacattctgccatgtcttctcttttacaggctgtttgacttctctgctgaagtgatttccagaaggactcatttgacacactattagatttaccacatctaatgaaatccaaggtgtagctataaagtgacaagctgtttttaatttatcacatacaccagaacttctatcctgcatcacttatatgtaaatgatgctgttaccaaaaacattaaggtagttcttgcgaatgccaccccactaagaaaactatttcattacttttgtaatccatctgtgagagtctgccccccagcttaaccacttcctttggtctgcacccaatgaagggaaaccccaaagtactgtctcaaatggtatttgaactacgccagtattgttggaataagtacattaattacttgaatgaatgaacacagcaccgtagaaatttcctttatggttacaccttgtatgtctaaagcattcaggccctgttctgtagtgtttcttatcctcacacagagtagaaaagcctgtttgctttatttaacttatacataaaagatgacatctgaaatatctgatgtgtattataataccagcttctgctctagaactactttgggtgaaatggtggtaatagcaaatgacctcctttaacaagacactcatctcaaacaatgccatttagttcaggagatctctaagtgtagctgtaaattttggggttaatttggcttatattggaccttttaaaagaaataaagttttttaatgcaat

SEQ ID NO: 185148 - DNA, 3162 bp, Artificial Sequence
  derived and/or modified sequence
atggccttcttaaagctccgagatcagcccagcttggtgcaggccattttcaacggggatcccgacgaggtaagggcgctaatcttcaagaaggaagatgtcaacttccaggacaacgagaaacggacacctctgcatgccgctgcctatttgggagatgctgaaatcattgagctccttattttatccggcgcaagagtgaatgccaaagatagcaaatggttgactcctctgcatcgggctgtggcctcttgcagcgaagaagctgtgcaggtactgttaaaacatagcgcagacgtaaatgcaagggataagaattggcagaccccgctgcacatcgcagcagccaataaggcagtgaagtgtgccgaggcattagtccccctcctgagtaacgtgaatgtctccgaccgggcaggccgtaccgccttacaccacgcagccttctccggacatggggaaatggtcaaactcctgctgagtaggggcgctaacatcaacgcttttgataaaaaggaccgccgtgctatccactgggcagcatatatgggacacattgaagttgtaaagcttcttgttagtcacggggctgaggtaacatgcaaggacaagaaatcttatactcctctccatgcagccgcaagctcagggatgatttctgttgtgaaatatttgctggatcttggtgtggatatgaatgaaccgaatgcttatggtaacacaccattgcacgtggcttgttacaacggccaggatgtggtggtcaatgagctgatagactgtggcgcaatagtgaaccagaagaacgagaaaggcttcacacccctgcacttcgcggctgcgtccacgcatggggctttatgtctagagcttcttgtgggtaatggagctgacgtgaatatgaagtcgaaagacggaaagacccccctgcacatgaccgcccttcatggtcggttctctaggtctcagacaatcattcagagtggggcagtgattgactgcgaagataagaatggcaacacccccctgcacatcgccgctcggtacgggcacgagctcctcatcaacaccctgatcaccagcggtgccgacaccgccaaacggggaatccatgggatgtttcctctgcatctggctgcgctgtccggtttcagcgattgctgccgcaaactgctgagttccggttttgacatcgataccccggacgactttggacggacatgcctgcacgctgctgctgcgggtggtaacttggagtgtctgaacttacttctcaacaccggagctgacttcaacaagaaagataagttcgggaggtctccccttcactacgccgctgccaattgtaactaccagtgcctgttcgcccttgtgggtagtggcgcatccgtcaacgaccttgatgagcggggttgtacaccactccactacgctgccacaagcgacacagacgggaaatgtcttgagtatctgctaagaaacgatgctaatcccggtatccgcgataagcagggttacaatgctgtacactacagtgcagcatatgggcatagactgtgcctccagttgattgctagcgagaccccgcttgatgtgctgatggaaacaagcggcaccgacatgctgtccgacagtgataatagagccaccatctcgcctcttcatttagccgcatatcacgggcatcatcaagctcttgaggtgctcgtgcagtccctgttggatctagatgtccggaatagttcgggacggacccctctggatctggctgccttcaagggacatgtggagtgcgttgacgtacttattaatcagggagcaagtatactggttaaggactatattctgaagaggaccccaatccacgccgctgcaactaatggccattcagaatgtttacggctcctgataggaaatgccgaaccgcaaaacgctgttgatatacaggatgggaacggacaaacgccactaatgctgagcgtcctgaatggccacacggattgtgtgtactccttactgaacaagggcgctaacgttgatgcaaaggacaagtggggtagaactgctcttcacaggggcgctgtgacaggccacgaagagtgcgtggatgccctgctgcagcacggggctaagtgtttactgagagatagccggggtcggacccccatccacttgagcgctgcttgcggccatatcggagtcctcggtgcccttttgcagtcagccgcatcaatggatgccaacccagctacagctgataatcacggatacaccgcactccactgggcctgctataatgggcatgagacatgcgttgagctgctgttggagcaggaggtgtttcagaagactgagggcaatgctttcagcccactccattgtgccgtgataaacgataatgagggcgctgccgaaatgcttattgatacgttaggagcatctattgttaatgctaccgattctaagggacgaaccccgctgcacgccgctgccttcacagaccacgtagagtgcctccagctcctgctctcccacaacgcccaagtcaattcagtcgacagtacaggcaagacccctcttatgatggcagcagagaacgggcaaacgaataccgtcgaaatgttagtgtcatccgcgagcgcagaactcacactgcaggataattccaaaaataccgctctgcacttggcttgctcaaagggacacgaaacatccgctctcctgatattggaaaagatcactgaccggaatctgataaatgcaacgaatgccgctctgcagactcccctgcatgtagcggctaggaatggactcacaatggtagtgcaggagcttctgggcaagggtgctagcgtgctcgccgtcgatgaaaacggttacacgccggctctcgcttgtgcaccaaacaaagacgtcgcagactgtctggctctgatcctggctacaatgatgcctgttagcagcagttctcccctttcctctctaacttttaatgctatcaacagatacactaatacatctaaaacagtcagctttgaggcactgcctattatgagaaacgagccaagctcatattgcagcttcaacaacattggcggtgagcaggagtacctatatacagacgtagatgagctcaacgattctgactccgaaacatattag

SEQ ID NO: 185149 - DNA, 3162 bp, Artificial Sequence
  derived and/or modified sequence
atggcctttctgaagctgcgagaccagcccagcctggtacaggcgatattcaatggagatccagacgaggttagggctctcatattcaagaaggaggacgtgaactttcaggacaatgaaaagaggactccattgcacgccgcagcctacctcggcgatgcagagattattgagctgttgattctgagcggtgccagagtgaacgctaaggactctaaatggctgacccccttacatcgcgcagtggcaagctgttctgaggaggcggtgcaagtgcttctgaaacactccgcagacgtcaacgcacgcgataaaaactggcaaactcccctgcatattgcggcagcaaacaaagccgttaagtgcgcagaagccctcgtgcccctgctgtccaacgtgaacgtgagcgatcgggctggtagaaccgccttacaccacgccgctttttctggccatggggaaatggtgaagctccttctcagccggggagcgaacatcaatgcttttgataagaaggaccggagggctatccattgggctgcctacatggggcacattgaagttgtgaagcttttagtcagccacggcgcagaggtgacctgtaaggacaaaaagagttacacccccctgcatgcagctgcgagctcaggcatgataagcgtagtgaagtacctccttgatttgggcgtcgacatgaacgaacctaacgcttacggaaacaccccactccatgtcgcctgctataatggccaggacgtggttgtcaacgagctcatagactgtggggctatcgtgaaccagaaaaatgaaaagggttttacccctctacattttgccgcagcctccactcacggcgctctgtgtctggaactgctcgtgggcaatggggcagatgttaacatgaagagtaaagacggtaaaacgccattgcatatgactgcgctccatggcaggttctccagatcacagaccatcatccaatcaggcgctgttattgattgcgaggataagaatggcaatacgcccctgcacatcgccgcacggtatggacacgaactcctgataaatactctgattacatctggcgcagacaccgccaagaggggaattcatggaatgtttccgctccacctcgcagctctgtcggggtttagtgattgctgtaggaaattgctgagcagcggtttcgacattgacacccctgacgatttcggcagaacctgcttgcatgcggcagcggcaggaggaaacctggagtgccttaacctgctattgaatacaggcgcagacttcaataagaaggataaattcggcaggtccccactgcactatgctgctgcaaattgtaactatcagtgtctgttcgccttagtaggctcaggcgcatcggtcaacgatcttgacgaaagaggctgcacgcccctccactacgccgcaacctccgacactgatggcaaatgcttggagtatctgctgcgtaacgacgccaaccctggaataagagataagcagggctacaatgcggtgcattactccgccgcatatgggcacaggctttgcctgcagcttatcgcctctgaaactcctctggatgtgctcatggaaacatccgggaccgatatgctgtctgatagcgacaaccgtgccaccattagccctttgcatctcgcagcttaccatggacaccatcaggccctggaagtgctggtccaatcactgctggacctggatgtgcgaaacagctccggaaggacgccactggacttagcggcatttaaaggacacgtggaatgtgttgatgtgctcattaaccaaggcgcaagcattctcgtcaaagactatatactgaagcgaaccccgatccacgctgctgccactaacgggcatagcgagtgtcttagattgctcattggtaacgccgagccacaaaatgccgtggatatccaggatgggaacggtcaaacaccattgatgcttagtgttttgaacggccatacggattgtgtgtattcactgttgaataaaggggctaacgtcgacgcaaaagacaaatgggggaggacggccctccaccgtggagccgtgaccggccatgaagagtgcgtcgatgccttattacagcatggggctaagtgtctcctcagagattccagggggagaacccctattcacttgtctgctgcatgcggccatatcggcgtgctgggcgctctactgcagtctgccgcttcaatggacgcaaatcccgctactgccgacaaccacgggtacactgctttgcactgggcttgttacaatggccacgaaacctgtgtggagctgctgttagaacaggaagtgtttcagaagaccgagggaaatgcttttagccccctccattgcgctgtgattaacgataatgaaggagcggctgagatgcttattgacaccctgggcgcaagcatcgtgaacgccacggatagtaaagggaggacgcccctacacgcagccgcattcactgaccacgtcgagtgtcttcagctcctgctgtcccacaacgcccaggttaacagtgtggattcaactggcaagactccgctaatgatggctgcagagaatggacagactaacacagtggagatgctggtgagttccgcttcagcagaactgaccctgcaagacaactctaagaacacggctttgcatctcgcttgctcaaagggtcacgaaactagtgctctgctgattctggaaaagatcaccgatcgcaaccttatcaatgcaacaaatgccgctttgcaaactcctcttcacgtagcggctcggaatgggcttaccatggtggtgcaagaactgctggggaagggcgcttcagtgctggcagtcgacgagaacggctatacaccggcactcgcatgtgctccaaataaggacgtggctgactgcctggctctgatactggctacgatgatgcctgtcagcagcagtagccctctcagttcattaacctttaatgctatcaatcgatacaccaatacaagcaagactgtgtctttcgaggcccttcccataatgcgtaacgagcccagcagttactgttcattcaataacatcggcggagagcaagagtacttatacacagatgtggatgagttaaacgacagtgattccgagacctactag

SEQ ID NO: 185150 - DNA, 3162 bp, Artificial Sequence
  derived and/or modified sequence
atggccttcctgaagctgagagaccagcccagcctggtgcaggccatcttcaacggcgaccccgacgaggtgagagccctgatcttcaagaaggaggacgtgaacttccaggacaacgagaagagaacccccctgcacgccgccgcctacctgggcgacgccgagatcatcgagctgctgatcctgagcggcgccagagtgaacgccaaggacagcaagtggctgacccccctgcacagagccgtggccagctgcagcgaggaggccgtgcaggtgctgctgaagcacagcgccgacgtgaacgccagagacaagaactggcagacccccctgcacatcgccgccgccaacaaggccgtgaagtgcgccgaggccctggtgcccctgctgagcaacgtgaacgtgagcgacagagccggcagaaccgccctgcaccacgccgccttcagcggccacggcgagatggtgaagctgctgctgagcagaggcgccaacatcaacgccttcgacaagaaggacagaagagccatccactgggccgcctacatgggccacatcgaggtggtgaagctgctggtgagccacggcgccgaggtgacctgcaaggacaagaagagctacacccccctgcacgccgccgccagcagcggcatgatcagcgtggtgaagtacctgctggacctgggcgtggacatgaacgagcccaacgcctacggcaacacccccctgcacgtggcctgctacaacggccaggacgtggtggtgaacgagctgatcgactgcggcgccatcgtgaaccagaagaacgagaagggcttcacccccctgcacttcgccgccgccagcacccacggcgccctgtgcctggagctgctggtgggcaacggcgccgacgtgaacatgaagagcaaggacggcaagacccccctgcacatgaccgccctgcacggcagattcagcagaagccagaccatcatccagagcggcgccgtgatcgactgcgaggacaagaacggcaacacccccctgcacatcgccgccagatacggccacgagctgctgatcaacaccctgatcaccagcggcgccgacaccgccaagagaggcatccacggcatgttccccctgcacctggccgccctgagcggcttcagcgactgctgcagaaagctgctgagcagcggcttcgacatcgacacccccgacgacttcggcagaacctgcctgcacgccgccgccgccggcggcaacctggagtgcctgaacctgctgctgaacaccggcgccgacttcaacaagaaggacaagttcggcagaagccccctgcactacgccgccgccaactgcaactaccagtgcctgttcgccctggtgggcagcggcgccagcgtgaacgacctggacgagagaggctgcacccccctgcactacgccgccaccagcgacaccgacggcaagtgcctggagtacctgctgagaaacgacgccaaccccggcatcagagacaagcagggctacaacgccgtgcactacagcgccgcctacggccacagactgtgcctgcagctgatcgccagcgagacccccctggacgtgctgatggagaccagcggcaccgacatgctgagcgacagcgacaacagagccaccatcagccccctgcacctggccgcctaccacggccaccaccaggccctggaggtgctggtgcagagcctgctggacctggacgtgagaaacagcagcggcagaacccccctggacctggccgccttcaagggccacgtggagtgcgtggacgtgctgatcaaccagggcgccagcatcctggtgaaggactacatcctgaagagaacccccatccacgccgccgccaccaacggccacagcgagtgcctgagactgctgatcggcaacgccgagccccagaacgccgtggacatccaggacggcaacggccagacccccctgatgctgagcgtgctgaacggccacaccgactgcgtgtacagcctgctgaacaagggcgccaacgtggacgccaaggacaagtggggcagaaccgccctgcacagaggcgccgtgaccggccacgaggagtgcgtggacgccctgctgcagcacggcgccaagtgcctgctgagagacagcagaggcagaacccccatccacctgagcgccgcctgcggccacatcggcgtgctgggcgccctgctgcagagcgccgccagcatggacgccaaccccgccaccgccgacaaccacggctacaccgccctgcactgggcctgctacaacggccacgagacctgcgtggagctgctgctggagcaggaggtgttccagaagaccgagggcaacgccttcagccccctgcactgcgccgtgatcaacgacaacgagggcgccgccgagatgctgatcgacaccctgggcgccagcatcgtgaacgccaccgacagcaagggcagaacccccctgcacgccgccgccttcaccgaccacgtggagtgcctgcagctgctgctgagccacaacgcccaggtgaacagcgtggacagcaccggcaagacccccctgatgatggccgccgagaacggccagaccaacaccgtggagatgctggtgagcagcgccagcgccgagctgaccctgcaggacaacagcaagaacaccgccctgcacctggcctgcagcaagggccacgagaccagcgccctgctgatcctggagaagatcaccgacagaaacctgatcaacgccaccaacgccgccctgcagacccccctgcacgtggccgccagaaacggcctgaccatggtggtgcaggagctgctgggcaagggcgccagcgtgctggccgtggacgagaacggctacacccccgccctggcctgcgcccccaacaaggacgtggccgactgcctggccctgatcctggccaccatgatgcccgtgagcagcagcagccccctgagcagcctgaccttcaacgccatcaacagatacaccaacaccagcaagaccgtgagcttcgaggccctgcccatcatgagaaacgagcccagcagctactgcagcttcaacaacatcggcggcgagcaggagtacctgtacaccgacgtggacgagctgaacgacagcgacagcgagacctactag

SEQ ID NO: 185151 - protein, 634 aa, Artificial Sequence
  derived and/or modified sequence
MASARIGDEYAEDSSDEEDIRNTVGNVPLEWYDDFPHVGYDLDGRRIYKPLRTRDELDQFLDKMDDPDYWRTVQDPMTGRDLRLTDEQVALVRRLQSGQFGDVGFNPYEPAVDFFSGDVMIHPVTNRPADKRSFIPSLVEKEKVSRMVHAIKMGWIQPRRPRDPTPSFYDLWAQEDPNAVLGRHKMHVPAPKLALPGHAESYNPPPEYLLSEEERLAWEQQEPGERKLSFLPRKFPSLRAVPAYGRFIQERFERCLDLYLCPRQRKMRVNVDPEDLIPKLPRPRDLQPFPTCQALVYRGHSDLVRCLSVSPGGQWLVSGSDDGSLRLWEVATARCVRTVPVGGVVKSVAWNPSPAVCLVAAAVEDSVLLLNPALGDRLVAGSTDQLLSAFVPPEEPPLQPARWLEASEEERQVGLRLRICHGKPVTQVTWHGRGDYLAVVLATQGHTQVLIHQLSRRRSQSPFRRSHGQVQRVAFHPARPFLLVASQRSVRLYHLLRQELTKKLMPNCKWVSSLAVHPAGDNVICGSYDSKLVWFDLDLSTKPYRMLRHHKKALRAVAFHPRYPLFASGSDDGSVIVCHGMVYNDLLQNPLLVPVKVLKGHVLTRDLGVLDVIFHPTQPWVFSSGADGTVRLFT

SEQ ID NO: 185152 - protein, 746 aa, Artificial Sequence
  derived and/or modified sequence
MAGSRGAGRTAAPSVRPEKRRSEPELEPEPEPEPPLLCTSPLSHSTGSDSGVSDSEESVFSGLEDSGSDSSEDDDEGDEEGEDGALDDEGHSGIKKTTEEQVQASTPCPRTEMASARIGDEYAEDSSDEEDIRNTVGNVPLEWYDDFPHVGYDLDGRRIYKPLRTRDELDQFLDKMDDPDYWRTVQDPMTGRDLRLTDEQVALVRRLQSGQFGDVGFNPYEPAVDFFSGDVMIHPVTNRPADKRSFIPSLVEKEKVSRMVHAIKMGWIQPRRPRDPTPSFYDLWAQEDPNAVLGRHKMHVPAPKLALPGHAESYNPPPEYLLSEEERLAWEQQEPGERKLSFLPRKFPSLRAVPAYGRFIQERFERCLDLYLCPRQRKMRVNVDPEDLIPKLPRPRDLQPFPTCQALVYRGHSDLVRCLSVSPGGQWLVSGSDDGSLRLWEVATARCVRTVPVGGVVKSVAWNPSPAVCLVAAAVEDSVLLLNPALGDRLVAGSTDQLLSAFVPPEEPPLQPARWLEASEEERQVGLRLRICHGKPVTQVTWHGRGDYLAVVLATQGHTQVLIHQLSRRRSQSPFRRSHGQVQRVAFHPARPFLLVASQRSVRLYHLLRQELTKKLMPNCKWVSSLAVHPAGDNVICGSYDSKLVWFDLDLSTKPYRMLRHHKKALRAVAFHPRYPLFASGSDDGSVIVCHGMVYNDLLQNPLLVPVKVLKGHVLTRDLGVLDVIFHPTQPWVFSSGADGTVRLFT

SEQ ID NO: 185153 - DNA, 1969 bp, Artificial Sequence
  derived and/or modified sequence
atggcgagcgcccggattggggatgagtatgcggaggacagctctgatgaggaggacatccggaacacggtgggcaacgtgcccttggagtggtacgatgacttcccccacgtgggctacgacctggatggcaggcgcatctacaagcccctgcggacccgggatgagctggaccagttcctggacaagatggacgatcctgactactggcgcaccgtgcaggacccgatgacagggcgggacctgagactgacggatgagcaggtggccctggtgcggcggctgcagagtggccagtttggggatgtgggcttcaacccctatgagccggctgtcgacttcttcagcggggacgtcatgatccacccggtgaccaaccgcccggccgacaagcgcagcttcatcccctccctggtggagaaggagaaggtctctcgcatggtgcacgccatcaagatgggctggatccagcctcgccggccccgagaccccacccccagcttctatgacctgtgggcccaggaggaccccaacgccgtgctcgggcgccacaagatgcacgtacctgctcccaagctggccctgccaggccacgccgagtcgtacaacccaccccctgaatacctgctcagcgaggaggagcgcttggcgtgggaacagcaggagccaggcgagaggaagctgagctttttgccacgcaagttcccgagcctgcgggccgtgcctgcctacggacgcttcatccaggaacgcttcgagcgctgccttgacctgtacctgtgcccacggcagcgcaagatgagggtgaatgtagaccctgaggacctcatccccaagctgcctcggccgagggacctgcagcccttccccacgtgccaggccctggtctacaggggccacagtgaccttgtccggtgcctcagtgtctctcctgggggccagtggctggtttcaggctctgacgacggctccctgcggctctgggaggtggccactgcccgctgtgtgaggactgttcccgtggggggcgtggtgaagagtgtggcctggaaccccagccccgctgtctgcctggtggctgcagccgtggaggactcggtgctgctgctgaacccagctctgggggaccggctggtggcgggcagcacagatcagctgttgagcgccttcgtcccgcctgaggagccccccttgcagccggcccgctggctggaggcctcagaggaggagcgccaagtgggcctgcggctgcgcatctgccacgggaagccagtgacgcaggtgacctggcacgggcgtggggactacctggccgtggtgctggccacccaaggccacacccaggtgctgattcaccagctgagccgtcgccgcagccagagtccgttccgccgcagccacggacaggtgcagcgagtggccttccaccctgcccggcccttcctgttggtggcgtcccagcgcagcgtccgcctctaccacctgctgcgccaggagctcaccaagaagctgatgcccaactgcaagtgggtgtccagcctggcggtgcaccctgcaggtgacaacgtcatctgtgggagctacgatagcaagctggtgtggtttgacctggatctttccaccaagccatacaggatgctgagacaccacaagaaggctctgcgggctgtggccttccacccgcggtacccactctttgcgtcaggctcggacgacggcagtgtcatcgtctgccatggcatggtgtacaatgaccttctgcagaaccccttgctggtgcccgtcaaggtgctgaagggacacgtgctgacccgagatctgggagtgctggacgtcatcttccaccccacccagccgtgggtcttctcctcgggggcagacgggactgtccgcctcttcacctagctgttctgcctgcctggggctggggtggtcgtgctgaagtcaacagagcctttaccctgtgctg

SEQ ID NO: 185154 - DNA, 1905 bp, Artificial Sequence
  derived and/or modified sequence
atggccagcgccagaatcggagacgagtatgctgaggatagctccgacgaagaggatattcgcaacactgtgggcaatgtgccgttggagtggtatgacgattttccccacgtggggtacgacctggacggacggcggatctacaaaccattaaggaccagagacgaactggatcagttcttagacaagatggacgaccccgactactggcgcactgtgcaggaccctatgactggccgggacctccgcctgactgatgaacaggtcgctctcgttagacgcttgcagagtggacaattcggggacgtgggttttaatccctacgaacccgcggtggacttcttctccggggacgtgatgatccacccggtgacaaacagacctgctgacaagagatcgtttatcccttcccttgttgaaaaagaaaaggtgagtagaatggttcacgctataaagatgggctggatccaaccacggagacccagggatcctacgcccagcttctatgacctgtgggcgcaggaagaccccaacgccgtactcggtcgtcacaagatgcacgtgccagcccctaagcttgccctaccgggacatgccgagagttataaccccccacctgagtatcttctgtcagaggaggagcggctggcatgggaacagcaggaacccggcgaacgaaagttaagttttctgcccaggaaattcccctctctgcgggccgtacccgcctatggaagattcatccaggaacggtttgagcgttgcttagatttgtacctgtgcccacggcagcggaaaatgagagtgaatgtcgacccggaggatctaattcctaaactgcctaggcccagggatctgcagccttttccaacttgtcaggccttggtgtacagaggacactccgatctggtaaggtgcctgagtgtctcccccggcgggcaatggctagtatctggctcagacgacggatccttgcggctctgggaagtagctacagcccgctgcgtacggacagtccccgttggaggagtggtaaaatctgtggcgtggaacccatcccccgccgtttgcttggtggccgcagccgtggaggacagtgtgttattattgaatcccgcactgggagataggctcgtcgctggcagtaccgaccagctgctgtccgcgttcgtaccaccagaggagccacctctacaacctgcccgctggctggaagcctctgaagaggaacgccaggtgggcttgcggcttagaatttgccatggtaagcctgtgacacaggtcacctggcatggtcgcggagactacctggccgtcgttctggccacccagggccatacgcaagtactcatacaccagctttcccgccgcaggtcccagagtccctttaggcggagccatgggcaggtgcagagggtggcctttcacccggcccgcccttttctgcttgtggcttctcagaggtccgtgcgcctatatcatctgctgaggcaggagctgacaaaaaagttaatgccaaactgcaagtgggtctcgtctttggccgtccacccggctggcgacaacgtgatttgcggcagctacgattctaaattggtctggttcgatttggatctgtccacaaagccatatagaatgcttagacaccacaaaaaggctctgagagctgtcgcatttcatccacgttaccccttgtttgcttctggcagtgatgatggatcagtcattgtttgccatgggatggtctacaacgacctgctgcagaacccgctgttggttcctgtgaaggttctgaaggggcacgtccttactcgagatttaggcgtcctggatgtgatcttccacccaacccagccctgggtgttcagctcaggtgctgatggcacagttagactctttacatag

SEQ ID NO: 185155 - DNA, 1905 bp, Artificial Sequence
  derived and/or modified sequence
atggccagcgccagaattggagatgaatatgcagaggacagcagtgatgaggaggacatccggaacacagtgggcaatgtgcccctggagtggtatgatgacttcccccacgtgggctatgacctggatggaagacgcatctacaagcccctgcggaccagagatgagctggaccagttcctggacaagatggatgatcctgactactggaggacagtgcaggaccccatgacaggccgggacctgcggctgacagatgagcaggtggccctggtgcggcggctgcagagcggccagtttggagatgtgggcttcaacccctatgagcctgctgtggacttcttctctggagatgtgatgatccaccctgtgaccaacagacctgctgacaagaggagcttcatccccagcctggtggagaaggagaaggtgtccaggatggtgcacgccatcaagatgggctggatccagccccggcggccccgggaccccacccccagcttctatgacctgtgggcccaggaggaccccaatgctgtgctgggccgccacaagatgcacgtgcctgcccccaagctggccctgcccggccatgctgagagctacaaccccccacctgagtacctgctgtctgaggaggagcggctggcctgggagcagcaggagcctggagagaggaagctgtccttcctgcccaggaagttccccagcctgcgggctgtgcctgcctacggccgcttcatccaggagagatttgagcgctgcctggacctgtacctgtgcccccggcagaggaagatgagggtgaatgtggaccctgaggacctgatccccaagctgccccggccccgggacctgcagcccttccccacctgccaggccctggtgtaccggggccacagcgacctggtgcgctgcctgtctgtgtccccaggcggccagtggctggtgtctggcagtgatgatggcagcctgcggctgtgggaggtggccacagcccgctgtgtgaggacagtgcctgtgggcggcgtggtgaagtctgtggcctggaaccccagccctgctgtgtgcctggtggccgctgctgtggaggacagcgtgctgctgctgaacccagccctgggggaccggctggtggccggcagcacagaccagctgctgagcgcctttgtgcccccagaggagccccccctgcagcctgcccgctggctggaggccagcgaggaggagcggcaggtgggcctgcggctgcgcatctgccacggcaagcctgtgacccaggtgacctggcacggccgcggggactacctggccgtggtgctggccacccagggccacacccaggtgctgatccaccagctgagcagaagaagaagccagagccccttccgccgcagccacggccaggtgcagagggtggccttccacccagcccggcccttcctgctggtggccagccagaggtctgtgcggctgtaccacctgctgcggcaggagctgaccaagaagctgatgcccaactgcaagtgggtgagcagcctggccgtgcaccctgctggggacaacgtcatctgtggcagctatgacagcaagctggtgtggtttgacctggacctgagcaccaagccctacaggatgctgcggcaccacaagaaggccctgcgggctgtggccttccacccccgctaccccctgtttgccagcggcagtgatgatggcagcgtcatcgtgtgccacggcatggtgtacaatgacctgctgcagaaccccctgctggtgcctgtgaaggtgctgaagggccacgtgctgacccgggacctgggcgtgctggatgtgatcttccaccccacccagccctgggtgttcagcagcggggctgatggcaccgtgcggctcttcacctag

SEQ ID NO: 185156 - DNA, 1905 bp, Artificial Sequence
  derived and/or modified sequence
atggccagcgcccggatcggcgacgagtacgccgaggacagcagcgacgaagaggatattagaaataccgtgggcaacgtccccctggaatggtatgatgacttccctcacgtgggatatgacctcgacggcagacggatatacaaacctctgcgtacccgagacgaactggaccaattcctggacaagatggacgaccctgactactggcggactgtccaggatccaatgacaggaagagacctgagacttacagatgagcaggtcgccctggtgaggagactgcagagcggacagtttggcgatgtgggatttaacccatacgaacccgcggtagatttcttctctggcgatgtcatgattcacccagtaacaaaccggccagccgataaaaggtcattcattcccagcctcgtggagaaagagaaggtgagccggatggtgcacgccatcaaaatggggtggattcaaccacgccgcccacgggacccaacaccctcattctacgacctctgggcccaggaagatcctaacgccgtgttgggtcggcataaaatgcacgtgccggcacctaaactagccttacctggacacgcagagtcctataatccacccccagagtacctcctcagtgaggaggaacgactcgcctgggagcagcaggagcccggagaacggaagttatccttcctcccgcggaaatttccctctctccgggctgtgcctgcttacggccgtttcatccaggaacgtttcgagcgctgtctggatctatatctgtgccctaggcagagaaagatgagagtgaatgttgatccagaggaccttattcctaaattacctcggccacgtgacctgcagccctttcctacgtgtcaagcactggtgtatcgaggtcactctgacctcgtacgatgtctgagtgttagccctggcggccagtggctggtgtctggaagcgatgacggatccttgagactctgggaggtggctactgccaggtgtgtgcgaacagtgcccgtagggggggtggtgaaatcagtcgcatggaatccttcccccgccgtgtgtctcgtggccgctgccgttgaagactctgtgctgctgttgaatccagcactcggggaccgcctcgtggcgggatccactgatcaactcttgtctgcctttgtgccaccagaggaacctcccttgcagccagcccgctggttggaagcctccgaagaagagaggcaggtaggtctgcgcctgcgtatctgtcacggcaagccagtgacgcaggtgacctggcacggccgcggcgactacctggcggtggttctggcgacacagggacacacacaggtacttattcaccaattgtcaagaagacggtctcagtcacccttcaggagatcacatgggcaggtgcagcgcgttgcgttccaccccgcccgcccctttctgctggtggcgagccaacggagcgtccgcctgtaccacctgctgaggcaggagctgactaaaaaattgatgccaaactgtaagtgggtcagtagcctcgccgtccatccagcaggggataacgtgatctgcggatcctacgactctaaattagtatggttcgatcttgatcttagcaccaaaccctatcggatgctgcgacaccacaagaaagctctgcgggccgttgccttccatcctagatatcccttattcgccagcggtagcgatgatggctccgtgattgtctgtcatggaatggtctacaatgatctcctccaaaaccctctgctggtccccgtgaaggtgttgaaagggcacgtgctcaccagggacttgggagtgctggatgtcatcttccaccccacacagccttgggtattttcaagtggggcagacgggaccgtcagacttttcacttag

SEQ ID NO: 185157 - DNA, 1905 bp, Artificial Sequence
  derived and/or modified sequence
atggcctcagctcgcataggcgatgagtatgcggaggattcatcagatgaagaagatatccgaaatactgtcggcaacgtgcctctggaatggtacgacgacttcccgcatgttggctatgatctcgatggcaggagaatctataagcctcttagaacaagagacgagctcgatcagttcctcgataaaatggacgacccagactactggagaaccgtccaggaccctatgactggccgagacttgcggctgactgatgaacaggttgccttggtcagaagacttcagtccggacagttcggggatgtgggctttaacccctacgaacccgctgtggatttttttagcggggacgtgatgatccatccagttactaacagaccagcagacaagcgtagcttcatcccttcattagttgagaaagaaaaagtcagtcgcatggtgcatgccatcaaaatgggctggatccagccaagaagacctcgcgaccccacgcccagtttctatgatctctgggctcaggaagatcccaacgctgtgttgggaaggcataagatgcacgtccccgctccgaagctggccctgcctggtcacgcggaatcttataaccctccacccgaatatctcctgtccgaagaagaaaggttggcctgggagcagcaagaaccaggagagaggaagctgtctttcctgcccaggaagttcccttctctaagagctgtccctgcctatggcaggtttattcaggaacgcttcgagaggtgtctcgacttgtacctgtgcccgaggcagcgcaagatgcgggttaacgtggatccagaggacttgatcccgaaattgcccaggcccagggaccttcagccctttccaacctgtcaggccctcgtatatcgtggtcacagcgacctggtgcgttgtctgtccgtaagtccagggggacagtggctcgtctccggatctgacgacgggagcctcaggctttgggaggttgcgactgcccgatgcgtacgtaccgtaccggtgggcggtgtggtaaagtcagttgcatggaatccttctccagctgtgtgtcttgtggcagctgccgtggaagactccgtgctactacttaatcccgctctaggggaccgactggttgccggtagcaccgaccaactactgtctgcatttgtaccccctgaagaaccccctttgcagcccgctcggtggctggaggcctccgaggaggaacgtcaggtcgggttgcggctgcgcatctgccatggaaaaccagtgactcaagtgacatggcacggcaggggagattacctcgctgtggtgttggctacgcagggacacacgcaggtcctcatccaccagctgtctagacgccgtagtcagtcgcctttccggagatcgcatgggcaagtgcagcgcgtggccttccaccccgctaggccgttcctgcttgtggcctcacagcggtctgtgaggttataccacctgctacgccaggagctgaccaaaaagctgatgccaaactgcaaatgggtcagcagcctcgctgttcatcctgctggagacaatgttatttgtggctcctacgactcaaaactggtgtggttcgacctcgatctgagcactaagccgtacagaatgctgaggcatcataagaaggctcttagggcggtggccttccaccccagatatcccctgtttgccagcggttcagatgatggtagcgtcatagtctgtcacggcatggtttacaatgacctactccaaaatcccctactcgtaccagtgaaggtgctaaaaggacacgtgttaactagggatctcggggtcctggacgtaatctttcatccaacgcagccttgggtgtttagctcaggggctgacggaacagttaggctcttcacctag

SEQ ID NO: 185158 - DNA, 1905 bp, Artificial Sequence
  derived and/or modified sequence
atggccagcgccagaatcggcgacgagtacgccgaggacagcagcgacgaggaggacatcagaaacaccgtgggcaacgtgcccctggagtggtacgacgacttcccccacgtgggctacgacctggacggcagaagaatctacaagcccctgagaaccagagacgagctggaccagttcctggacaagatggacgaccccgactactggagaaccgtgcaggaccccatgaccggcagagacctgagactgaccgacgagcaggtggccctggtgagaagactgcagagcggccagttcggcgacgtgggcttcaacccctacgagcccgccgtggacttcttcagcggcgacgtgatgatccaccccgtgaccaacagacccgccgacaagagaagcttcatccccagcctggtggagaaggagaaggtgagcagaatggtgcacgccatcaagatgggctggatccagcccagaagacccagagaccccacccccagcttctacgacctgtgggcccaggaggaccccaacgccgtgctgggcagacacaagatgcacgtgcccgcccccaagctggccctgcccggccacgccgagagctacaaccccccccccgagtacctgctgagcgaggaggagagactggcctgggagcagcaggagcccggcgagagaaagctgagcttcctgcccagaaagttccccagcctgagagccgtgcccgcctacggcagattcatccaggagagattcgagagatgcctggacctgtacctgtgccccagacagagaaagatgagagtgaacgtggaccccgaggacctgatccccaagctgcccagacccagagacctgcagcccttccccacctgccaggccctggtgtacagaggccacagcgacctggtgagatgcctgagcgtgagccccggcggccagtggctggtgagcggcagcgacgacggcagcctgagactgtgggaggtggccaccgccagatgcgtgagaaccgtgcccgtgggcggcgtggtgaagagcgtggcctggaaccccagccccgccgtgtgcctggtggccgccgccgtggaggacagcgtgctgctgctgaaccccgccctgggcgacagactggtggccggcagcaccgaccagctgctgagcgccttcgtgccccccgaggagccccccctgcagcccgccagatggctggaggccagcgaggaggagagacaggtgggcctgagactgagaatctgccacggcaagcccgtgacccaggtgacctggcacggcagaggcgactacctggccgtggtgctggccacccagggccacacccaggtgctgatccaccagctgagcagaagaagaagccagagccccttcagaagaagccacggccaggtgcagagagtggccttccaccccgccagacccttcctgctggtggccagccagagaagcgtgagactgtaccacctgctgagacaggagctgaccaagaagctgatgcccaactgcaagtgggtgagcagcctggccgtgcaccccgccggcgacaacgtgatctgcggcagctacgacagcaagctggtgtggttcgacctggacctgagcaccaagccctacagaatgctgagacaccacaagaaggccctgagagccgtggccttccaccccagataccccctgttcgccagcggcagcgacgacggcagcgtgatcgtgtgccacggcatggtgtacaacgacctgctgcagaaccccctgctggtgcccgtgaaggtgctgaagggccacgtgctgaccagagacctgggcgtgctggacgtgatcttccaccccacccagccctgggtgttcagcagcggcgccgacggcaccgtgagactgttcacctag

SEQ ID NO: 185159 - DNA, 2241 bp, Artificial Sequence
  derived and/or modified sequence
atggcaggatcaagaggtgctggtagaactgctgcccccagtgttagaccagagaagagaaggtcagaaccagaactggaaccggagccagaaccagagccccctctcctctgtacttctcctctgtcacactccaccggctccgactctggggtctcagactctgaagagagcgtgttttctggattggaagactccggttccgacagcagtgaggacgacgatgagggcgacgaagagggggaagacggcgcgctggacgatgagggccactctggtatcaagaagacgactgaagaacaggtacaagccagcactccatgtcccagaacagagatggcgtccgcccgcatcggagatgaatatgcggaggatagctctgatgaagaagacatcagaaacactgtaggaaacgtcccccttgagtggtatgacgattttccacatgtcggctacgatttagatgggcggcggatctacaaacccctccgcacgagagatgaattggaccaattcctcgataagatggacgatcctgattactggaggactgttcaggaccctatgaccggccgggatctgcgcctcaccgatgaacaagtggccctggtgagaaggctgcaaagcggccaattcggtgacgttggtttcaacccctatgaacccgccgtagattttttttccggagatgtaatgatacacccagtgacaaataggcctgcagataagcgcagtttcatcccaagtctggtcgagaaagagaaggtcagtcggatggtccatgctatcaagatggggtggatacagccaaggcgcccccgggaccccacgcccagtttttatgatctgtgggcacaggaagacccaaacgctgttcttggcagacacaagatgcacgtgcccgcaccaaaacttgcactgcccgggcatgcggagagttataacccccctcccgagtatctgctttctgaagaagaaagactggcctgggagcagcaagagcctggagaaagaaagctgagctttctccccagaaaatttcctagcctccgcgcagtgccagcgtacggcagattcattcaggagcggtttgaacgctgcttggatctgtacttatgcccccggcaaaggaagatgagggtcaatgtcgaccctgaggatctgatcccaaagttgcctaggccaagggacctgcagcccttcccaacgtgtcaggctttggtttaccgcggacatagtgacttggtccgctgcttgagtgtctcacctggcggacaatggttggtctctgggagcgatgacggctcccttcggctttgggaggtcgcgacagcccgttgcgttaggacagtccccgtcggcggtgtcgtgaagtctgtcgcttggaacccctcccccgccgtttgtctcgtcgcggctgctgtggaggatagcgtcctgctccttaatccggcactgggcgatcgcctcgtcgctgggtccaccgatcagttactgagcgccttcgtgccacccgaagaaccgccactgcagccggccaggtggctcgaagcttctgaggaggaacgacaggtaggtctgcgcttgaggatctgtcacggcaagcccgtgacccaggtgacctggcacggacgcggggattatttggccgtggtgttggcgacccagggtcatactcaggtacttatccaccagctgtctcgccggagaagccaatcacctttcaggagaagtcatggacaggtacagagggtggcttttcatcctgcacgacctttcttactcgtcgcaagccaacgctcagttcggttgtaccacttgttacgccaggaactgactaagaagctgatgccaaattgcaagtgggtgagcagcttagctgtgcacccggccggcgacaatgtgatctgtggttcatacgactcgaagctcgtgtggttcgacctggatctctctaccaagccgtatcgcatgctgcggcaccataagaaagctctgagagcagtagcttttcatcccaggtatcccctgttcgctagcggttccgacgacggctctgtgatagtgtgtcacggtatggtctacaacgatctcttacagaatcccctgcttgtgccggtgaaagtgctgaaagggcacgttttgaccagagatctgggggtcttggatgtgatcttccatcctactcagccctgggtctttagcagcggtgccgatggaaccgtccggctgtttacatag

SEQ ID NO: 185160 - DNA, 2241 bp, Artificial Sequence
  derived and/or modified sequence
atggccggcagcagaggagctggccgcacagctgcccccagcgtgcggcctgagaagagaagaagtgagcctgagctggagcctgagcctgagcctgagccccccctgctgtgcaccagccccctgagccacagcacaggcagtgacagcggcgtgtctgattctgaggagagcgtcttcagcggcctggaggacagcggcagtgacagcagtgaagatgatgatgaaggagatgaggagggggaggatggagccctggatgatgagggccacagcggcatcaagaagaccacagaggagcaggtgcaggccagcaccccctgccccaggacagagatggccagcgccagaattggagatgaatatgcagaggacagcagtgatgaggaggacatccggaacacagtgggcaatgtgcccctggagtggtatgatgacttcccccacgtgggctatgacctggatggaagacgcatctacaagcccctgcggaccagagatgagctggaccagttcctggacaagatggatgatcctgactactggaggacagtgcaggaccccatgacaggccgggacctgcggctgacagatgagcaggtggccctggtgcggcggctgcagagcggccagtttggagatgtgggcttcaacccctatgagcctgctgtggacttcttctctggagatgtgatgatccaccctgtgaccaacagacctgctgacaagaggagcttcatccccagcctggtggagaaggagaaggtgtccaggatggtgcacgccatcaagatgggctggatccagccccggcggccccgggaccccacccccagcttctatgacctgtgggcccaggaggaccccaatgctgtgctgggccgccacaagatgcacgtgcctgcccccaagctggccctgcccggccatgctgagagctacaaccccccacctgagtacctgctgtctgaggaggagcggctggcctgggagcagcaggagcctggagagaggaagctgtccttcctgcccaggaagttccccagcctgcgggctgtgcctgcctacggccgcttcatccaggagagatttgagcgctgcctggacctgtacctgtgcccccggcagaggaagatgagggtgaatgtggaccctgaggacctgatccccaagctgccccggccccgggacctgcagcccttccccacctgccaggccctggtgtaccggggccacagcgacctggtgcgctgcctgtctgtgtccccaggcggccagtggctggtgtctggcagtgatgatggcagcctgcggctgtgggaggtggccacagcccgctgtgtgaggacagtgcctgtgggcggcgtggtgaagtctgtggcctggaaccccagccctgctgtgtgcctggtggccgctgctgtggaggacagcgtgctgctgctgaacccagccctgggggaccggctggtggccggcagcacagaccagctgctgagcgcctttgtgcccccagaggagccccccctgcagcctgcccgctggctggaggccagcgaggaggagcggcaggtgggcctgcggctgcgcatctgccacggcaagcctgtgacccaggtgacctggcacggccgcggggactacctggccgtggtgctggccacccagggccacacccaggtgctgatccaccagctgagcagaagaagaagccagagccccttccgccgcagccacggccaggtgcagagggtggccttccacccagcccggcccttcctgctggtggccagccagaggtctgtgcggctgtaccacctgctgcggcaggagctgaccaagaagctgatgcccaactgcaagtgggtgagcagcctggccgtgcaccctgctggggacaacgtcatctgtggcagctatgacagcaagctggtgtggtttgacctggacctgagcaccaagccctacaggatgctgcggcaccacaagaaggccctgcgggctgtggccttccacccccgctaccccctgtttgccagcggcagtgatgatggcagcgtcatcgtgtgccacggcatggtgtacaatgacctgctgcagaaccccctgctggtgcctgtgaaggtgctgaagggccacgtgctgacccgggacctgggcgtgctggatgtgatcttccaccccacccagccctgggtgttcagcagcggggctgatggcaccgtgcggctcttcacctag

SEQ ID NO: 185161 - DNA, 2241 bp, Artificial Sequence
  derived and/or modified sequence
atggccggcagccggggcgccggccggaccgccgcccccagcgtgcgcccagaaaagaggcggtccgagccagagttggaacccgagcccgagcccgaaccacctctgctctgcacatccccactctcccatagcaccggatcagactccggtgtttcagatagtgaagagagcgtgtttagtggccttgaggactccggctccgatagctccgaagatgacgacgaaggagacgaggaaggggaagacggtgcactggacgatgagggccacagtgggatcaagaagacaacagaggagcaggtccaggcttcaacgccctgccctaggactgagatggcttcggcaaggattggtgacgaatacgcagaagactcaagcgatgaggaagacatacgtaatacagtgggtaacgttccgctcgaatggtatgatgactttccacacgtcgggtatgatttggatgggcgaaggatttataaacctctgcgcacccgggatgagttagaccagttcctagacaaaatggatgacccagactattggaggacagtgcaagatcctatgaccgggcgagacctgcggttaaccgacgagcaggtcgccttggtccggaggttacagtctggtcagtttggcgacgtcggattcaatccttacgaaccagctgtggatttcttctcaggagatgtgatgatccaccccgtgactaacaggcccgcagataagaggagtttcatcccctccttggtcgagaaggaaaaagtgtccaggatggtacatgccatcaagatgggctggattcagccgcggcgaccaagagatcccactccctcattctacgatctttgggcacaagaggaccccaacgcagtcctgggcaggcacaaaatgcacgtaccagctcctaagctggctcttccaggacatgctgagtcctataatccccctccagaatatctgctttctgaagaagagcgccttgcctgggaacaacaagaacctggtgagcgcaagctcagctttctaccacgaaaatttccgtctctgagagctgtgccagcctacggcagatttattcaggagagatttgagagatgcctcgacctgtatttatgcccgaggcagcggaagatgcgagttaatgtggaccctgaggacctaataccaaaacttccccggcccagggatctccagccctttcccacttgccaggccctggtctatcggggacactctgacctggtcaggtgcctgagtgtgagtcctggcggccaatggctagtcagcgggtcggatgacggttcactccgactatgggaggtagcaacggcccgctgcgtgcggacagtgcctgttgggggcgttgtaaagtcagttgcctggaatcctagcccagccgtgtgccttgtagcagcggccgtggaggacagcgttctcctgctcaaccctgccctgggcgatcgactcgtggccggctctaccgatcaactgctcagtgcttttgtccctccagaggaacctccactccagccggcgcgttggctagaggcttctgaggaggagcgccaagtgggcctacgcctgaggatctgtcatggcaagcctgtaacgcaggtgacatggcatgggcgcggggattaccttgcagtcgtcttagcgactcaaggccatacacaagtactgatccaccaactcagtaggcgccggagccagagcccttttaggaggtcccacggccaagtgcagagggtggcctttcaccctgcccgaccatttctgctggtggcttcacaaagatcagtcaggctctatcacctgctgagacaggagctcaccaagaaactgatgcctaactgtaagtgggttagctctttggcagtacacccagctggggataacgtgatatgcggcagctacgactcaaaacttgtgtggtttgacctcgacctctccaccaagccctaccggatgctccgtcaccacaagaaggctcttcgagcggtggcatttcatcccagatatcctctgtttgccagcggtagcgatgatgggtcggtgatcgtctgccatgggatggtttacaatgacctgctgcagaaccctttgctcgtaccggtgaaagtgttaaaagggcacgttctgactagagatttgggcgtgttggacgtgatcttccaccctacacagccttgggtttttagcagcggggctgacggcacggtccgcctgtttacttag

SEQ ID NO: 185162 - DNA, 2241 bp, Artificial Sequence
  derived and/or modified sequence
atggccggaagccggggagccggtcggacagcggctccttctgtgcgcccagagaagaggagatccgagcctgagctggaacctgaacccgaacccgaaccaccgctgctatgcacttcacccttgagccacagtaccggaagcgacagtggggtgtctgattccgaagagtcagtgttctcagggcttgaggactcaggaagcgacagcagcgaggacgacgatgaaggagacgaagaaggtgaggacggagccctggatgacgaggggcactccgggattaagaagacaaccgaggagcaggtgcaagcatccactccttgccctcggacagagatggcaagcgctagaattggggatgaatacgcagaggatagctcagacgaggaggatatccgaaatacggtcggaaatgtcccactagaatggtatgatgatttccctcacgttggctatgatttggacgggaggcggatatataagcctctccgcacgcgtgatgagctggaccagtttctggacaaaatggatgatcctgactattggaggaccgttcaggaccctatgactgggcgagacttgcggctgactgatgagcaggtagctctggtcagacgcctccaatccggacagttcggagacgtgggcttcaatccatacgaacctgccgtggatttctttagcggtgatgtcatgattcacccagtcaccaacaggccagcagacaagaggagcttcatcccgagcctcgtagagaaggagaaggtttcacggatggtgcatgctatcaagatgggatggatccagccccgtcggcctagggatcccactccctccttctatgatctttgggcccaggaggaccccaacgcagtgctagggcgacataaaatgcacgtccctgctccgaaactggccttgcccggacacgctgagtcctacaacccaccaccggaatacctattgtcagaggaggagaggcttgcctgggagcagcaagagccgggagaacggaaactctcgttcttgcccagaaagtttcccagccttcgagccgttccagcttatggaagatttattcaggaacgcttcgagaggtgtttggacctgtacctgtgtcctcgtcagcgcaaaatgcgggttaatgtggatcccgaagatctaatccccaaactaccacgccctagagacctccaaccatttcctacctgccaggccttagtctatagagggcacagtgatctcgtacgttgtctctcggtctccccaggaggacagtggctggtttcgggcagcgatgacggctctctgcgcttatgggaggtcgccactgccagatgcgtgcgtaccgtccccgttggtggtgtggtcaagtcagtcgcctggaatccatcaccggctgtctgtctggtcgccgctgcagtggaggacagcgtgcttctcctgaaccctgcactgggcgacagactcgtggcaggctccaccgatcaacttctctccgcctttgtcccccctgaggaaccccctcttcaacctgctaggtggttagaggcttccgaggaagagcggcaggtcgggctgagactgcggatttgtcatggtaagcctgtaacccaagtgacttggcacgggagaggggattacttggctgtcgtgctggcaacccagggacatacgcaagtgctcattcatcagctcagcagacgaagatctcagagcccctttagacggtcacacgggcaggtgcagcgtgtcgcgtttcacccagcacgtccattccttctggttgccagtcagcggtctgttcgcttgtaccatctgcttagacaggaactgaccaagaaactgatgcccaactgtaagtgggttagtagcctagctgtgcatcccgcaggagacaatgttatctgcggaagctacgattccaaattagtatggtttgacctcgatctctccacaaagccctatcgaatgttgcggcaccacaaaaaggcactcagagctgtagccttccatcctaggtaccccttgtttgcaagcggctccgacgacggaagtgtcattgtttgccacgggatggtgtacaacgacctgctccagaacccgctgcttgtcccggtcaaggtgctaaaaggccatgtgttaacccgcgatctaggagtgctggatgtgattttccatcctacacaaccctgggtgttctctagcggggctgacggcacagtgaggctatttacttag

SEQ ID NO: 185163 - DNA, 2336 bp, Artificial Sequence
  derived and/or modified sequence
gtgcgggtggcggccggcgcgcggtggggcatggcgggttcgcggggtgcggggcgcacggcggcgccgagcgtgcggccggagaagcggcggtctgagcccgaactggagcctgagcccgagccggagccccccctcctctgcacctctcctctcagccacagcaccggcagcgattctggcgtctccgacagcgaggagagtgtgttctcaggcctggaagattccggcagtgacagcagtgaggatgatgacgaaggcgacgaggagggagaggacggagcccttgatgacgagggccacagtgggattaaaaagaccactgaggagcaggtgcaggccagcactccttgcccgaggacagagatggcgagcgcccggattggggatgagtatgcggaggacagctctgatgaggaggacatccggaacacggtgggcaacgtgcccttggagtggtacgatgacttcccccacgtgggctacgacctggatggcaggcgcatctacaagcccctgcggacccgggatgagctggaccagttcctggacaagatggacgatcctgactactggcgcaccgtgcaggacccgatgacagggcgggacctgagactgacggatgagcaggtggccctggtgcggcggctgcagagtggccagtttggggatgtgggcttcaacccctatgagccggctgtcgacttcttcagcggggacgtcatgatccacccggtgaccaaccgcccggccgacaagcgcagcttcatcccctccctggtggagaaggagaaggtctctcgcatggtgcacgccatcaagatgggctggatccagcctcgccggccccgagaccccacccccagcttctatgacctgtgggcccaggaggaccccaacgccgtgctcgggcgccacaagatgcacgtacctgctcccaagctggccctgccaggccacgccgagtcgtacaacccaccccctgaatacctgctcagcgaggaggagcgcttggcgtgggaacagcaggagccaggcgagaggaagctgagctttttgccacgcaagttcccgagcctgcgggccgtgcctgcctacggacgcttcatccaggaacgcttcgagcgctgccttgacctgtacctgtgcccacggcagcgcaagatgagggtgaatgtagaccctgaggacctcatccccaagctgcctcggccgagggacctgcagcccttccccacgtgccaggccctggtctacaggggccacagtgaccttgtccggtgcctcagtgtctctcctgggggccagtggctggtttcaggctctgacgacggctccctgcggctctgggaggtggccactgcccgctgtgtgaggactgttcccgtggggggcgtggtgaagagtgtggcctggaaccccagccccgctgtctgcctggtggctgcagccgtggaggactcggtgctgctgctgaacccagctctgggggaccggctggtggcgggcagcacagatcagctgttgagcgccttcgtcccgcctgaggagccccccttgcagccggcccgctggctggaggcctcagaggaggagcgccaagtgggcctgcggctgcgcatctgccacgggaagccagtgacgcaggtgacctggcacgggcgtggggactacctggccgtggtgctggccacccaaggccacacccaggtgctgattcaccagctgagccgtcgccgcagccagagtccgttccgccgcagccacggacaggtgcagcgagtggccttccaccctgcccggcccttcctgttggtggcgtcccagcgcagcgtccgcctctaccacctgctgcgccaggagctcaccaagaagctgatgcccaactgcaagtgggtgtccagcctggcggtgcaccctgcaggtgacaacgtcatctgtgggagctacgatagcaagctggtgtggtttgacctggatctttccaccaagccatacaggatgctgagacaccacaagaaggctctgcgggctgtggccttccacccgcggtacccactctttgcgtcaggctcggacgacggcagtgtcatcgtctgccatggcatggtgtacaatgaccttctgcagaaccccttgctggtgcccgtcaaggtgctgaagggacacgtgctgacccgagatctgggagtgctggacgtcatcttccaccccacccagccgtgggtcttctcctcgggggcagacgggactgtccgcctcttcacctagctgttctgcctgcctggggctggggtggtcgtgctgaagtcaacagagcctttaccctgtgctgc

SEQ ID NO: 185164 - DNA, 2241 bp, Artificial Sequence
  derived and/or modified sequence
atggccggcagcagaggcgccggcagaaccgccgcccccagcgtgagacccgagaagagaagaagcgagcccgagctggagcccgagcccgagcccgagccccccctgctgtgcaccagccccctgagccacagcaccggcagcgacagcggcgtgagcgacagcgaggagagcgtgttcagcggcctggaggacagcggcagcgacagcagcgaggacgacgacgagggcgacgaggagggcgaggacggcgccctggacgacgagggccacagcggcatcaagaagaccaccgaggagcaggtgcaggccagcaccccctgccccagaaccgagatggccagcgccagaatcggcgacgagtacgccgaggacagcagcgacgaggaggacatcagaaacaccgtgggcaacgtgcccctggagtggtacgacgacttcccccacgtgggctacgacctggacggcagaagaatctacaagcccctgagaaccagagacgagctggaccagttcctggacaagatggacgaccccgactactggagaaccgtgcaggaccccatgaccggcagagacctgagactgaccgacgagcaggtggccctggtgagaagactgcagagcggccagttcggcgacgtgggcttcaacccctacgagcccgccgtggacttcttcagcggcgacgtgatgatccaccccgtgaccaacagacccgccgacaagagaagcttcatccccagcctggtggagaaggagaaggtgagcagaatggtgcacgccatcaagatgggctggatccagcccagaagacccagagaccccacccccagcttctacgacctgtgggcccaggaggaccccaacgccgtgctgggcagacacaagatgcacgtgcccgcccccaagctggccctgcccggccacgccgagagctacaaccccccccccgagtacctgctgagcgaggaggagagactggcctgggagcagcaggagcccggcgagagaaagctgagcttcctgcccagaaagttccccagcctgagagccgtgcccgcctacggcagattcatccaggagagattcgagagatgcctggacctgtacctgtgccccagacagagaaagatgagagtgaacgtggaccccgaggacctgatccccaagctgcccagacccagagacctgcagcccttccccacctgccaggccctggtgtacagaggccacagcgacctggtgagatgcctgagcgtgagccccggcggccagtggctggtgagcggcagcgacgacggcagcctgagactgtgggaggtggccaccgccagatgcgtgagaaccgtgcccgtgggcggcgtggtgaagagcgtggcctggaaccccagccccgccgtgtgcctggtggccgccgccgtggaggacagcgtgctgctgctgaaccccgccctgggcgacagactggtggccggcagcaccgaccagctgctgagcgccttcgtgccccccgaggagccccccctgcagcccgccagatggctggaggccagcgaggaggagagacaggtgggcctgagactgagaatctgccacggcaagcccgtgacccaggtgacctggcacggcagaggcgactacctggccgtggtgctggccacccagggccacacccaggtgctgatccaccagctgagcagaagaagaagccagagccccttcagaagaagccacggccaggtgcagagagtggccttccaccccgccagacccttcctgctggtggccagccagagaagcgtgagactgtaccacctgctgagacaggagctgaccaagaagctgatgcccaactgcaagtgggtgagcagcctggccgtgcaccccgccggcgacaacgtgatctgcggcagctacgacagcaagctggtgtggttcgacctggacctgagcaccaagccctacagaatgctgagacaccacaagaaggccctgagagccgtggccttccaccccagataccccctgttcgccagcggcagcgacgacggcagcgtgatcgtgtgccacggcatggtgtacaacgacctgctgcagaaccccctgctggtgcccgtgaaggtgctgaagggccacgtgctgaccagagacctgggcgtgctggacgtgatcttccaccccacccagccctgggtgttcagcagcggcgccgacggcaccgtgagactgttcacctag

SEQ ID NO: 185165 - protein, 1657 aa, Artificial Sequence
  derived and/or modified sequence
MGLQARRWASGSRGAAGPRRGVLQLLPLPLPLPLLLLLLLRPGAGRAAAQGEAEAPTLYLWKTGPWGRCMGDECGPGGIQTRAVWCAHVEGWTTLHTNCKQAERPNNQQNCFKVCDWHKELYDWRLGPWNQCQPVISKSLEKPLECIKGEEGIQVREIACIQKDKDIPAEDIICEYFEPKPLLEQACLIPCQQDCIVSEFSAWSECSKTCGSGLQHRTRHVVAPPQFGGSGCPNLTEFQVCQSSPCEAEELRYSLHVGPWSTCSMPHSRQVRQARRRGKNKEREKDRSKGVKDPEARELIKKKRNRNRQNRQENKYWDIQIGYQTREVMCINKTGKAADLSFCQQEKLPMTFQSCVITKECQVSEWSEWSPCSKTCHDMVSPAGTRVRTRTIRQFPIGSEKECPEFEEKEPCLSQGDGVVPCATYGWRTTEWTECRVDPLLSQQDKRRGNQTALCGGGIQTREVYCVQANENLLSQLSTHKNKEASKPMDLKLCTGPIPNTTQLCHIPCPTECEVSPWSAWGPCTYENCNDQQGKKGFKLRKRRITNEPTGGSGVTGNCPHLLEAIPCEEPACYDWKAVRLGNCEPDNGKECGPGTQVQEVVCINSDGEEVDRQLCRDAIFPIPVACDAPCPKDCVLSTWSTWSSCSHTCSGKTTEGKQIRARSILAYAGEEGGIRCPNSSALQEVRSCNEHPCTVYHWQTGPWGQCIEDTSVSSFNTTTTWNGEASCSVGMQTRKVICVRVNVGQVGPKKCPESLRPETVRPCLLPCKKDCIVTPYSDWTSCPSSCKEGDSSIRKQSRHRVIIQLPANGGRDCTDPLYEEKACEAPQACQSYRWKTHKWRRCQLVPWSVQQDSPGAQEGCGPGRQARAITCRKQDGGQAGIHECLQYAGPVPALTQACQIPCQDDCQLTSWSKFSSCNGDCGAVRTRKRTLVGKSKKKEKCKNSHLYPLIETQYCPCDKYNAQPVGNWSDCILPEGKVEVLLGMKVQGDIKECGQGYRYQAMACYDQNGRLVETSRCNSHGYIEEACIIPCPSDCKLSEWSNWSRCSKSCGSGVKVRSKWLREKPYNGGRPCPKLDHVNQFQVYEVVPCHSDCNQYLWVTEPWSICKVTFVNMRENCGEGVQTRKVRCMQNTADGPSEHVEDYLCDPEEMPLGSRVCKLPCPEDCVISEWGPWTQCVLPCNQSSFRQRSADPIRQPADEGRSCPNAVEKEPCNLNKNCYHYDYNVTDWSTCQLSEKAVCGNGIKTRMLDCVRSDGKSVDLKYCEALGLEKNWQMNTSCMVECPVNCQLSDWSPWSECSQTCGLTGKMIRRRTVTQPFQGDGRPCPSLMDQSKPCPVKPCYRWQYGQWSPCQVQEAQCGEGTRTRNISCVVSDGSADDFSKVVDEEFCADIELIIDGNKNMVLEESCSQPCPGDCYLKDWSSWSLCQLTCVNGEDLGFGGIQVRSRPVIIQELENQHLCPEQMLETKSCYDGQCYEYKWMASAWKGSSRTVWCQRSDGINVTGGCLVMSQPDADRSCNPPCSQPHSYCSETKTCHCEEGYTEVMSSNSTLEQCTLIPVVVLPTMEDKRGDVKTSRAVHPTQPSSNPAGRGRTWFLQPFGPDGRLKTWVYGVAAGAFVLLIFIVSMIYLACKKPKKPQRRQNNRLKPLTLAYDGDADM

SEQ ID NO: 185166 - protein, 1657 aa, Artificial Sequence
  derived and/or modified sequence
MGLQARRWASGSRGAAGPRRGVLQLLPLPLPLPLLLLLLLRPGAGRAAAQGEAEAPTLYLWKTGPWGRCMGDECGPGGIQTRAVWCAHVEGWTTLHTNCKQAERPNNQQNCFKVCDWHKELYDWRLGPWNQCQPVISKSLEKPLECIKGEEGIQVREIACIQKDKDIPAEDIICEYFEPKPLLEQACLIPCQQDCIVSEFSAWSECSKTCGSGLQHRTRHVVAPPQFGGSGCPNLTEFQVCQSSPCEAEELRYSLHVGPWSTCSMPHSRQVRQARRRGKNKEREKDRSKGVKDPEARELIKKKRNRNRQNRQENKYWDIQIGYQTREVMCINKTGKAADLSFCQQEKLPMTFQSCVITKECQVSEWSEWSPCSKTCHDMVSPAGTRVRTRTIRQFPIGSEKECPEFEEKEPCLSQGDGVVPCATYGWRTTEWTECRVDPLLSQQDKRRGNQTALCGGGIQTREVYCVQANENLLSQLSTHKNKEASKPMDLKLCTGPIPNTTQLCHIPCPTECEVSPWSAWGPCTYENCNDQQGKKGFKLRKRRITNEPTGGSGVTGNCPHLLEAIPCEEPACYDWKAVRLGNCEPDNGKECGPGTQVQEVVCINSDGEEVDRQLCRDAIFPIPVACDAPCPKDCVLSTWSTWSSCSHTCSGKTTEGKQIRARSILAYAGEEGGIRCPNSSALQEVRSCNEHPCTVYHWQTGPWGQCIEDTSVSSFNTTTTWNGEASCSVGMQTRKVICVRVNVGQVGPKKCPESLRPETVRPCLLPCKKDCIVTPYSDWTSCPSSCKEGDSSIRKQSRHRVIIQLPANGGRDCTDPLYEEKACEAPQACQSYRWKTHKWRRCQLVPWSVQQDSPGAQEGCGPGRQARAITCRKQDGGQAGIHECLQYAGPVPALTQACQIPCQDDCQLTSWSKFSSCNGDCGAVRTRKRTLVGKSKKKEKCKNSHLYPLIETQYCPCDKYNAQPVGNWSDCILPEGKVEVLLGMKVQGDIKECGQGYRYQAMACYDQNGRLVETSRCNSHGYIEEACIIPCPSDCKLSEWSNWSRCSKSCGSGVKVRSKWLREKPYNGGRPCPKLDHVNQAQVYEVVPCHSDCNQYLWVTEPWSICKVTFVNMRENCGEGVQTRKVRCMQNTADGPSEHVEDYLCDPEEMPLGSRVCKLPCPEDCVISEWGPWTQCVLPCNQSSFRQRSADPIRQPADEGRSCPNAVEKEPCNLNKNCYHYDYNVTDWSTCQLSEKAVCGNGIKTRMLDCVRSDGKSVDLKYCEALGLEKNWQMNTSCMVECPVNCQLSDWSPWSECSQTCGLTGKMIRRRTVTQPFQGDGRPCPSLMDQSKPCPVKPCYRWQYGQWSPCQVQEAQCGEGTRTRNISCVVSDGSADDFSKVVDEEFCADIELIIDGNKNMVLEESCSQPCPGDCYLKDWSSWSLCQLTCVNGEDLGFGGIQVRSRPVIIQELENQHLCPEQMLETKSCYDGQCYEYKWMASAWKGSSRTVWCQRSDGINVTGGCLVMSQPDADRSCNPPCSQPHSYCSETKTCHCEEGYTEVMSSNSTLEQCTLIPVVVLPTMEDKRGDVKTSRAVHPTQPSSNPAGRGRTWFLQPFGPDGRLKTWVYGVAAGAFVLLIFIVSMIYLACKKPKKPQRRQNNRLKPLTLAYDGDADM

SEQ ID NO: 185167 - DNA, 4974 bp, Artificial Sequence
  derived and/or modified sequence
atgggcctgcaggccagaagatgggccagcggcagcagaggcgccgccggccccagaagaggcgtgctgcagctgctgcccctgcccctgcccctgcccctgctgctgctgctgctgctgagacccggcgccggcagagccgccgcccagggcgaggccgaggcccccaccctgtacctgtggaagaccggcccctggggcagatgcatgggcgacgagtgcggccccggcggcatccagaccagagccgtgtggtgcgcccacgtggagggctggaccaccctgcacaccaactgcaagcaggccgagagacccaacaaccagcagaactgcttcaaggtgtgcgactggcacaaggagctgtacgactggagactgggcccctggaaccagtgccagcccgtgatcagcaagagcctggagaagcccctggagtgcatcaagggcgaggagggcatccaggtgagagagatcgcctgcatccagaaggacaaggacatccccgccgaggacatcatctgcgagtacttcgagcccaagcccctgctggagcaggcctgcctgatcccctgccagcaggactgcatcgtgagcgagttcagcgcctggagcgagtgcagcaagacctgcggcagcggcctgcagcacagaaccagacacgtggtggcccccccccagttcggcggcagcggctgccccaacctgaccgagttccaggtgtgccagagcagcccctgcgaggccgaggagctgagatacagcctgcacgtgggcccctggagcacctgcagcatgccccacagcagacaggtgagacaggccagaagaagaggcaagaacaaggagagagagaaggacagaagcaagggcgtgaaggaccccgaggccagagagctgatcaagaagaagagaaacagaaacagacagaacagacaggagaacaagtactgggacatccagatcggctaccagaccagagaggtgatgtgcatcaacaagaccggcaaggccgccgacctgagcttctgccagcaggagaagctgcccatgaccttccagagctgcgtgatcaccaaggagtgccaggtgagcgagtggagcgagtggagcccctgcagcaagacctgccacgacatggtgagccccgccggcaccagagtgagaaccagaaccatcagacagttccccatcggcagcgagaaggagtgccccgagttcgaggagaaggagccctgcctgagccagggcgacggcgtggtgccctgcgccacctacggctggagaaccaccgagtggaccgagtgcagagtggaccccctgctgagccagcaggacaagagaagaggcaaccagaccgccctgtgcggcggcggcatccagaccagagaggtgtactgcgtgcaggccaacgagaacctgctgagccagctgagcacccacaagaacaaggaggccagcaagcccatggacctgaagctgtgcaccggccccatccccaacaccacccagctgtgccacatcccctgccccaccgagtgcgaggtgagcccctggagcgcctggggcccctgcacctacgagaactgcaacgaccagcagggcaagaagggcttcaagctgagaaagagaagaatcaccaacgagcccaccggcggcagcggcgtgaccggcaactgcccccacctgctggaggccatcccctgcgaggagcccgcctgctacgactggaaggccgtgagactgggcaactgcgagcccgacaacggcaaggagtgcggccccggcacccaggtgcaggaggtggtgtgcatcaacagcgacggcgaggaggtggacagacagctgtgcagagacgccatcttccccatccccgtggcctgcgacgccccctgccccaaggactgcgtgctgagcacctggagcacctggagcagctgcagccacacctgcagcggcaagaccaccgagggcaagcagatcagagccagaagcatcctggcctacgccggcgaggagggcggcatcagatgccccaacagcagcgccctgcaggaggtgagaagctgcaacgagcacccctgcaccgtgtaccactggcagaccggcccctggggccagtgcatcgaggacaccagcgtgagcagcttcaacaccaccaccacctggaacggcgaggccagctgcagcgtgggcatgcagaccagaaaggtgatctgcgtgagagtgaacgtgggccaggtgggccccaagaagtgccccgagagcctgagacccgagaccgtgagaccctgcctgctgccctgcaagaaggactgcatcgtgaccccctacagcgactggaccagctgccccagcagctgcaaggagggcgacagcagcatcagaaagcagagcagacacagagtgatcatccagctgcccgccaacggcggcagagactgcaccgaccccctgtacgaggagaaggcctgcgaggccccccaggcctgccagagctacagatggaagacccacaagtggagaagatgccagctggtgccctggagcgtgcagcaggacagccccggcgcccaggagggctgcggccccggcagacaggccagagccatcacctgcagaaagcaggacggcggccaggccggcatccacgagtgcctgcagtacgccggccccgtgcccgccctgacccaggcctgccagatcccctgccaggacgactgccagctgaccagctggagcaagttcagcagctgcaacggcgactgcggcgccgtgagaaccagaaagagaaccctggtgggcaagagcaagaagaaggagaagtgcaagaacagccacctgtaccccctgatcgagacccagtactgcccctgcgacaagtacaacgcccagcccgtgggcaactggagcgactgcatcctgcccgagggcaaggtggaggtgctgctgggcatgaaggtgcagggcgacatcaaggagtgcggccagggctacagataccaggccatggcctgctacgaccagaacggcagactggtggagaccagcagatgcaacagccacggctacatcgaggaggcctgcatcatcccctgccccagcgactgcaagctgagcgagtggagcaactggagcagatgcagcaagagctgcggcagcggcgtgaaggtgagaagcaagtggctgagagagaagccctacaacggcggcagaccctgccccaagctggaccacgtgaaccagttccaggtgtacgaggtggtgccctgccacagcgactgcaaccagtacctgtgggtgaccgagccctggagcatctgcaaggtgaccttcgtgaacatgagagagaactgcggcgagggcgtgcagaccagaaaggtgagatgcatgcagaacaccgccgacggccccagcgagcacgtggaggactacctgtgcgaccccgaggagatgcccctgggcagcagagtgtgcaagctgccctgccccgaggactgcgtgatcagcgagtggggcccctggacccagtgcgtgctgccctgcaaccagagcagcttcagacagagaagcgccgaccccatcagacagcccgccgacgagggcagaagctgccccaacgccgtggagaaggagccctgcaacctgaacaagaactgctaccactacgactacaacgtgaccgactggagcacctgccagctgagcgagaaggccgtgtgcggcaacggcatcaagaccagaatgctggactgcgtgagaagcgacggcaagagcgtggacctgaagtactgcgaggccctgggcctggagaagaactggcagatgaacaccagctgcatggtggagtgccccgtgaactgccagctgagcgactggagcccctggagcgagtgcagccagacctgcggcctgaccggcaagatgatcagaagaagaaccgtgacccagcccttccagggcgacggcagaccctgccccagcctgatggaccagagcaagccctgccccgtgaagccctgctacagatggcagtacggccagtggagcccctgccaggtgcaggaggcccagtgcggcgagggcaccagaaccagaaacatcagctgcgtggtgagcgacggcagcgccgacgacttcagcaaggtggtggacgaggagttctgcgccgacatcgagctgatcatcgacggcaacaagaacatggtgctggaggagagctgcagccagccctgccccggcgactgctacctgaaggactggagcagctggagcctgtgccagctgacctgcgtgaacggcgaggacctgggcttcggcggcatccaggtgagaagcagacccgtgatcatccaggagctggagaaccagcacctgtgccccgagcagatgctggagaccaagagctgctacgacggccagtgctacgagtacaagtggatggccagcgcctggaagggcagcagcagaaccgtgtggtgccagagaagcgacggcatcaacgtgaccggcggctgcctggtgatgagccagcccgacgccgacagaagctgcaaccccccctgcagccagccccacagctactgcagcgagaccaagacctgccactgcgaggagggctacaccgaggtgatgagcagcaacagcaccctggagcagtgcaccctgatccccgtggtggtgctgcccaccatggaggacaagagaggcgacgtgaagaccagcagagccgtgcaccccacccagcccagcagcaaccccgccggcagaggcagaacctggttcctgcagcccttcggccccgacggcagactgaagacctgggtgtacggcgtggccgccggcgccttcgtgctgctgatcttcatcgtgagcatgatctacctggcctgcaagaagcccaagaagccccagagaagacagaacaacagactgaagcccctgaccctggcctacgacggcgacgccgacatgtag

SEQ ID NO: 185168 - DNA, 4974 bp, Artificial Sequence
  derived and/or modified sequence
atgggcctgcaggccagaagatgggccagcggcagcagaggcgccgccggccccagaagaggcgtgctgcagctgctgcccctgcccctgcccctgcccctgctgctgctgctgctgctgagacccggcgccggcagagccgccgcccagggcgaggccgaggcccccaccctgtacctgtggaagaccggcccctggggcagatgcatgggcgacgagtgcggccccggcggcatccagaccagagccgtgtggtgcgcccacgtggagggctggaccaccctgcacaccaactgcaagcaggccgagagacccaacaaccagcagaactgcttcaaggtgtgcgactggcacaaggagctgtacgactggagactgggcccctggaaccagtgccagcccgtgatcagcaagagcctggagaagcccctggagtgcatcaagggcgaggagggcatccaggtgagagagatcgcctgcatccagaaggacaaggacatccccgccgaggacatcatctgcgagtacttcgagcccaagcccctgctggagcaggcctgcctgatcccctgccagcaggactgcatcgtgagcgagttcagcgcctggagcgagtgcagcaagacctgcggcagcggcctgcagcacagaaccagacacgtggtggcccccccccagttcggcggcagcggctgccccaacctgaccgagttccaggtgtgccagagcagcccctgcgaggccgaggagctgagatacagcctgcacgtgggcccctggagcacctgcagcatgccccacagcagacaggtgagacaggccagaagaagaggcaagaacaaggagagagagaaggacagaagcaagggcgtgaaggaccccgaggccagagagctgatcaagaagaagagaaacagaaacagacagaacagacaggagaacaagtactgggacatccagatcggctaccagaccagagaggtgatgtgcatcaacaagaccggcaaggccgccgacctgagcttctgccagcaggagaagctgcccatgaccttccagagctgcgtgatcaccaaggagtgccaggtgagcgagtggagcgagtggagcccctgcagcaagacctgccacgacatggtgagccccgccggcaccagagtgagaaccagaaccatcagacagttccccatcggcagcgagaaggagtgccccgagttcgaggagaaggagccctgcctgagccagggcgacggcgtggtgccctgcgccacctacggctggagaaccaccgagtggaccgagtgcagagtggaccccctgctgagccagcaggacaagagaagaggcaaccagaccgccctgtgcggcggcggcatccagaccagagaggtgtactgcgtgcaggccaacgagaacctgctgagccagctgagcacccacaagaacaaggaggccagcaagcccatggacctgaagctgtgcaccggccccatccccaacaccacccagctgtgccacatcccctgccccaccgagtgcgaggtgagcccctggagcgcctggggcccctgcacctacgagaactgcaacgaccagcagggcaagaagggcttcaagctgagaaagagaagaatcaccaacgagcccaccggcggcagcggcgtgaccggcaactgcccccacctgctggaggccatcccctgcgaggagcccgcctgctacgactggaaggccgtgagactgggcaactgcgagcccgacaacggcaaggagtgcggccccggcacccaggtgcaggaggtggtgtgcatcaacagcgacggcgaggaggtggacagacagctgtgcagagacgccatcttccccatccccgtggcctgcgacgccccctgccccaaggactgcgtgctgagcacctggagcacctggagcagctgcagccacacctgcagcggcaagaccaccgagggcaagcagatcagagccagaagcatcctggcctacgccggcgaggagggcggcatcagatgccccaacagcagcgccctgcaggaggtgagaagctgcaacgagcacccctgcaccgtgtaccactggcagaccggcccctggggccagtgcatcgaggacaccagcgtgagcagcttcaacaccaccaccacctggaacggcgaggccagctgcagcgtgggcatgcagaccagaaaggtgatctgcgtgagagtgaacgtgggccaggtgggccccaagaagtgccccgagagcctgagacccgagaccgtgagaccctgcctgctgccctgcaagaaggactgcatcgtgaccccctacagcgactggaccagctgccccagcagctgcaaggagggcgacagcagcatcagaaagcagagcagacacagagtgatcatccagctgcccgccaacggcggcagagactgcaccgaccccctgtacgaggagaaggcctgcgaggccccccaggcctgccagagctacagatggaagacccacaagtggagaagatgccagctggtgccctggagcgtgcagcaggacagccccggcgcccaggagggctgcggccccggcagacaggccagagccatcacctgcagaaagcaggacggcggccaggccggcatccacgagtgcctgcagtacgccggccccgtgcccgccctgacccaggcctgccagatcccctgccaggacgactgccagctgaccagctggagcaagttcagcagctgcaacggcgactgcggcgccgtgagaaccagaaagagaaccctggtgggcaagagcaagaagaaggagaagtgcaagaacagccacctgtaccccctgatcgagacccagtactgcccctgcgacaagtacaacgcccagcccgtgggcaactggagcgactgcatcctgcccgagggcaaggtggaggtgctgctgggcatgaaggtgcagggcgacatcaaggagtgcggccagggctacagataccaggccatggcctgctacgaccagaacggcagactggtggagaccagcagatgcaacagccacggctacatcgaggaggcctgcatcatcccctgccccagcgactgcaagctgagcgagtggagcaactggagcagatgcagcaagagctgcggcagcggcgtgaaggtgagaagcaagtggctgagagagaagccctacaacggcggcagaccctgccccaagctggaccacgtgaaccaggcccaggtgtacgaggtggtgccctgccacagcgactgcaaccagtacctgtgggtgaccgagccctggagcatctgcaaggtgaccttcgtgaacatgagagagaactgcggcgagggcgtgcagaccagaaaggtgagatgcatgcagaacaccgccgacggccccagcgagcacgtggaggactacctgtgcgaccccgaggagatgcccctgggcagcagagtgtgcaagctgccctgccccgaggactgcgtgatcagcgagtggggcccctggacccagtgcgtgctgccctgcaaccagagcagcttcagacagagaagcgccgaccccatcagacagcccgccgacgagggcagaagctgccccaacgccgtggagaaggagccctgcaacctgaacaagaactgctaccactacgactacaacgtgaccgactggagcacctgccagctgagcgagaaggccgtgtgcggcaacggcatcaagaccagaatgctggactgcgtgagaagcgacggcaagagcgtggacctgaagtactgcgaggccctgggcctggagaagaactggcagatgaacaccagctgcatggtggagtgccccgtgaactgccagctgagcgactggagcccctggagcgagtgcagccagacctgcggcctgaccggcaagatgatcagaagaagaaccgtgacccagcccttccagggcgacggcagaccctgccccagcctgatggaccagagcaagccctgccccgtgaagccctgctacagatggcagtacggccagtggagcccctgccaggtgcaggaggcccagtgcggcgagggcaccagaaccagaaacatcagctgcgtggtgagcgacggcagcgccgacgacttcagcaaggtggtggacgaggagttctgcgccgacatcgagctgatcatcgacggcaacaagaacatggtgctggaggagagctgcagccagccctgccccggcgactgctacctgaaggactggagcagctggagcctgtgccagctgacctgcgtgaacggcgaggacctgggcttcggcggcatccaggtgagaagcagacccgtgatcatccaggagctggagaaccagcacctgtgccccgagcagatgctggagaccaagagctgctacgacggccagtgctacgagtacaagtggatggccagcgcctggaagggcagcagcagaaccgtgtggtgccagagaagcgacggcatcaacgtgaccggcggctgcctggtgatgagccagcccgacgccgacagaagctgcaaccccccctgcagccagccccacagctactgcagcgagaccaagacctgccactgcgaggagggctacaccgaggtgatgagcagcaacagcaccctggagcagtgcaccctgatccccgtggtggtgctgcccaccatggaggacaagagaggcgacgtgaagaccagcagagccgtgcaccccacccagcccagcagcaaccccgccggcagaggcagaacctggttcctgcagcccttcggccccgacggcagactgaagacctgggtgtacggcgtggccgccggcgccttcgtgctgctgatcttcatcgtgagcatgatctacctggcctgcaagaagcccaagaagccccagagaagacagaacaacagactgaagcccctgaccctggcctacgacggcgacgccgacatgtag

SEQ ID NO: 185169 - DNA, 4974 bp, Artificial Sequence
  derived and/or modified sequence
atgggactgcaggcaaggaggtgggcaagtggcagtcggggcgctgctggtcctcgccgcggggtgctgcaattgctgccactgccactacctttgcctctgttgctgttacttcttttgagacctggtgcagggcgcgctgccgcacagggtgaggccgaggccccaactctctatttgtggaaaacaggtccgtggggacgatgtatgggtgacgagtgtggaccaggaggcattcagacccgcgccgtgtggtgcgctcacgtcgaaggatggaccactctgcacactaactgtaagcaggcggagaggccgaacaaccagcaaaattgcttcaaagtatgtgactggcacaaagagttgtacgactggcggctcggcccctggaatcagtgtcagcccgtgatttccaagtcgttagaaaaacccctcgagtgtatcaaaggggaggaggggatccaggtcagagaaattgcctgcattcaaaaagacaaggatataccagccgaagacatcatttgtgagtacttcgagccaaaacctctattagaacaggcatgcctgatcccgtgtcagcaggactgcattgtgagcgaattcagtgcctggtctgagtgctcaaaaacgtgcggcagcggcttacaacatcgaaccagacacgttgtcgcccctccccagttcggagggagtgggtgccctaatctgactgagttccaagtctgccaatcatccccatgcgaggctgaggaactgcgatacagtctgcacgttggaccttggtccacctgcagcatgccccactcgcggcaggtaagacaggcgaggcgccggggcaaaaacaaagagagagagaaggacaggtccaaaggggttaaagatcctgaagccagagaactgataaaaaagaaacgcaaccgcaatcgtcaaaaccggcaagaaaacaagtactgggatattcagatcgggtaccagacgcgggaggtgatgtgtatcaataagactgggaaagctgctgatctgtctttctgccaacaggaaaagctgccaatgacattccaaagttgcgtgatcacaaaggaatgccaggtaagcgagtggtccgagtggtctccatgttccaagacatgtcacgacatggtttcccctgccggcacgagggtgagaacacggacaatcaggcaatttccaataggtagtgaaaaagagtgcccagagtttgaggagaaggaaccttgtctctcacagggagatggtgtcgtgccgtgcgcaacatatgggtggagaactaccgaatggacagaatgcagagtcgatcccctcctgtcccagcaggataaaaggcgcgggaaccagactgccctttgcggaggcgggattcagacacgcgaagtatactgtgtgcaggctaacgagaatctccttagccagttgtcaacccataagaacaaggaggcatcaaagcccatggatctaaaactgtgcaccggccctattcccaatacgacccagctgtgtcacattccttgtcccaccgaatgtgaggtgtctccctggtccgcctggggcccatgtacctacgagaactgtaacgaccagcaaggaaagaagggcttcaaactccgcaagagacgaattacaaatgagccgacaggaggctctggcgttaccggaaactgtccacacctgctcgaggccattccttgtgaggagcctgcctgctatgactggaaagccgttaggttgggaaattgtgaaccagataatgggaaggaatgcggtcctggtactcaggtgcaggaggtcgtgtgtataaactcagatggagaggaggtggaccgccagctttgcagggacgcgatcttccccatccccgttgcatgtgacgcaccatgtcctaaggactgtgttttatccacctggtccacgtggagcagctgcagtcatacttgttctggcaagactactgagggcaaacagatacgagcaaggagcattctcgcctatgccggcgaagagggcggcattcggtgtcccaatagctccgctctgcaggaggtgagaagctgtaacgaacacccttgtaccgtgtaccattggcagactggcccctggggtcagtgtatagaggatacaagcgtgagctcttttaatactactaccacgtggaatggggaggccagctgtagtgtgggtatgcaaacccggaaggtgatttgcgtcagggtgaacgtgggccaggtcggcccgaaaaagtgccccgaatcccttagaccggagacagtaagaccgtgcctgctgccctgtaagaaagattgcatcgtgactccttattcggattggaccagctgcccatctagctgcaaagagggggattcatctatccgaaaacagtcacggcaccgtgtgattattcagcttcctgctaacgggggtagagactgcacagatccgttgtatgaagaaaaggcctgcgaggctccacaggcatgccagagctatcgatggaagacacacaaatggcgaaggtgccagctagtgccctggtctgtgcaacaggattcccccggagcgcaggagggatgtggaccaggccgtcaggccagggctattacgtgtagaaagcaagacggcggtcaggcgggcatacatgagtgtctgcagtacgctgggcctgtgccggctctcacgcaggcctgtcagatcccttgccaggatgattgtcagctaacctcatggtccaagttctcctcatgtaatggcgattgcggtgctgtcagaacaaggaagcgaacccttgtgggcaagtccaaaaaaaaagaaaagtgtaagaactcacatctgtatcctctgattgagacccagtactgcccctgtgacaagtacaacgctcagccggtcggcaattggtctgactgtatcctgcccgaaggcaaagtcgaagtgctgcttggcatgaaggtgcaaggtgatatcaaggaatgcggccagggctatcggtatcaggccatggcttgttatgaccagaatggccggttggtagagacttcccggtgtaatagccacggatatatagaggaggcatgtattatcccctgcccgtcagattgcaagcttagcgagtggtcaaattggtcacgctgttccaagtcctgcgggagcggagtgaaggtgcgcagcaaatggctgcgtgagaagccatataacggcggtcgcccctgccccaagctggaccatgtaaaccagtttcaggtgtacgaggtggttccctgtcattccgattgtaaccagtacctctgggtgacagaaccctggagcatctgcaaagtgacctttgttaacatgcgcgagaactgcggcgaaggcgtccagacgcgaaaagtgcgctgtatgcagaacacagctgacggtccttccgagcacgtcgaggattacctgtgcgacccggaggaaatgcccctcgggtcgagggtctgcaaactcccatgtcctgaggactgtgttataagtgagtggggaccgtggacccagtgcgtactgccttgcaatcagtcctcttttcggcagcgttccgcggaccccatccggcagcccgcagatgaaggccggagttgtcccaacgctgttgaaaaagagccatgcaatttgaacaagaactgttatcattacgactacaacgtcacagattggtccacctgccaacttagcgagaaggccgtctgtggcaacggcataaaaacgcggatgctagattgcgtccgttcggacggtaagtctgttgatctgaagtattgcgaggctctgggcctagaaaaaaactggcaaatgaatacctcatgtatggtcgagtgccctgtgaactgtcaactctctgattggtccccgtggagcgaatgttcccagacatgtgggctcaccggtaagatgattcggcgccgtacagtgactcagcctttccagggggacgggcggccatgtcccagtttgatggatcagtctaaaccttgtcccgtgaaaccgtgctatcgatggcaatacggccagtggagtccgtgccaggtacaggaggcccagtgtggggaggggacacgaaccagaaacatcagctgtgtggttagcgatgggtctgcagatgacttttccaaggtcgtggacgaagagttttgcgctgacatagaacttataatcgatggcaacaagaatatggtgttggaggaatcttgctcacaaccctgccccggggactgctacctgaaggattggagctcatggtcactttgtcaattaacatgtgtcaatggcgaggatctgggttttggaggaattcaagtgcggtccagaccagtcataattcaagaattagaaaaccagcatctgtgccccgagcagatgctcgagaccaagtcatgctacgatggacaatgctatgagtacaaatggatggcatcggcgtggaaggggtcctccagaacagtatggtgtcagagatctgatggaatcaatgtgacaggaggctgcctggtaatgtctcagcccgacgccgacagaagttgtaatccaccctgttctcagccgcattcctactgctcagagacgaaaacctgccactgcgaggaaggctacacagaggttatgtcgtccaattctaccctggaacaatgtacacttattccagttgtggttctgccaactatggaggacaagcgcggagatgtgaaaacgtctagggccgtgcaccctacccagcctagctctaaccctgcaggaaggggccgaacatggtttctgcagccctttggacccgacggccgcttgaaaacatgggtctacggtgtagcggctggggcttttgtgctcctcatctttatcgtgtccatgatctacctggcctgcaaaaagcccaaaaaaccgcagagacggcagaacaaccgcttaaagccgctcacactggcctatgatggcgacgccgacatgtag

SEQ ID NO: 185170 - DNA, 4974 bp, Artificial Sequence
  derived and/or modified sequence
atgggcctgcaggctcgccgatgggcaagcggcagtaggggagcagcagggcccaggaggggcgtcctccagctgttgccactgccactgccattgccactgctgctgttacttctcctgcgccctggcgcaggcagagctgccgctcagggtgaggcagaagcacctaccttgtacctctggaagacaggcccctgggggcgatgcatgggagacgaatgtggtccaggtggcattcagacgcgagctgtctggtgtgcccacgtggaaggatggactacactgcatactaattgcaagcaagctgagcgtcccaataatcagcaaaattgctttaaagtttgcgattggcacaaggaactgtatgactggcgattgggcccctggaaccaatgccagccagtgatttcaaaaagtctcgagaagcccctggaatgcatcaaaggcgaggaagggattcaagtccgcgagattgcatgcatccagaaagataaggatatacccgcagaggacatcatctgtgagtactttgagcccaagcccctcctcgagcaggcctgccttatcccttgtcagcaggattgtatcgtgagtgaattttctgcctggagcgaatgttccaaaacctgtgggtctggactgcaacaccgaaccaggcatgtcgttgctcctccccagtttggaggctcgggatgcccaaatctaacagaattccaggtgtgtcagtcatcaccatgcgaggctgaggagctgaggtatagtttgcacgtcggcccatggagcacctgttctatgccccacagccggcaggttaggcaagcccggaggcgaggaaaaaacaaagagagggaaaaagacagaagcaaaggcgtcaaagacccagaggcccgcgagctcataaaaaagaaacgaaatagaaataggcagaataggcaggaaaataagtactgggatattcagatcggctaccagacacgggaggtgatgtgcataaataagaccggtaaggccgcagacctgagtttctgtcagcaggagaagctccctatgactttccagtcttgtgtgataaccaaggagtgccaggtgtccgaatggagtgagtggtccccgtgctccaaaacgtgccacgatatggtgtcgcccgccggcactcgggtcagaaccaggactatcagacagttccctattgggagtgaaaaagagtgccccgaatttgaggagaaggaaccctgtctgtcacagggcgatggcgtggtcccctgcgcaacctatggttggcgtactacagagtggaccgagtgccgggtagatcccctcctgtcccagcaggataagcgtagagggaaccagacagccctgtgtgggggcgggattcagacaagggaggtttactgtgtgcaggccaatgagaatttactcagtcaactgtccacgcacaaaaacaaagaagcatccaaacctatggacctgaagttatgtactggaccaatcccgaataccacccagctgtgtcatataccctgccccactgagtgcgaagtgtcgccctggagcgcctgggggccttgcacatatgaaaactgcaatgaccagcagggaaaaaagggctttaaactgcgcaagcgtaggatcactaatgagcccaccggaggatcaggcgtgaccggaaactgccctcatctgttggaagcgataccctgtgaggagccagcttgctatgactggaaggccgtgcggctgggaaactgcgaacctgataacggaaaggagtgtggcccaggtacacaagtgcaggaggttgtgtgcatcaacagcgacggcgaagaagtggatcgtcagctgtgccgagacgcaatattccctattccagtggcctgtgacgcaccatgcccaaaggattgcgtactttcaacgtggagtacctggtcctcctgcagccacacatgcagtggaaaaaccactgaaggaaaacagattcgggccaggtcaatactggcgtatgcgggagaggaggggggaatcaggtgcccgaactctagcgcgttgcaggaggttagatcctgcaacgagcacccatgcaccgtctatcattggcaaaccggtccatggggacaatgcattgaagacaccagcgtgagcagctttaataccactaccacctggaacggcgaggccagctgttcggtgggtatgcagacaaggaaagtgatctgtgttcgcgtcaacgttggacaagtggggcctaaaaaatgcccggagagtctacgacctgagaccgtaaggccttgcctgctcccatgtaagaaagattgtatcgtcaccccatactctgactggacttcttgtccctcaagctgcaaggagggcgacagcagcatcagaaaacagtcccgccaccgcgtcataattcagttgccagccaatgggggtagagactgtactgacccattgtatgaggaaaaagcatgtgaagcccctcaggcctgtcagtcctacagatggaaaacccataaatggagacgctgccaactggtcccatggtcagtgcagcaggactcacccggcgcccaggaaggctgtggccccggccggcaggccagagcgattacctgcaggaagcaggacggtggccaggctggcatacatgagtgcctgcaatacgctgggccagtgccggcactgactcaggcctgccagattccctgtcaggacgattgccaactgacgtcgtggagtaagttcagcagctgcaacggggactgtggggccgtgagaacgaggaagcggaccttagtgggaaagtcaaagaaaaaagagaaatgcaaaaactcccatctgtacccactgattgagacacagtactgcccctgtgacaaatacaacgcccagccggtaggcaattggagcgactgcatcttgcctgaagggaaagtagaagtcttgctcgggatgaaagtgcagggagatatcaaagagtgcggacagggatatagatatcaggccatggcttgttacgatcagaatggccggcttgtcgaaactagccgctgtaactcccacgggtacatcgaggaggcttgtatcatcccctgcccatctgattgcaagttgtctgaatggagtaattggtcccgctgttctaaatcatgcggatctggagtgaaggtcaggtcaaagtggctgagagaaaagccttacaacggaggtcggccatgtccaaaactcgaccacgtaaaccaggcgcaggtgtacgaggtggtcccctgccacagcgattgtaatcagtacttatgggtgaccgagccatggtctatttgcaaagtaacatttgtgaacatgagagagaattgtggggagggagtgcagaccaggaaagtgcgatgtatgcaaaataccgccgacggacccagcgaacatgtcgaggattacttgtgcgatcctgaagaaatgcccctggggtctagggtctgtaaactcccctgcccagaagattgcgtgatctccgagtggggcccttggacacagtgcgtcttgccttgcaaccagtcttctttcaggcaaagatccgcggatcccatccgccagcccgccgatgaaggccgctcatgccctaatgccgtggagaaggaaccttgcaatttgaataaaaactgttatcattacgactataatgtgaccgactggtctacttgccagttgtccgaaaaagcagtctgcgggaacggtattaaaacaaggatgctggactgcgtgcggagcgatggtaaatccgtcgacctgaagtactgtgaggccttggggctcgagaaaaactggcagatgaatacctcctgtatggtcgaatgccccgtcaattgtcaattgagcgattggagcccgtggtccgaatgtagccagacgtgcggattaaccggcaagatgattcgcaggcgaaccgtcacacagcccttccagggtgatggaaggccctgcccttcgttgatggaccagagcaagccatgccctgttaagccttgctatagatggcagtatgggcaatggtccccatgtcaggtgcaggaagcccaatgtggcgaaggaacccggacgagaaacatatcctgcgtagttagtgatggatcggccgacgatttctcaaaagtcgtggacgaggagttctgtgcagacattgagcttatcattgacgggaacaagaatatggtcctggaagagagttgctctcagccctgtccgggggactgctacctaaaggactggtcgtcatggtctctatgccagttgacctgcgtgaacggggaggacctgggcttcggcggcattcaggttcggtcacgcccggttatcattcaggaactcgagaaccagcatttgtgccccgagcagatgcttgagacaaaatcatgttacgatggccaatgttacgaatacaagtggatggcctctgcatggaaaggcagcagcagaaccgtgtggtgtcagcggtctgacggcattaacgtgacaggaggttgcttagtgatgtctcagcccgacgccgaccgctcctgtaaccctccttgctcacagcctcactcctattgctcagagaccaaaacctgtcattgcgaggagggatataccgaggttatgtcttctaacagcactctggagcaatgcacgctaattccagtcgtggtgcttcccacaatggaagacaaacggggggacgtgaagacctctcgagccgttcatcctactcagccatcaagtaacccagccgggcgcggaaggacgtggttcctacagcccttcggccccgacggtagactaaagacttgggtttacggtgttgctgcgggcgcattcgtgctccttattttcatcgtgtcgatgatttatttagcctgtaagaagcccaaaaaaccccaacgacggcagaacaacaggctcaaacctcttaccctggcctatgatggtgatgctgacatgtag

SEQ ID NO: 185171 - DNA, 4974 bp, Artificial Sequence
  derived and/or modified sequence
atgggcctgcaggcccggcgctgggccagcggcagcagaggagctgctggccccaggagaggagtgctgcagctgctgcccctgcccctgcccctgcccctgctgctgctgctgctgctgcggcctggggccggccgggccgccgcccagggcgaggccgaggcccccaccctgtacctgtggaagacaggcccctggggccgctgcatgggagatgaatgtggccctgggggcatccagaccagggctgtgtggtgtgcccacgtggagggctggaccaccctgcacaccaactgcaagcaggccgagcggcccaacaaccagcagaactgcttcaaggtgtgtgactggcacaaggagctgtatgactggaggctgggcccctggaaccagtgccagcccgtcatcagcaagagcctggagaagcccctggagtgcatcaagggggaggagggcatccaggtgcgggagatcgcctgcatccagaaggacaaggacatcccagctgaggacatcatctgtgagtactttgagcccaagcccctgctggagcaggcctgcctgatcccctgccagcaggactgcatcgtgtctgagttcagcgcctggagcgaatgttccaagacctgtggcagcggcctgcagcacaggaccaggcatgtggtggccccaccccagtttggaggcagcggctgccccaacctgacagagttccaggtgtgccagagcagcccctgtgaggccgaggagctgcgctacagcctgcacgtgggcccctggagcacctgcagcatgccccacagccggcaggtgcggcaggcccggcggcggggcaagaacaaggagcgggagaaggacaggagcaaaggagtgaaggaccctgaggcccgggagctgatcaagaagaagaggaacagaaaccggcagaaccggcaggagaacaagtactgggacatccagatcggctaccagacccgggaggtgatgtgcatcaacaagacaggcaaggctgctgacctgtccttctgccagcaggagaagctgcccatgaccttccagagctgtgtgatcaccaaggagtgccaggtgtctgagtggagcgagtggagcccctgcagcaagacctgccacgacatggtgtccccagctggcaccagggtgaggaccaggaccatccggcagttccccatcggcagcgagaaggagtgcccagagtttgaggagaaggagccctgcctgagccagggagatggagtggtgccctgtgccacctacggctggaggaccacagagtggacagagtgccgggtggaccccctgctgagccagcaggacaagagaagaggcaaccagacagccctgtgtggcggcggcatccagacccgggaggtgtactgtgtgcaggccaatgaaaacctgctgagccagctgagcacccacaagaacaaggaggccagcaagcccatggacctgaagctgtgcaccggccccatccccaacaccacccagctgtgccacatcccctgccccacagaatgtgaggtgagcccctggagcgcctggggcccctgcacctatgagaactgcaatgaccagcagggcaagaagggcttcaagctgaggaagaggcgcatcaccaatgagcccaccggcggcagcggcgtgacaggcaactgcccccacctgctggaggccatcccctgtgaggagcccgcctgctatgactggaaggctgtgcggctgggcaactgtgagccagacaacgggaaggaatgtggccctggcacccaggtgcaggaggtggtgtgcatcaacagtgatggagaggaggtggaccggcagctgtgcagagatgccatcttccccatccctgtggcctgtgatgccccctgccccaaggactgtgtgctgagcacctggagcacctggagcagctgcagccacacctgcagcggcaagaccacagagggcaagcagatccgggcccggagcatcctggcctatgctggggaggagggcggcatccgctgccccaacagcagcgccctgcaggaggtgcgcagctgcaatgagcacccctgcaccgtgtaccactggcagacaggcccctggggccagtgcatcgaggacacctctgtgtcctccttcaacaccaccaccacctggaatggagaggccagctgcagcgtgggcatgcagaccaggaaggtgatctgtgtgcgggtgaatgtgggccaggtgggccccaagaagtgcccagagagcctgcggcctgagaccgtgcggccctgcctgctgccctgcaagaaggactgcatcgtgaccccctacagcgactggaccagctgccccagcagctgcaaggagggggacagcagcatcaggaagcagagccgccacagggtcatcatccagctgcctgccaatggaggccgggactgcacagaccccctgtatgaggagaaggcctgtgaggccccccaggcctgccagagctaccgctggaagacccacaagtggaggcgctgccagctggtgccctggagcgtgcagcaggacagccctggggcccaggagggctgcggccctggccggcaggcccgggccatcacctgcaggaagcaggacggcggccaggccggcatccacgagtgcctgcagtatgccggccctgtgcctgccctgacccaggcctgccagatcccctgccaggatgactgccagctgacctcctggagcaagttcagcagctgcaatggagactgtggggctgtgaggaccaggaagaggaccctggtgggcaagagcaagaagaaggagaagtgcaagaacagccacctgtaccccctgattgagacccagtactgcccctgtgacaagtacaatgcccagcctgtgggcaactggagcgactgcatcctgcctgagggcaaggtggaggtgctgctgggcatgaaggtgcagggcgacatcaaggaatgtggccagggctaccgctaccaggccatggcctgctatgaccagaatggccgcctggtggagaccagccgctgcaacagccacggctacatcgaggaggcctgcatcatcccctgccccagcgactgcaagctgtctgagtggagcaactggagccgctgcagcaagagctgtggcagcggcgtgaaggtgcgcagcaagtggctgcgggagaagccctacaacggcggccggccctgccccaagctggaccacgtgaaccagttccaggtgtatgaggtggtgccctgccacagcgactgcaaccagtacctgtgggtgacagagccctggagcatctgcaaggtgacctttgtgaacatgagggagaactgtggggagggcgtgcagaccaggaaggtgcgctgcatgcagaacacagcagatggccccagcgagcacgtggaggactacctgtgtgaccctgaggagatgcccctgggcagccgggtgtgcaagctgccctgcccagaggactgtgtgatcagcgagtggggcccctggacccagtgtgtgctgccctgcaaccagagcagcttccggcagaggtctgctgaccccatccggcagcctgcagatgagggccgcagctgccccaatgctgtggagaaggagccctgcaacctgaacaagaactgctaccactatgactacaacgtgacagactggagcacctgccagctgtctgagaaggctgtgtgtggaaatggcatcaagaccaggatgctggactgtgtgcggagtgatggcaagtctgtggacctgaagtactgtgaggccctgggcctggagaagaactggcagatgaacaccagctgcatggtggagtgccctgtgaactgccagctgagtgactggagcccctggagcgaatgttcccagacctgtggcctgaccgggaagatgatcagaagaagaacagtgacccagcccttccagggagatggccggccctgccccagcctgatggaccagagcaagccctgccctgtgaagccctgctaccgctggcagtatggccagtggagcccctgccaggtgcaggaggcccagtgtggggagggcaccaggaccaggaacatcagctgtgtggtgtctgatggcagcgcagatgacttcagcaaggtggtggatgaggagttctgtgccgacatcgagctgatcattgatggcaacaagaacatggtgctggaggagagctgcagccagccctgccctggggactgctacctgaaggactggagctcctggagcctgtgccagctgacctgtgtgaatggagaggacctgggctttggaggcatccaggtgcgcagcaggcctgtgatcatccaggagctggagaaccagcacctgtgcccagagcagatgctggagaccaagagctgctatgatggccagtgctatgagtacaagtggatggccagcgcctggaagggcagcagcaggacagtgtggtgccagaggagtgatggcatcaacgtgactggaggctgcctggtgatgagccagccagatgctgacaggagctgcaaccccccctgcagccagccccacagctactgcagcgagaccaagacctgccactgtgaggagggctacacagaggtgatgagcagcaacagcaccctggagcagtgcaccctcatccctgtggtggtgctgcccaccatggaggacaagagaggagatgtgaagaccagcagagctgtgcaccccacccagcccagcagcaacccagctggccggggccgcacctggttcctgcagcccttcggcccagatggccgcctgaagacctgggtgtatggagtggccgccggggcctttgtgctgctgatcttcatcgtgtccatgatctacctggcctgcaagaagcccaagaagccccagaggcggcagaacaaccggctgaagcccctgaccctggcctatgatggagatgctgacatgtag

SEQ ID NO: 185172 - DNA, 4974 bp, Artificial Sequence
  derived and/or modified sequence
atgggcctgcaggcccggcgctgggccagcggcagcagaggagctgctggccccaggagaggagtgctgcagctgctgcccctgcccctgcccctgcccctgctgctgctgctgctgctgcggcctggggccggccgggccgccgcccagggcgaggccgaggcccccaccctgtacctgtggaagacaggcccctggggccgctgcatgggagatgaatgtggccctgggggcatccagaccagggctgtgtggtgtgcccacgtggagggctggaccaccctgcacaccaactgcaagcaggccgagcggcccaacaaccagcagaactgcttcaaggtgtgtgactggcacaaggagctgtatgactggaggctgggcccctggaaccagtgccagcccgtcatcagcaagagcctggagaagcccctggagtgcatcaagggggaggagggcatccaggtgcgggagatcgcctgcatccagaaggacaaggacatcccagctgaggacatcatctgtgagtactttgagcccaagcccctgctggagcaggcctgcctgatcccctgccagcaggactgcatcgtgtctgagttcagcgcctggagcgaatgttccaagacctgtggcagcggcctgcagcacaggaccaggcatgtggtggccccaccccagtttggaggcagcggctgccccaacctgacagagttccaggtgtgccagagcagcccctgtgaggccgaggagctgcgctacagcctgcacgtgggcccctggagcacctgcagcatgccccacagccggcaggtgcggcaggcccggcggcggggcaagaacaaggagcgggagaaggacaggagcaaaggagtgaaggaccctgaggcccgggagctgatcaagaagaagaggaacagaaaccggcagaaccggcaggagaacaagtactgggacatccagatcggctaccagacccgggaggtgatgtgcatcaacaagacaggcaaggctgctgacctgtccttctgccagcaggagaagctgcccatgaccttccagagctgtgtgatcaccaaggagtgccaggtgtctgagtggagcgagtggagcccctgcagcaagacctgccacgacatggtgtccccagctggcaccagggtgaggaccaggaccatccggcagttccccatcggcagcgagaaggagtgcccagagtttgaggagaaggagccctgcctgagccagggagatggagtggtgccctgtgccacctacggctggaggaccacagagtggacagagtgccgggtggaccccctgctgagccagcaggacaagagaagaggcaaccagacagccctgtgtggcggcggcatccagacccgggaggtgtactgtgtgcaggccaatgaaaacctgctgagccagctgagcacccacaagaacaaggaggccagcaagcccatggacctgaagctgtgcaccggccccatccccaacaccacccagctgtgccacatcccctgccccacagaatgtgaggtgagcccctggagcgcctggggcccctgcacctatgagaactgcaatgaccagcagggcaagaagggcttcaagctgaggaagaggcgcatcaccaatgagcccaccggcggcagcggcgtgacaggcaactgcccccacctgctggaggccatcccctgtgaggagcccgcctgctatgactggaaggctgtgcggctgggcaactgtgagccagacaacgggaaggaatgtggccctggcacccaggtgcaggaggtggtgtgcatcaacagtgatggagaggaggtggaccggcagctgtgcagagatgccatcttccccatccctgtggcctgtgatgccccctgccccaaggactgtgtgctgagcacctggagcacctggagcagctgcagccacacctgcagcggcaagaccacagagggcaagcagatccgggcccggagcatcctggcctatgctggggaggagggcggcatccgctgccccaacagcagcgccctgcaggaggtgcgcagctgcaatgagcacccctgcaccgtgtaccactggcagacaggcccctggggccagtgcatcgaggacacctctgtgtcctccttcaacaccaccaccacctggaatggagaggccagctgcagcgtgggcatgcagaccaggaaggtgatctgtgtgcgggtgaatgtgggccaggtgggccccaagaagtgcccagagagcctgcggcctgagaccgtgcggccctgcctgctgccctgcaagaaggactgcatcgtgaccccctacagcgactggaccagctgccccagcagctgcaaggagggggacagcagcatcaggaagcagagccgccacagggtcatcatccagctgcctgccaatggaggccgggactgcacagaccccctgtatgaggagaaggcctgtgaggccccccaggcctgccagagctaccgctggaagacccacaagtggaggcgctgccagctggtgccctggagcgtgcagcaggacagccctggggcccaggagggctgcggccctggccggcaggcccgggccatcacctgcaggaagcaggacggcggccaggccggcatccacgagtgcctgcagtatgccggccctgtgcctgccctgacccaggcctgccagatcccctgccaggatgactgccagctgacctcctggagcaagttcagcagctgcaatggagactgtggggctgtgaggaccaggaagaggaccctggtgggcaagagcaagaagaaggagaagtgcaagaacagccacctgtaccccctgattgagacccagtactgcccctgtgacaagtacaatgcccagcctgtgggcaactggagcgactgcatcctgcctgagggcaaggtggaggtgctgctgggcatgaaggtgcagggcgacatcaaggaatgtggccagggctaccgctaccaggccatggcctgctatgaccagaatggccgcctggtggagaccagccgctgcaacagccacggctacatcgaggaggcctgcatcatcccctgccccagcgactgcaagctgtctgagtggagcaactggagccgctgcagcaagagctgtggcagcggcgtgaaggtgcgcagcaagtggctgcgggagaagccctacaacggcggccggccctgccccaagctggaccacgtgaaccaggcccaggtgtatgaggtggtgccctgccacagcgactgcaaccagtacctgtgggtgacagagccctggagcatctgcaaggtgacctttgtgaacatgagggagaactgtggggagggcgtgcagaccaggaaggtgcgctgcatgcagaacacagcagatggccccagcgagcacgtggaggactacctgtgtgaccctgaggagatgcccctgggcagccgggtgtgcaagctgccctgcccagaggactgtgtgatcagcgagtggggcccctggacccagtgtgtgctgccctgcaaccagagcagcttccggcagaggtctgctgaccccatccggcagcctgcagatgagggccgcagctgccccaatgctgtggagaaggagccctgcaacctgaacaagaactgctaccactatgactacaacgtgacagactggagcacctgccagctgtctgagaaggctgtgtgtggaaatggcatcaagaccaggatgctggactgtgtgcggagtgatggcaagtctgtggacctgaagtactgtgaggccctgggcctggagaagaactggcagatgaacaccagctgcatggtggagtgccctgtgaactgccagctgagtgactggagcccctggagcgaatgttcccagacctgtggcctgaccgggaagatgatcagaagaagaacagtgacccagcccttccagggagatggccggccctgccccagcctgatggaccagagcaagccctgccctgtgaagccctgctaccgctggcagtatggccagtggagcccctgccaggtgcaggaggcccagtgtggggagggcaccaggaccaggaacatcagctgtgtggtgtctgatggcagcgcagatgacttcagcaaggtggtggatgaggagttctgtgccgacatcgagctgatcattgatggcaacaagaacatggtgctggaggagagctgcagccagccctgccctggggactgctacctgaaggactggagctcctggagcctgtgccagctgacctgtgtgaatggagaggacctgggctttggaggcatccaggtgcgcagcaggcctgtgatcatccaggagctggagaaccagcacctgtgcccagagcagatgctggagaccaagagctgctatgatggccagtgctatgagtacaagtggatggccagcgcctggaagggcagcagcaggacagtgtggtgccagaggagtgatggcatcaacgtgactggaggctgcctggtgatgagccagccagatgctgacaggagctgcaaccccccctgcagccagccccacagctactgcagcgagaccaagacctgccactgtgaggagggctacacagaggtgatgagcagcaacagcaccctggagcagtgcaccctcatccctgtggtggtgctgcccaccatggaggacaagagaggagatgtgaagaccagcagagctgtgcaccccacccagcccagcagcaacccagctggccggggccgcacctggttcctgcagcccttcggcccagatggccgcctgaagacctgggtgtatggagtggccgccggggcctttgtgctgctgatcttcatcgtgtccatgatctacctggcctgcaagaagcccaagaagccccagaggcggcagaacaaccggctgaagcccctgaccctggcctatgatggagatgctgacatgtag

SEQ ID NO: 185173 - DNA, 4974 bp, Artificial Sequence
  derived and/or modified sequence
atgggcctgcaggcccggcggtgggccagcggcagccggggcgccgccgggcctcgcagaggagtcttgcaactccttcccctgccattgcccctaccgctcctgctgctgctcttgttaagacctggggccgggcgggctgctgctcagggagaagccgaagccccgaccctctacctttggaaaaccggaccatggggcagatgtatgggcgacgaatgtgggccaggcggtattcagacacgcgccgtgtggtgtgcacacgtagagggttggacgaccctgcataccaactgtaagcaagctgagcgtcccaataatcaacagaattgctttaaagtctgcgattggcataaggagctttacgattggcgcctgggtccatggaatcagtgtcaacctgtaataagcaagagccttgagaaaccacttgagtgtattaaaggggaggagggcatccaagtgcgggagattgcttgcatccagaaggacaaggatatccccgccgaggacatcatttgtgagtatttcgaaccgaagccactcctcgaacaggcatgcctgattccttgtcaacaggactgtatcgtctcagagttctctgcatggagcgaatgttccaagacgtgcgggtcgggcttacagcacaggacccggcatgtggtcgcccccccgcagtttggtgggtctggctgtcctaatctcaccgaatttcaggtctgtcagagcagcccttgtgaggccgaagagctccgttactctctgcacgttggcccatggtcgacgtgctccatgccccatagccgccaggtgcgacaagcccgcagacggggcaaaaataaagagagggaaaaggatcgcagtaaaggcgttaaagatcctgaagcgagagaattaataaagaagaagcgtaatcggaataggcagaaccggcaagaaaataagtactgggatatacaaatcggctaccagactcgggaagtaatgtgtatcaataaaaccggtaaggctgcggatctatcgttttgtcagcaggagaaactgcccatgaccttccagagctgcgtaataacaaaagaatgtcaggtttccgaatggtctgaatggtctccctgctctaaaacctgccatgacatggtgagcccggccggcacacgtgtgcgaacacggaccattagacaatttcccataggatcggaaaaggagtgccccgaattcgaggagaaggagccgtgtttatcccaaggcgatggcgtggtgccttgtgccacatacggttggcgtacaacggagtggactgaatgtagggtggaccccttgttgagccagcaggataagagaagaggaaatcaaactgccctgtgcggagggggaattcagaccagagaggtctactgcgtgcaggccaacgagaatttacttagccaactctctacccataagaataaggaggcaagcaagcccatggaccttaagctgtgcactggaccaattccgaatactacccagctatgtcacatcccgtgcccaacagaatgcgaggtgtcaccatggagtgcgtgggggccctgtacatatgagaactgcaatgaccaacagggcaagaaaggattcaaactgcgcaaacggagaatcactaacgagccgacgggaggctctggggtcactgggaactgtcctcacctgcttgaggcgatcccttgtgaggaacccgcatgttatgattggaaggccgtgcgcctgggtaattgtgagcctgacaatggtaaggaatgcgggcctggtacccaagtgcaggaggttgtgtgcattaactcagatggggaggaggtggacaggcaactctgtcgggatgccatcttcccgatccctgtcgcctgcgatgccccctgccccaaggattgcgttctgtcaacctggtctacatggtccagctgttctcacacctgttcagggaagaccaccgagggcaaacagatcagagcgcgctcgattcttgcgtacgctggggaagagggagggatccgctgcccaaactcgtccgccctgcaggaagtgaggtcctgcaacgagcacccatgcaccgtgtaccactggcaaacagggccctggggccagtgtatagaagataccagcgtttcttccttcaacaccacaaccacatggaatggtgaggcttcttgttcggtgggcatgcaaacaaggaaagtcatctgcgtgcgcgtcaatgtgggccaggtagggcccaaaaagtgtcccgagtctctcaggcctgagacagttaggccttgcttgttgccctgtaaaaaggattgcatcgtcaccccttactcggactggaccagttgcccatcctcctgcaaagaaggcgactcatctataagaaaacagagccgccacagggttataattcagctacctgctaacggtggacgtgattgtaccgacccattatatgaggagaaggcttgtgaagccccccaggcatgccagagttacaggtggaaaactcacaagtggcggcgatgccagctggtgccttggagtgtgcaacaggacagcccgggcgctcaggagggctgcggtcccggtagacaggcgagagctattacatgcaggaagcaagacggtgggcaggccgggatccatgaatgtttgcaatacgctgggccagtgccagcgctaacccaggcctgccaaattccctgtcaggatgactgccaactgacttcctggtctaaattctcctcctgtaacggtgactgcggtgccgtaaggacacgaaagaggacactggttggtaaatctaagaagaaggagaagtgcaaaaattcacacctttatccactcattgagacacagtactgtccctgcgataagtacaacgctcagcctgtaggcaattggagtgattgtatactgccagaggggaaggtagaagtgttactaggaatgaaggtgcagggagacatcaaggagtgtgggcaaggctatcgttaccaagccatggcttgctatgaccagaacgggaggcttgtggaaaccagtcgttgtaactctcatgggtacatagaggaggcatgcataatcccttgcccatctgattgtaagctatcagagtggtcaaattggagtaggtgtagtaagagctgcgggtccggtgtcaaagtgcgatccaagtggctcagagagaagccgtacaacggcggaagaccctgccccaagctggaccacgtgaaccaatttcaggtgtacgaggtagttccgtgccactctgactgtaaccagtatctgtgggttaccgagccttggtccatttgcaaggtgacctttgtgaatatgcgtgaaaattgtggcgagggcgtgcagacaaggaaggtgagatgcatgcaaaatacggctgatggcccatcagaacatgtcgaggactatctctgcgatcctgaggaaatgccactgggatcccgagtgtgcaaactgccttgtccagaagattgtgtaatctccgagtgggggccatggacacaatgcgtgctgccctgcaaccaaagctcttttcggcagcgttctgccgatcccataagacagcccgctgacgagggccgcagttgtcccaatgccgtcgaaaaggagccttgtaaccttaacaaaaactgttatcactatgattacaatgtgactgattggtctacttgtcaactgtcagagaaggcagtgtgcggaaatggaataaagactagaatgctggactgtgtccgatccgacgggaagtctgtcgacctcaagtattgtgaagcacttggcctcgagaagaactggcagatgaacaccagttgtatggtcgaatgccccgtcaactgtcagctgtcagactggagcccttggtccgagtgctcccagacctgtggtctgaccggcaagatgatacgtaggcgcacggtaacacaaccattccagggagacggtcgaccctgtccttcactgatggatcagagcaagccatgccctgtcaaaccatgttatcgctggcagtacggccagtggagcccatgtcaggtgcaggaagcccagtgcggcgaaggaactaggactcgtaatatcagctgcgtggtctccgacggtagtgccgacgattttagtaaggtggtggatgaggagttctgcgccgacatcgagctgatcatcgacggaaataagaatatggtgcttgaggaaagttgtagtcaaccctgcccaggcgattgctacttgaaagattggtcctcttggtcactgtgtcaacttacttgtgtaaatggagaggacctcggttttggaggcattcaggtaaggtccaggcccgttattatacaggagttggaaaaccagcatctctgtcctgagcagatgctagagactaaatcttgctatgatggtcagtgctatgaatacaagtggatggcttctgcttggaaaggctcgagcaggaccgtttggtgtcagcggagcgacggcattaacgtcaccggggggtgtctcgtgatgagccagcctgacgcggaccggtcgtgcaaccctccgtgcagtcagccccactcatactgctccgagaccaagacatgccactgtgaggaaggatatactgaggtgatgagttctaacagcactttggagcagtgtaccttgattcccgttgtggtgctgcctactatggaggataaaaggggcgatgtcaagaccagtcgggctgtccatcccactcagccatcttctaatccagccggccgaggcagaacttggtttctgcagcccttcggccccgacggccgactgaagacatgggtgtacggtgttgccgccggggcgtttgtgcttcttatttttattgtatccatgatttacctggcatgtaaaaagcccaagaagccccaacggcgtcaaaacaaccgattgaagccgctgaccctggcctatgacggggacgccgacatgtag

SEQ ID NO: 185174 - DNA, 4974 bp, Artificial Sequence
  derived and/or modified sequence
atgggcctgcaggcccggcggtgggccagcggcagccggggcgccgccggcccgcggcgcggcgtcctgcaattgcttccactaccactacctctgccgctcctgctcttattgctgctgagacctggtgctggcagagccgcagcgcaaggcgaagcagaggcaccaacactttacctttggaagacgggaccctggggtaggtgcatgggagacgagtgtggccctggcggaatccagacacgagcagtatggtgtgctcatgtggagggatggacaacattgcatacaaattgcaagcaagccgagaggcccaataatcagcaaaattgcttcaaggtgtgcgactggcacaaagagttatatgactggcggttgggcccttggaaccaatgtcaacccgtgatctcaaagtctttagagaaaccgttagagtgcatcaagggcgaggaaggcatccaggttcgtgaaattgcatgtatccaaaaagataaagacatcccagccgaggatatcatctgtgaatactttgagccaaagccactcctcgagcaagcgtgcttaataccatgccaacaggactgcatcgtttctgaattttccgcgtggtctgagtgctctaagacatgtggctcgggacttcagcatcgcaccaggcacgttgtcgcccctcctcagttcggcggctcaggctgccccaacctcactgaattccaagtgtgtcagagtagcccatgtgaggctgaggagcttagatactccctccatgtcgggccatggtccacctgcagcatgcctcactctcggcaggtccgacaagcaagaaggagggggaagaataaagagagggagaaagatcgatccaagggggtaaaagatcctgaggcccgagagcttattaaaaaaaaacggaaccggaacagacagaacagacaagaaaacaagtactgggacatccagatcgggtaccagacgcgagaggtgatgtgcattaataaaaccggcaaggctgcagatctatctttctgtcaacaggagaagcttcctatgactttccaatcctgcgtcataacaaaggagtgccaggtgtcggagtggagcgagtggtccccctgttctaaaacatgtcacgatatggtgtctcctgctgggaccagggtgcggactaggaccatccgccaattccctattggatccgagaaagaatgtcctgagttcgaagaaaaggagccgtgcctgtctcagggggacggcgtcgtcccctgtgccacctacggctggaggacaacagagtggaccgagtgccgggttgatcctttgctgagccagcaagataagcgtcgtggtaatcagaccgctttgtgcggtggtggtattcaaactcgggaagtgtactgcgtgcaggctaatgagaatttactgtctcaactctctactcacaaaaacaaggaggcttccaagccaatggacctaaagttgtgcactggccctattccaaacacgacccagctatgccacatcccatgtcccacagagtgcgaggtctctccgtggtcagcttggggcccgtgcacatatgaaaactgcaacgatcagcaagggaagaaagggtttaagctccgaaaacgccggatcacaaacgaacctacaggaggatccggcgtgacaggtaactgtcctcatctgctggaagcaatcccttgtgaagagccggcatgctacgactggaaagcggtgaggctaggtaattgcgagcctgataatggcaaagaatgtggccctggaacacaggtacaggaggtagtgtgtatcaattccgatggcgaggaagtggatcgtcagctgtgccgggacgcaattttccctatccctgtggcatgtgacgccccatgtcccaaggactgtgtactctcgacttggtcaacctggagttcctgtagtcacacatgctcaggcaaaactaccgaaggaaagcagatccgagccagaagtatcctcgcgtatgcgggggaggagggaggtattcggtgtcctaatagctcggcactacaggaggtaaggtcatgtaacgaacacccatgtaccgtatatcactggcaaactggtccttggggccagtgtatcgaagataccagtgtctccagtttcaatacgaccactacttggaatggcgaggcaagctgcagtgtgggaatgcagacccgaaaggtcatctgtgtaagagtaaacgttggccaagtcggtccgaaaaagtgccccgaatcattacgtccagaaacagtccggccgtgtttgctgccttgcaaaaaagactgcattgtaacaccatattccgactggacgagctgtcccagcagctgtaaggagggggatagttccatccgaaaacaaagtcggcaccgcgtgattattcagctgccagccaacggcggtagagactgcacggatccgttgtatgaggagaaggcttgtgaggccccgcaggcttgccaaagttatcgctggaagacccacaagtggagaaggtgccagttagtaccttggagcgtgcagcaggacagtcccggagcacaagaaggctgcggccccggtagacaggctagagcaattacttgtcgcaaacaagatggaggccaggccggtattcatgagtgcctgcagtatgcaggcccggtgccagccttaactcaggcatgccaaattccttgtcaagacgactgtcaattgaccagttggagcaaattttcatcctgcaacggcgactgtggtgccgtgcgcacccggaaaagaaccttagtgggaaagagtaaaaagaaggaaaaatgtaagaactcacatctctatccactgatcgaaacacagtactgtccctgcgataagtacaacgcccagcccgtcggcaactggtccgactgtatcctaccggagggcaaggtagaggtgctactcggaatgaaggtccagggtgatataaaagagtgtggtcaagggtatagataccaggccatggcgtgctacgatcaaaacggccggctggtcgagacatccagatgcaatagtcacgggtacatagaagaagcttgcattattccgtgcccctcagactgtaaattaagtgagtggtctaattggagtagatgctccaagagttgcggatctggcgtcaaggtacggagtaaatggctgcgggaaaagccatacaacggcggccgaccgtgccctaagctggaccacgtgaaccaggcccaggtgtatgaggtcgttccatgtcattccgactgcaaccagtatctgtgggtgactgagccctggagcatatgcaaagttacgttcgtgaacatgcgggagaactgtggggagggtgtgcaaacaagaaaggttcgttgcatgcaaaatactgccgacggcccttcggagcacgttgaggattatctgtgtgatccagaggaaatgccccttggaagcagggtctgcaaactgccctgtcctgaagactgtgtgatcagcgagtgggggccttggactcagtgtgtgctaccctgtaatcagtcctcctttcgccagcggagcgctgaccccatcagacagccggccgacgaaggaaggagctgcccaaatgccgtggagaaggagccctgcaatctgaacaaaaattgctaccactatgactataatgtcaccgactggtctacctgtcagttgtctgagaaggccgtgtgcggtaacggcattaagacaaggatgctggattgtgtgagatcggacggaaaaagtgttgacctcaaatattgcgaggccctagggctggagaaaaattggcaaatgaatacttcctgtatggtcgaatgtccagtcaattgtcaactgtcagactggtctccctggtctgaatgctcacaaacttgcggactcacaggaaaaatgatccgacggcgtaccgtgactcaaccctttcagggtgatgggcggccctgccccagcttgatggatcagagcaagccttgtcccgtgaagccatgttaccggtggcagtacgggcagtggtctccttgtcaggtgcaggaagcccagtgcggagaggggacgagaacaaggaacatctcctgcgtcgtcagtgatggttccgccgacgatttcagtaaagtggttgatgaggaattttgcgccgacatagagctcatcattgacggaaacaagaatatggtgctggaggaaagctgttcccagccgtgcccaggtgactgctatctgaaggactggagctcctggtccttgtgccaactgacgtgcgtcaatggagaggacttagggttcggcgggattcaggtccgttcacggcccgtcatcattcaggaactcgagaaccagcatctgtgtccagaacaaatgctggaaacgaaaagttgctacgatgggcagtgttacgaatataaatggatggcgagcgcctggaaagggtcatcaaggacagtctggtgccagcgaagcgacggtataaacgtgaccggtggctgcctagtgatgagtcagcctgacgctgatagatcctgcaacccgccatgtagccaacctcattcctactgctctgaaactaagacttgtcattgtgaagaagggtacactgaggttatgtccagtaactctacattggagcaatgcactttgatcccagtggtggttctcccgactatggaagacaaacgcggtgacgtaaaaacgtccagggctgtgcatcctacacagccctccagcaaccctgcaggaaggggtcggacatggtttctgcaaccatttggaccggacggaaggctaaaaacttgggtgtacggagtcgcggccggcgcctttgttctgctgatttttatcgtgtctatgatttacctggcttgcaagaagccgaaaaagcctcagaggcgtcagaataacaggctgaagcctctgacactggcctatgatggcgacgccgatatgtag

SEQ ID NO: 185175 - DNA, 4974 bp, Artificial Sequence
  derived and/or modified sequence
atgggactgcaggcaaggcgatgggcctcagggagccgtggcgcagccggtccgaggcgtggcgttctgcagctgctcccactacccctgcccctgcccctgctgctgttgctcctgctgcgaccaggagcagggagagccgctgcacagggggaggctgaagcacctaccctttatctctggaaaaccgggccatggggcaggtgcatgggcgatgaatgtgggcctggcggtatccagacacgggctgtctggtgcgcacatgttgagggttggacgactctgcacacaaactgcaaacaggccgagcggcctaataatcagcagaactgtttcaaagtgtgtgattggcacaaggagctgtacgactggaggcttggcccatggaaccaatgccagcccgtcatcagcaaaagcttagagaagcctctggagtgtattaagggggaggaaggtatacaagtgagggagattgcttgtatacagaaagataaggacattccagccgaggatatcatatgcgaatatttcgagcccaaacccctgctggagcaggcctgtctgattccttgccaacaggactgtattgtcagcgagttcagtgcttggtccgagtgctccaagacttgtggatctggtttgcaacataggacccgccatgtggtggcgcctccacaatttggcggaagcggatgtcctaacctaactgagttccaggtgtgccagagcagcccttgcgaggccgaggagctgcgatatagcttacatgtcggcccatggtcaacatgctccatgcctcactctcggcaggtacggcaagctcggagacgcggtaagaacaaagagagggaaaaagatcgatctaagggcgtgaaagaccctgaggccagggaactgatcaaaaagaagcgcaatcgaaatcggcagaaccggcaggaaaataaatactgggacatccagatcgggtatcagacaagggaggtaatgtgtattaataagaccggcaaggcagctgacttgagcttttgccagcaggagaaactgcccatgacctttcagagctgtgttatcacaaaggagtgccaggtgtccgagtggtctgaatggtctccatgttctaagacatgtcacgacatggtttcccctgccggaacaagggtgcgcacacggacaataaggcaatttcctatcggctcagagaaggagtgccccgagtttgaagagaaggaaccttgtctctctcagggcgatggggtagtgccctgtgcgacttatggatggcgcacaacggagtggaccgagtgcagagtggaccctctgctaagccaacaggataagagacggggaaatcaaactgcactatgtggtggaggaatccagaccagagaggtgtactgtgtgcaggctaatgagaatttgcttagccagctgtccactcataaaaataaagaggccagtaagccaatggatctcaagctgtgcacaggccctattcctaacacaacacagctgtgtcacattccttgcccgactgaatgtgaggttagtccgtggtctgcctggggaccttgcacctatgagaattgtaatgaccagcaagggaagaagggtttcaagctccgtaagagacgcattaccaatgagcccacagggggaagcggagtgaccggaaactgcccccatctactggaagctattccttgtgaggagccagcttgttatgattggaaggccgtgagactgggcaactgcgaacctgacaacgggaaagagtgcgggccagggactcaggtgcaggaagttgtgtgcattaatagtgacggcgaggaggtagaccgtcagctctgccgcgacgccatcttcccgatcccagtcgcctgtgacgcaccttgcccgaaggattgtgtgctcagcacgtggtccacgtggtctagctgttcccacacctgttcaggtaaaaccaccgaaggcaaacagattcgtgcacgtagcatcctggcctatgctggagaggaagggggaattcggtgtccgaatagttcagcgctgcaggaggtgagatcctgcaatgagcacccatgcacagtgtatcactggcagacaggtccctggggccagtgtatcgaggacacatccgtctccagttttaacaccacaactacctggaacggtgaggcatcttgtagtgtgggaatgcaaacccggaaggtgatctgtgtccgcgttaatgttgggcaagtgggaccaaagaaatgtccggagagcctacgcccagagacagtgcgaccttgcttgctgccatgtaaaaaggactgcatcgtgacaccctactctgactggacgtcctgtcccagcagctgtaaggagggagacagtagcatacgcaagcagtctaggcaccgggtgatcatacagttacctgctaacggtggcagagattgtaccgacccgttatatgaagagaaagcttgtgaggcgcctcaggcttgccagtcatacagatggaaaacccataagtggcggcgttgccagctggttccatggtctgtgcagcaagattcaccgggtgctcaggagggctgtggtcctggacgccaagcccgagcaattacatgtaggaaacaggacgggggacaggcaggtatacatgagtgtctgcaatatgcagggccagttccggcattgacacaggcgtgtcaaatcccctgtcaagatgattgtcagctcacttcatggtccaagttctcctcgtgcaatggggattgcggagccgtgagaacaaggaaaagaacactggtgggcaagagcaagaagaaggaaaaatgcaaaaactcgcacctttatcccctcattgaaacacagtactgtccatgtgacaaatataatgcgcagccggtggggaattggtccgattgtattctcccagaggggaaggtcgaggtcctcctgggcatgaaggttcaaggggacattaaagaatgcgggcaggggtatcggtatcaggctatggcttgctacgatcagaacgggagactcgttgagacttcccggtgtaattcccacggctacatcgaggaggcatgtatcatcccctgtccaagtgattgtaaactttctgaatggtccaactggtctaggtgcagtaagtcctgtgggagcggggtgaaggttcggtctaaatggctgagagaaaagccatataatggcggacgaccatgtccaaagttggaccacgtcaaccaattccaagtctacgaggtagtcccgtgccacagcgattgcaaccagtacctgtgggtgacagagccctggagcatctgcaaggtgacattcgttaacatgagagagaactgcggcgaaggagtccagaccaggaaggttaggtgtatgcagaatacggccgatgggccatccgagcatgtggaagactatctatgcgacccggaagagatgcctctaggttcccgcgtttgcaaacttccatgccccgaggattgcgtgattagtgaatggggcccttggacacaatgtgtgctgccatgcaaccaaagcagctttcgccagagaagcgctgatcctattagacagccagctgatgagggtcggagctgccctaacgccgtagaaaaagagccctgtaaccttaataaaaattgctaccactatgactataatgtgacagactggagcacttgtcagctaagcgagaaagccgtctgtgggaacgggatcaaaacccggatgttggactgtgtgagaagcgatggaaagtccgtagacctgaaatactgcgaggctcttgggttagaaaaaaactggcagatgaatacatcatgcatggtagagtgccccgtgaattgccaactaagtgactggtccccctggtccgagtgctcccagacatgcggcctgaccggcaagatgattcggaggcgaaccgtcacccagcctttccagggggacgggaggccctgtccttccctcatggaccagagtaagccttgcccggtcaaaccttgctataggtggcagtacggccagtggtctccctgtcaagtacaggaagcccaatgtggggaaggaacaaggacaaggaatataagctgtgtagtatctgacggctctgccgatgacttctccaaggttgtagacgaggagttctgcgctgatattgagctgatcattgacggaaacaaaaacatggtgctggaggaatcatgtagccagccctgccctggcgattgttacctcaaggactggtcctcttggtccctgtgccaactgacctgtgttaatggggaggaccttggtttcggcggaatccaagtgaggtcccgtcctgtgatcattcaggagctggagaatcagcacctctgtccagaacagatgctggagaccaaaagttgttatgacggacagtgttatgagtataagtggatggcttcggcctggaagggcagctcaaggacagtgtggtgccagcggtccgacggcatcaacgtgactggcggttgtctggtgatgtctcagccagatgctgatcgctcctgcaaccccccttgttcacagcctcattcttattgcagtgagactaagacctgtcactgcgaagagggatatacagaggtgatgtcaagtaactcgaccctcgagcaatgtactctaatccctgtggtggtgctgcctactatggaagataaacggggagatgtgaagaccagtcgcgctgtgcacccaactcagccctcctcgaatccagccggtcgcggaaggacatggtttcttcagccgttcggaccagatggcagactcaagacttgggtttacggagtggcagccggtgcattcgtcctccttattttcatcgtctcaatgatttatcttgcatgtaaaaaaccgaagaagccacagcgacgccaaaataaccggctgaagcctttgacactcgcctacgatggagatgccgacatgtag

SEQ ID NO: 185176 - DNA, 4973 bp, Artificial Sequence
  derived and/or modified sequence
atgggactgcaggcaagacgctgggcatctggctctcgtggagcagccggtccacggagaggcgttctgcagcttttgccactgcccctgcctctgcctctactactcctgttgctgctccgccctggagccggacgggcagcagcccaaggggaggcagaggcccctacattatacctctggaaaaccggaccttggggaaggtgtatgggggacgagtgtggtccaggcggaatccagacgcgagccgtgtggtgcgctcacgtggagggatggaccacactacacaccaactgcaagcaggctgaacggccaaacaatcagcagaactgctttaaagtgtgtgattggcacaaggaactgtacgattggcggctcgggccttggaatcagtgtcagccagtgattagcaagtccttagagaagccgttagagtgcattaagggcgaagagggtatacaggtgcgtgagattgcttgtatccagaaagacaaggatatacccgctgaagacattatttgcgagtattttgagcctaagccactgcttgaacaggcatgcctgatcccttgtcaacaagactgtattgtgagtgagtttagcgcttggtctgagtgttctaaaacatgtggctctggcttgcaacataggactcgccacgtggtggctccaccgcagtttggcggatcaggatgccccaacctgaccgaattccaagtgtgccagagttccccctgcgaagccgaggaactccggtattctctgcatgtcggcccatggagtacatgctccatgcctcatagccgccaagtccgtcaggccagaagaaggggaaagaacaaagagcgggagaaggacagatcaaagggcgtgaaggacccagaggctcgggaactgattaagaaaaaacgaaatcggaatcggcagaacagacaggaaaataaatactgggatatccaaatagggtatcaaacccgggaggtcatgtgtatcaataaaaccggaaaggctgccgatctttcgttctgccaacaggagaaactcccaatgacattccagtcctgcgttatcacaaaggagtgtcaggtgagtgaatggtctgaatggtctccctgctctaagacgtgccacgacatggtgagcccagccggaacgagggtgaggacacgaacaattcgccagtttcctatcgggtccgaaaaggaatgccccgagttcgaggaaaaggagccttgcctgagccagggagacggtgtggtgccatgcgccacgtacggatggcggaccacggagtggaccgagtgtcgggttgacccactcctgtcccagcaggacaagcggagaggcaatcaaaccgccctctgtggcggaggcattcagaccagggaggtgtattgcgttcaggcgaacgagaacctgctgagtcagctaagcacgcacaaaaataaggaagcttccaagccaatggatctgaaactctgtacaggcccaattccaaatactacccaattatgccatattccctgtcctacagagtgcgaggtctccccctggtcggcgtggggaccttgcacttacgagaattgtaacgatcagcagggtaagaagggctttaagctccgaaaaaggcgtattacaaatgagcctaccgggggtagtggggttacaggaaactgccctcacctgcttgaggccattccgtgcgaagagcctgcttgctacgattggaaggctgtgagactcggtaattgcgagcccgataacggaaaagaatgtggccctggaacccaggtccaggaggtggtatgcattaatagtgatggcgaagaggttgatcgccagctctgtcgagacgctattttcccaatcccagtagcgtgcgacgccccttgtcctaaggactgtgtgctgagtacctggtctacctggtcctcttgctctcatacgtgctctgggaaaaccaccgaggggaaacaaatcagggctagatctatcctcgcctatgcaggtgaggaggggggtatccggtgccccaacagctcagctctgcaggaagtgcgaagctgtaatgagcacccttgcactgtttaccactggcagaccggtccctggggacaatgtattgaggatacaagcgttagtagtttcaacaccacaactacatggaacggggaagcctcttgctcagtgggcatgcaaacaagaaaggtgatctgtgtgcgcgttaacgttggtcaggttggtccgaaaaagtgtccagagagcctccggccagagacagtgcggccatgcctgctgccctgtaaaaaggactgtatcgtgactccatacagtgactggactagctgtccctcctcctgcaaagagggcgacagttctataagaaagcagtcccgtcaccgagtcattattcagttgccagctaatggtggcagggactgcacagatcctttgtatgaggagaaggcatgtgaagcccctcaggcctgccagtcatacagatggaagacccacaagtggagacgatgccaactggtgccttggtctgtgcagcaggactctccaggagcccaggaaggatgtggtccagggcgtcaggcccgtgccattacttgccggaagcaggacggaggccaggccggaattcacgagtgtttgcagtacgccggtccagtgcccgcattaacccaggcttgtcaaatcccctgccaggatgactgccaactgacttcctggtctaagttttcgagttgcaacggagactgcggggctgttagaactagaaagaggacccttgtcggtaagtccaagaagaaagagaagtgtaagaacagccacctctatccccttatcgagacacagtattgcccttgtgacaaatacaacgcccaaccagtcggtaactggagtgactgtatactacctgagggaaaggtcgaggtgcttcttgggatgaaggtgcagggcgatataaaagaatgcgggcagggctataggtaccaagccatggcgtgttacgaccaaaacggcagactggttgagacatcccggtgcaatagtcacggctatattgaggaggcatgcatcatcccatgtccttccgattgcaaactgtctgagtggagcaattggtctagatgttccaaatcatgtggaagtggagtcaaggtcagaagcaagtggctgagagaaaagccctataatggcggacgcccttgccccaagctcgatcatgtgaaccaggcccaggtctatgaggtggtgccctgtcattccgactgcaaccagtacctctgggtcaccgagccttggagcatatgtaaggtcactttcgttaatatgagggagaactgcggtgagggcgttcagacgaggaaagtgcggtgtatgcagaacaccgccgatggaccttcagagcatgtggaagactacctttgcgatcccgaagagatgcctctgggcagccgcgtctgcaagctcccatgccccgaggactgtgtaatcagtgagtggggaccctggacacagtgtgtgctgccctgcaaccagtcgagcttccggcagcggagtgccgacccaatccggcagcccgctgacgaaggaagaagctgtcccaacgccgtcgagaaagaaccttgcaacctgaataaaaactgctaccactacgattacaacgtgactgactggtccacatgtcagctcagcgagaaagccgtatgtggaaatggtatcaaaaccagaatgctggactgcgttcgttccgatggtaaatctgtggatttaaagtattgcgaagccctgggtctcgagaagaattggcagatgaatactagctgtatggtggagtgtccggtcaactgccagcttagcgattggagcccatggagcgaatgtagccagacctgcggattaactgggaagatgatcaggcggaggaccgtgacccaacccttccaaggcgacggcagaccctgcccctccttgatggatcagagcaaaccctgtccagtgaaaccttgctacagatggcagtatggacagtggtctccctgccaggtacaggaggcacagtgcggtgaaggaacacgcactaggaatatcagctgcgtggtttcagacggcagcgcagacgattttagtaaagtcgttgacgaggagttttgtgcagatatcgagctaattattgacggtaacaaaaacatggtgctggaggagtcctgttcacagccatgccccggagattgctacctgaaagattggtctagctggtccctgtgtcagctgacttgcgtgaacggtgaggacctgggattcgggggaatccaggtgcgttctcgtcccgtcatcattcaggagctggaaaaccaacacctatgcccagaacaaatgcttgagaccaagtcgtgttatgatggtcagtgctatgagtacaagtggatggccagcgcctggaaggggagtagccggaccgtctggtgccagcgatcagacgggatcaatgtcacaggtggttgcctggtaatgagccagcctgatgccgaccgctcctgtaatcctccctgctcccaaccacacagctactgctcggagactaagacctgtcattgcgaagagggctataccgaagtcatgagctctaacagtacattggagcagtgtaccctgattcctgttgtggtgctcccaactatggaggacaaacggggagacgtcaaaacatctcgtgcagtacacccaacgcagccttcatctaatccagccggtagaggacggacctggttcctccagccatttggtccagacggcaggcttaagacctgggtatatggagtcgcagctggggctttcgtgctcctcatcttcatcgtcagcatgatctatttggcttgtaagaaacctaaaaaaccccagcgcagacagaacaatcgcctcaaaccgctgacactggcatacgatggcgatgccgatatgta

SEQ ID NO: 185177 - DNA, 10583 bp, Artificial Sequence
  derived and/or modified sequence
attctgcgaggaatggcagcggcagcagcatccccgccagaggcggcggcggcggcggcagcggccacggccaccaccgcggacgctattgttccctggtgttagacgcgctctccctccttctcatctgaagcgaacaatagcaggaaagagctttgctttctgtactctttgaaaagacgttccaagagcggagaaaaattccctgccgagcgtgctacggctctggaccctggagtggctgcaggcggcatggggctgcaagccaggcgctgggcgtccgggagccggggcgctgcggggccgcgccggggcgtcctgcagctgctgccgctgccgctgccgctgccgctgctcctgctgctgctgctacgcccgggcgccggcagggctgcggcgcagggcgaggcggaggcgcccaccctctatctgtggaagactggtccatggggccgatgtatgggagatgaatgtggtcccggaggcatccaaacgagggctgtgtggtgtgctcatgtggagggatggactacactgcatactaactgtaagcaggccgagagacccaataaccagcagaattgtttcaaagtttgcgattggcacaaagagttgtacgactggagactgggaccttggaatcagtgtcagcccgtgatttcaaaaagcctagagaaacctcttgagtgcattaagggggaagaaggtattcaggtgagggagatagcgtgcatccagaaagacaaagacattcctgcggaggatatcatctgtgagtactttgagcccaagcctctcctggagcaggcttgcctcattccttgccagcaagattgcatcgtgtctgaattttctgcctggtccgaatgctccaagacctgcggcagcgggctccagcaccggacgcgtcatgtggtggcgcccccgcagttcggaggctctggctgtccaaacctgacggagttccaggtgtgccaatccagtccatgcgaggccgaggagctcaggtacagcctgcatgtggggccctggagcacctgctcaatgccccactcccgacaagtaagacaagcaaggagacgcgggaagaataaagaacgggaaaaggaccgcagcaaaggagtaaaggatccagaagcccgcgagcttattaagaaaaagagaaacagaaacaggcagaacagacaagagaacaaatattgggacatccagattggatatcagaccagagaggttatgtgcattaacaagacggggaaagctgctgatttaagcttttgccagcaagagaagcttccaatgaccttccagtcctgtgtgatcaccaaagagtgccaggtttccgagtggtcagagtggagcccctgctcaaaaacatgccatgacatggtgtcccctgcaggcactcgtgtaaggacacgaaccatcaggcagtttcccattggcagtgaaaaggagtgtccagaatttgaagaaaaagaaccctgtttgtctcaaggagatggagttgtcccctgtgccacgtatggctggagaactacagagtggactgagtgccgtgtggaccctttgctcagtcagcaggacaagaggcgcggcaaccagacggccctctgtggagggggcatccagacccgagaggtgtactgcgtgcaggccaacgaaaacctcctctcacaattaagtacccacaagaacaaagaagcctcaaagccaatggacttaaaattatgcactggacctatccctaatactacacagctgtgccacattccttgtccaactgaatgtgaagtttcaccttggtcagcttggggaccttgtacttatgaaaactgtaatgatcagcaagggaaaaaaggcttcaaactgaggaagcggcgcattaccaatgagcccactggaggctctggggtaaccggaaactgccctcacttactggaagccattccctgtgaagagcctgcctgttatgactggaaagcagtgagactgggaaactgcgagccagataacggaaaggagtgtggtccaggcacgcaagttcaagaggttgtgtgcatcaacagtgatggagaagaagttgacagacagctgtgcagagatgccatcttccccatccctgtggcctgtgatgccccatgcccgaaagactgtgtgctcagcacatggtctacgtggtcctcctgctcacacacctgctcagggaaaacgacagaagggaaacagatacgagcacgatccattctggcctatgcgggtgaagaaggtggaattcgctgtccaaatagcagtgctttgcaagaagtacgaagctgtaatgagcatccttgcacagtgtaccactggcaaactggtccctggggccagtgcattgaggacacctcagtatcgtccttcaacacaactacgacttggaatggggaggcctcctgctctgtcggcatgcagacaagaaaagtcatctgtgtgcgagtcaatgtgggccaagtgggacccaaaaaatgtcctgaaagccttcgacctgaaactgtaaggccttgtctgcttccttgtaagaaggactgtattgtgaccccatatagtgactggacatcatgcccctcttcgtgtaaagaaggggactccagtatcaggaagcagtctaggcatcgggtcatcattcagctgccagccaacgggggccgagactgcacagatcccctctatgaagagaaggcctgtgaggcacctcaagcgtgccaaagctacaggtggaagactcacaaatggcgcagatgccaattagtcccttggagcgtgcaacaagacagccctggagcacaggaaggctgtgggcctgggcgacaggcaagagccattacttgtcgcaagcaagatggaggacaggctggaatccatgagtgcctacagtatgcaggccctgtgccagcccttacccaggcctgccagatcccctgccaggatgactgtcaattgaccagctggtccaagttttcttcatgcaatggagactgtggtgcagttaggaccagaaagcgcactcttgttggaaaaagtaaaaagaaggaaaaatgtaaaaattcccatttgtatcccctgattgagactcagtattgtccttgtgacaaatataatgcacaacctgtggggaactggtcagactgtattttaccagagggaaaagtggaagtgttgctgggaatgaaagtacaaggagacatcaaggaatgcggacaaggatatcgttaccaagcaatggcatgctacgatcaaaatggcaggcttgtggaaacatctagatgtaacagccatggttacattgaggaggcctgcatcatcccctgcccctcagactgcaagctcagtgagtggtccaactggtcgcgctgcagcaagtcctgtgggagtggtgtgaaggttcgttctaaatggctgcgtgaaaaaccatataatggaggaaggccttgccccaaactggaccatgtcaaccagtttcaggtgtatgaggttgtcccatgccacagtgactgcaaccagtacctatgggtcacagagccctggagcatctgcaaggtgacctttgtgaatatgcgggagaactgtggagagggcgtgcaaacccgaaaagtgagatgcatgcagaatacagcagatggcccttctgaacatgtagaggattacctctgtgacccagaagagatgcccctgggctctagagtgtgcaaattaccatgccctgaggactgtgtgatatctgaatggggtccatggacccaatgtgttttgccttgcaatcaaagcagtttccggcaaaggtcagctgatcccatcagacaaccagctgatgaaggaagatcttgccctaatgctgttgagaaagaaccctgtaacctgaacaaaaactgctaccactatgattataatgtaacagactggagtacatgtcagctgagtgagaaggcagtttgtggaaatggaataaaaacaaggatgttggattgtgttcgaagtgatggcaagtcagttgacctgaaatattgtgaagcgcttggcttggagaagaactggcagatgaacacgtcctgcatggtggaatgccctgtgaactgtcagctttctgattggtctccttggtcagaatgttctcaaacatgtggcctcacaggaaaaatgatccgaagacgaacagtgacccagccctttcaaggtgatggaagaccatgcccttccctgatggaccagtccaaaccctgcccagtgaagccttgttatcggtggcaatatggccagtggtctccatgccaagtgcaggaggcccagtgtggagaagggaccagaacaaggaacatttcttgtgtagtaagtgatgggtcagctgatgatttcagcaaagtggtggatgaggaattctgtgctgacattgaactcattatagatggtaataaaaatatggttctggaggaatcctgcagccagccttgcccaggtgactgttatttgaaggactggtcttcctggagcctgtgtcagctgacctgtgtgaatggtgaggatctaggctttggtggaatacaggtcagatccagaccggtgattatacaagaactagagaatcagcatctgtgcccagagcagatgttagaaacaaaatcatgttatgatggacagtgctatgaatataaatggatggccagtgcttggaagggctcttcccgaacagtgtggtgtcaaaggtcagatggtataaatgtaacagggggctgcttggtgatgagccagcctgatgccgacaggtcttgtaacccaccgtgtagtcaaccccactcgtactgtagcgagacaaaaacatgccattgtgaagaagggtacactgaagtcatgtcttctaacagcacccttgagcaatgcacacttatccccgtggtggtattacccaccatggaggacaaaagaggagatgtgaaaaccagtcgggctgtacatccaacccaaccctccagtaacccagcaggacggggaaggacctggtttctacagccatttgggccagatgggagactaaagacctgggtttacggtgtagcagctggggcatttgtgttactcatctttattgtctccatgatttatctagcttgcaaaaagccaaagaaaccccaaagaaggcaaaacaaccgactgaaacctttaaccttagcctatgatggagatgccgacatgtaacatataacttttcctggcaacaaccagtttcggctttctgacttcatagatgtccagaggccacaacaaatgtatccaaactgtgtggattaaaatatattttaatttttaaaaatggcatcataaagacaagagtgaaaatcatactgccactggagatatttaagacagtaccacttatatacagaccatcaaccgtgagaattataggagatttagctgaatacatgctgcattctgaaagttttatgtcatcttttctgaaatctaccgactgaaaaaccactttcatctctaaaaaataatggtggaattggccagttaggatgcctgatacaagaccgtctgcagtgttaatccataaaacttcctagcatgaagagtttctaccaagatctccacaatactatggtcaaattaacatgtgtactcagttgaatgacacacattatgtcagattatgtacttgctaataagcaattttaacaatgcataacaaataaactctaagctaagcagaaaatccactgaataaattcagcatcttggtggtcgatggtagattttattgacctgcatttcagagacaaagcctcttttttaagacttcttgtctctctccaaagtaagaatgctggacaagtactagtgtcttagaagaacgagtcctcaagttcagtattttatagtggtaattgtctggaaaactaatttacttgtgttaatacaatacgtttctactttccctgattttcaaactggttgcctgcatcttttttgctatatggaaggcacatttttgcactatattagtgcagcacgataggcgcttaaccagtattgccatagaaactgcctcttttcatgtgggatgaagacatctgtgccaagagtggcatgaagacatttgcaagttcttgtatcctgaagagagtaaagttcagtttggatggcagcaagatgaaatcagctattacacctgctgtacacacacttcctcatcactgcagccattgtgaaattgacaacatggcggtaatttaagtgttgaagtccctaaccccttaaccctctaaaaggtggattcctctagttggtttgtaattgttctttgaaggctgtttatgactagatttttatatttgttatctttgttaagaaaaaaaaagaaaaaggaactggatgtctttttaattttgagcagatggagaaaataaataatgtatcaatgacctttgtaactaaaggaaatcaaaattatatgttgatttttctttctctctgatttcccagtttcagattgaatgtctgtcttgcaggcagttatttcaaaatccatagtcttttgcctttctcactggcaaaatttgaagcaatctctctcttcaatgtatgatttcaaaactaaaattttaaaagagaagaataaatatcttatccaagacttcattgcatatctagagcaagagtggcaaactttttctgtaaaggactatatagaaaatattttccacaaggtctatgttgcaacttctcaactttgccattctgctaatgcaatcttagtaaataaaagaatgaacataactgttttcctatataacttcccttacaaaaacagccagtaggccacctttgcaggtcatattttgctgacccctggtctggatgttttttaatgctagctctccatggtgtcatctttcgttttcattcatttttcaaaggtgagaatttacagtcattacatttcccactgtatcagaagtagctgtattttctacagatgtagccctgggaatggcacagtggaacaatatttaactaactcagcagacttcttgcaaatgaaaagaaaactcaaaaggtgccattaaaaagcaataccattttcaggcaacattattgcaacaacctttgtgagagaggacactagcttttcaggatatttgaaaaataatataactaacatgctattttatcttaaacagctgtgttcctgtaaaagtgttttggattagaaggtatttttaccttcatactggagtatgaactccccctgctgttcattagagtatttgcaaagattacaaaagacatcaggttaggatgtcattgtccccaaaatgaaaatatttgtatgtatttcaataagaactaaatgcagtaagcgctaattcctcattcaatattcactatattaggaaatgtaaatcatttcaaagagaacaggtagtcaggaagatgaaaattttactttaaagcaaggatttaaacaaagaaaaccataaaaacaaagtccattttatctgttttattaaagaggaagaaaaaataatattgttactttaaaactgtgattgtcaatatatataatcaggggtcttccagataatcctaaagttgatctctttgaataaaataaactccatttgtccaaaatagttaagaaagactctattgtggttacttgaaaaattcagctaaccctcttatgaaatgtgtgcaacacctattaattttgaaatgtgggatagaatacctactaaagctatatttaaggtattgtaaaatgtcattaattcagaaaagattagtatcatcctacctataagaattaaattagcaaatcaaaattatagaatgttatgaaaaatacattttattcataaattaattagattttacagcatatatgcatgcatatatatatatacacacacacacacacacacccatatatatgagagagaggaaattaggttcaacatgacctaatattagagaacatattggaaggtcactgtttgttaggataaataaatactggataacctcgttagaaaggtggaaagaggagaacgtagcaatctggctattttggacaaagggaaggttattatattcatgtttataacatgaaaatggccttatttttgtttctgacatgagacaataatgagttaaatattttattggaatttcatcaaaaccttatttttactgttccttctaaaaatttgggaggggaatatagtagtaacttctctattgacacttttacctcaccgagggggtaaaagatgtagaactgctgttccctagaatgaaggtctgttgtttggtttttaaaaaaagaagagcagaaaaagtttgacacagtattatatgattttgctggactatttcactagaaaccacgtagaataggactaactgatctcttttgaaaggggctgatttgcttattcatcaataactaatccaatatgtggacagtaatcttaatttcaaagccttttttgaggatactacggtgtagcttaagtgaatttaaaaagagtgcataaaagcttgtttttaattacttataacaaagcacaaattacttctaacaaggcaaatatttattgacatataagacattctgctaggcattgtaaaaaaaaaaaaaaaagtaatggcttttgtatacataggtacttaagacagacatccaaaagaaggaaaaaatgcttaatgagtgaagatagcactgaaacatgttgacttttactctaggtttgtttttagatggggttagtattttcccctacgtaatgtacatgtctttaggccacagtattaggagtttgatttttccctgccccaccctcaggtaggtggcagtggtcattgtagcttaatcagacccctgttaagttcctgggcatttcaaggtaaattcacgtcttccttctcacagaaattgaatagacctctcacacacttatttacctcccccaacaacctgtatccttggccctttctgattttctctgcttggtctctttctactcttgacagctattcttacctacttcccactaaacatgcccaattttttaattaaaaaaaaaagaattcctatatttccttccctattagaatcaaagtgtcactcactcagagtgtgaacatcctgatttacaccaaatccactggtcaaagaaatgaataaagggaaaaggaaaaatgtggaaggcatgcaggaaaaaaaaaaaaaaaaaagcccttttctgtaaaaatgtccatgcctacacttgctttagaccatcccatatcctcctgcctccatctcgagtctttgttcacattccacaccacaagacagtgagggaggactgtacttttcagtaccatacagaagggagagcctgttctaaagctgacgtgggtctcaatagtacatgagaagcacaattcccaaatgatctgggatctcctgtttataaatatattaccaaattcaagtgtgggttcttcttctatttccactgtaagattgagggtgttgaaaaaacagtagtccttgagcaaatctgtgaggaatcttgtcagaatgtgatctttcctgggactagtttagttgtgagaactacatctgcttgttctgggaataagggtctccccaggtcctgccctcaggtggccctggctgcaggacaggatttcaggtatcagaaactggtgtgtgagccaagcaaatagttatccatttataaaaaggatggtttgcagtgtgttataataattttatatctagcagggacaatgaaaaatggttatgtctacattattaaatgaatgaaactaatgctaaacagttaattttgcatttttatttttctgtgtttctaccaagtcagatcttaaaaatgggcagtatatgaagagctttagtttgtgggagtcatgttttcagtgatcaaaaatctctatattatttagaatataattgtcagtcttgttgtgttttgtagatttattgtttttaagccatagtttctagattacctacttttaaccctcaagtaaacttttccctatttttcagaaatctgtttgtgtttatttttagaaagtaaacatttagattccttttctggtactttttttctccatttctatcacacagatttgaagagatcagtatctatcattgtaaaatataactttattaaaatttgcaatctgtctttctataaattattattccctaaatgtgtattttatgttaatttaactacctgaatatttattttgtttaaataaggaggcagctgtctaagaatttttgttaatattactttgtaaattgcgtaatgtaatttattttacattatgtacatttcctttttaacgcacaaaatgtctatgtacaattaactacagatttgcaaataatgtcactaagctttattcagtcaatacagatggcatgtgaagatgtaatatgcttttttacattttcatatgggttatttgtaaataactatattgctgacaaacataaatacggaaatcattttcattct

SEQ ID NO: 185178 - DNA, 6477 bp, Artificial Sequence
  derived and/or modified sequence
attctgcgaggaatggcagcggcagcagcatccccgccagaggcggcggcggcggcggcagcggccacggccaccaccgcggacgctattgttccctggtgttagacgcgctctccctccttctcatctgaagcgaacaatagcaggaaagagctttgctttctgtactctttgaaaagacgttccaagagcggagaaaaattccctgccgagcgtgctacggctctggaccctggagtggctgcaggcggcatggggctgcaagccaggcgctgggcgtccgggagccggggcgctgcggggccgcgccggggcgtcctgcagctgctgccgctgccgctgccgctgccgctgctcctgctgctgctgctacgcccgggcgccggcagggctgcggcgcagggcgaggcggaggcgcccaccctctatctgtggaagactggtccatggggccgatgtatgggagatgaatgtggtcccggaggcatccaaacgagggctgtgtggtgtgctcatgtggagggatggactacactgcatactaactgtaagcaggccgagagacccaataaccagcagaattgtttcaaagtttgcgattggcacaaagagttgtacgactggagactgggaccttggaatcagtgtcagcccgtgatttcaaaaagcctagagaaacctcttgagtgcattaagggggaagaaggtattcaggtgagggagatagcgtgcatccagaaagacaaagacattcctgcggaggatatcatctgtgagtactttgagcccaagcctctcctggagcaggcttgcctcattccttgccagcaagattgcatcgtgtctgaattttctgcctggtccgaatgctccaagacctgcggcagcgggctccagcaccggacgcgtcatgtggtggcgcccccgcagttcggaggctctggctgtccaaacctgacggagttccaggtgtgccaatccagtccatgcgaggccgaggagctcaggtacagcctgcatgtggggccctggagcacctgctcaatgccccactcccgacaagtaagacaagcaaggagacgcgggaagaataaagaacgggaaaaggaccgcagcaaaggagtaaaggatccagaagcccgcgagcttattaagaaaaagagaaacagaaacaggcagaacagacaagagaacaaatattgggacatccagattggatatcagaccagagaggttatgtgcattaacaagacggggaaagctgctgatttaagcttttgccagcaagagaagcttccaatgaccttccagtcctgtgtgatcaccaaagagtgccaggtttccgagtggtcagagtggagcccctgctcaaaaacatgccatgacatggtgtcccctgcaggcactcgtgtaaggacacgaaccatcaggcagtttcccattggcagtgaaaaggagtgtccagaatttgaagaaaaagaaccctgtttgtctcaaggagatggagttgtcccctgtgccacgtatggctggagaactacagagtggactgagtgccgtgtggaccctttgctcagtcagcaggacaagaggcgcggcaaccagacggccctctgtggagggggcatccagacccgagaggtgtactgcgtgcaggccaacgaaaacctcctctcacaattaagtacccacaagaacaaagaagcctcaaagccaatggacttaaaattatgcactggacctatccctaatactacacagctgtgccacattccttgtccaactgaatgtgaagtttcaccttggtcagcttggggaccttgtacttatgaaaactgtaatgatcagcaagggaaaaaaggcttcaaactgaggaagcggcgcattaccaatgagcccactggaggctctggggtaaccggaaactgccctcacttactggaagccattccctgtgaagagcctgcctgttatgactggaaagcagtgagactgggaaactgcgagccagataacggaaaggagtgtggtccaggcacgcaagttcaagaggttgtgtgcatcaacagtgatggagaagaagttgacagacagctgtgcagagatgccatcttccccatccctgtggcctgtgatgccccatgcccgaaagactgtgtgctcagcacatggtctacgtggtcctcctgctcacacacctgctcagggaaaacgacagaagggaaacagatacgagcacgatccattctggcctatgcgggtgaagaaggtggaattcgctgtccaaatagcagtgctttgcaagaagtacgaagctgtaatgagcatccttgcacagtgtaccactggcaaactggtccctggggccagtgcattgaggacacctcagtatcgtccttcaacacaactacgacttggaatggggaggcctcctgctctgtcggcatgcagacaagaaaagtcatctgtgtgcgagtcaatgtgggccaagtgggacccaaaaaatgtcctgaaagccttcgacctgaaactgtaaggccttgtctgcttccttgtaagaaggactgtattgtgaccccatatagtgactggacatcatgcccctcttcgtgtaaagaaggggactccagtatcaggaagcagtctaggcatcgggtcatcattcagctgccagccaacgggggccgagactgcacagatcccctctatgaagagaaggcctgtgaggcacctcaagcgtgccaaagctacaggtggaagactcacaaatggcgcagatgccaattagtcccttggagcgtgcaacaagacagccctggagcacaggaaggctgtgggcctgggcgacaggcaagagccattacttgtcgcaagcaagatggaggacaggctggaatccatgagtgcctacagtatgcaggccctgtgccagcccttacccaggcctgccagatcccctgccaggatgactgtcaattgaccagctggtccaagttttcttcatgcaatggagactgtggtgcagttaggaccagaaagcgcactcttgttggaaaaagtaaaaagaaggaaaaatgtaaaaattcccatttgtatcccctgattgagactcagtattgtccttgtgacaaatataatgcacaacctgtggggaactggtcagactgtattttaccagagggaaaagtggaagtgttgctgggaatgaaagtacaaggagacatcaaggaatgcggacaaggatatcgttaccaagcaatggcatgctacgatcaaaatggcaggcttgtggaaacatctagatgtaacagccatggttacattgaggaggcctgcatcatcccctgcccctcagactgcaagctcagtgagtggtccaactggtcgcgctgcagcaagtcctgtgggagtggtgtgaaggttcgttctaaatggctgcgtgaaaaaccatataatggaggaaggccttgccccaaactggaccatgtcaaccaggcacaggtgtatgaggttgtcccatgccacagtgactgcaaccagtacctatgggtcacagagccctggagcatctgcaaggtgacctttgtgaatatgcgggagaactgtggagagggcgtgcaaacccgaaaagtgagatgcatgcagaatacagcagatggcccttctgaacatgtagaggattacctctgtgacccagaagagatgcccctgggctctagagtgtgcaaattaccatgccctgaggactgtgtgatatctgaatggggtccatggacccaatgtgttttgccttgcaatcaaagcagtttccggcaaaggtcagctgatcccatcagacaaccagctgatgaaggaagatcttgccctaatgctgttgagaaagaaccctgtaacctgaacaaaaactgctaccactatgattataatgtaacagactggagtacatgtcagctgagtgagaaggcagtttgtggaaatggaataaaaacaaggatgttggattgtgttcgaagtgatggcaagtcagttgacctgaaatattgtgaagcgcttggcttggagaagaactggcagatgaacacgtcctgcatggtggaatgccctgtgaactgtcagctttctgattggtctccttggtcagaatgttctcaaacatgtggcctcacaggaaaaatgatccgaagacgaacagtgacccagccctttcaaggtgatggaagaccatgcccttccctgatggaccagtccaaaccctgcccagtgaagccttgttatcggtggcaatatggccagtggtctccatgccaagtgcaggaggcccagtgtggagaagggaccagaacaaggaacatttcttgtgtagtaagtgatgggtcagctgatgatttcagcaaagtggtggatgaggaattctgtgctgacattgaactcattatagatggtaataaaaatatggttctggaggaatcctgcagccagccttgcccaggtgactgttatttgaaggactggtcttcctggagcctgtgtcagctgacctgtgtgaatggtgaggatctaggctttggtggaatacaggtcagatccagaccggtgattatacaagaactagagaatcagcatctgtgcccagagcagatgttagaaacaaaatcatgttatgatggacagtgctatgaatataaatggatggccagtgcttggaagggctcttcccgaacagtgtggtgtcaaaggtcagatggtataaatgtaacagggggctgcttggtgatgagccagcctgatgccgacaggtcttgtaacccaccgtgtagtcaaccccactcgtactgtagcgagacaaaaacatgccattgtgaagaagggtacactgaagtcatgtcttctaacagcacccttgagcaatgcacacttatccccgtggtggtattacccaccatggaggacaaaagaggagatgtgaaaaccagtcgggctgtacatccaacccaaccctccagtaacccagcaggacggggaaggacctggtttctacagccatttgggccagatgggagactaaagacctgggtttacggtgtagcagctggggcatttgtgttactcatctttattgtctccatgatttatctagcttgcaaaaagccaaagaaaccccaaagaaggcaaaacaaccgactgaaacctttaaccttagcctatgatggagatgccgacatgtaacatataacttttcctggcaacaaccagtttcggctttctgacttcatagatgtccagaggccacaacaaatgtatccaaactgtgtggattaaaatatattttaatttttaaaaatggcatcataaagacaagagtgaaaatcatactgccactggagatatttaagacagtaccacttatatacagaccatcaaccgtgagaattataggagatttagctgaatacatgctgcattctgaaagttttatgtcatcttttctgaaatctaccgactgaaaaaccactttcatctctaaaaaataatggtggaattggccagttaggatgcctgatacaagaccgtctgcagtgttaatccataaaacttcctagcatgaagagtttctaccaagatctccacaatactatggtcaaattaacatgtgtactcagttgaatgacacacattatgtcagattatgtacttgctaataagcaattttaacaatgcataacaaataaactctaagctaagcagaaaatccactgaataaattcagcatcttggtggtcgatggtagattttattgacctgcatttcagagacaaagcctcttttttaagacttcttgtctctctccaaagtaagaatgctggacaagtactagtgtcttagaagaacgagtcctcaagttcagtattttatagtggtaattgtctggaaaactaatttacttgtgttaatacaatacgtttctactttccctgattttcaaactggttgcctgcatcttttttgctatatggaaggcacatttttgcactatattagtgcagcacgataggcgcttaaccagtattgccatagaaactgcctcttttcatgtgggatgaagacatctgtgccaagagtggcatgaagacatttgcaagttcttgtatcctgaagagagtaaagttcagtttggatggcagcaagatgaaatcagctattacacctgctgtacacacacttcctcatcactgcagccattgtgaaattgacaacatggcggtaatttaagtgttgaagtccctaaccccttaaccctctaaaaggtggattcctctagttggtttgtaattgttctttgaaggctgtttatgactagatttttatatttgttatctttgttaagaaaaaaaaagaaaaaggaactggatgtctttttaattttgagcagatggagaaaataaataatgtatcaatgacctttgtaactaaaggaaa

SEQ ID NO: 185179 - protein, 1134 aa, Artificial Sequence
  derived and/or modified sequence
MDCSLVRTLVHRYCAGEENWVDSRTIYVGHREPPPGAEAYIPQRYPDNRIVSSKYTFWNFIPKNLFEQFRRVANFYFLIIFLVQLIIDTPTSPVTSGLPLFFVITVTAIKQGYEDWLRHKADNAMNQCPVHFIQHGKLVRKQSRKLRVGDIVMVKEDETFPCDLIFLSSNRGDGTCHVTTASLDGESSHKTHYAVQDTKGFHTEEDIGGLHATIECEQPQPDLYKFVGRINVYSDLNDPVVRPLGSENLLLRGATLKNTEKIFGVAIYTGMETKMALNYQSKSQKRSAVEKSMNAFLIVYLCILISKALINTVLKYMWQSEPFRDEPWYNQKTESERQRNLFLKAFTDFLAFMVLFNYIIPVSMYVTVEMQKFLGSYFITWDEDMFDEETGEGPLVNTSDLNEELGQVEYIFTDKTGTLTENNMEFKECCIEGHVYVPHVICNGQVLPESSGIDMIDSSPSVNGREREELFFRALCLCHTVQVKDDDSVDGPRKSPDGGKSCVYISSSPDEVALVEGVQRLGFTYLRLKDNYMEILNRENHIERFELLEILSFDSVRRRMSVIVKSATGEIYLFCKGADSSIFPRVIEGKVDQIRARVERNAVEGLRTLCVAYKRLIQEEYEGICKLLQAAKVALQDREKKLAEAYEQIEKDLTLLGATAVEDRLQEKAADTIEALQKAGIKVWVLTGDKMETAAATCYACKLFRRNTQLLELTTKRIEEQSLHDVLFELSKTVLRHSGSLTRDNLSGLSADMQDYGLIIDGAALSLIMKPREDGSSGNYRELFLEICRSCSAVLCCRMAPLQKAQIVKLIKFSKEHPITLAIGDGANDVSMILEAHVGIGVIGKEGRQAARNSDYAIPKFKHLKKMLLVHGHFYYIRISELVQYFFYKNVCFIFPQFLYQFFCGFSQQTLYDTAYLTLYNISFTSLPILLYSLMEQHVGIDVLKRDPTLYRDVAKNALLRWRVFIYWTLLGLFDALVFFFGAYFVFENTTVTSNGQIFGNWTFGTLVFTVMVFTVTLKLALDTHYWTWINHFVIWGSLLFYVVFSLLWGGVIWPFLNYQRMYYVFIQMLSSGPAWLAIVLLVTISLLPDVLKKVLCRQLWPTATERVQTKSQCLSVEQSTIFMLSQTSSSLSF

SEQ ID NO: 185180 - protein, 935 aa, Artificial Sequence
  derived and/or modified sequence
  misc_feature (1)..(1): Xaa can be any naturally occurring amino acid
XYVGHREPPPGAEAYIPQRYPDNRIVSSKYTFWNFIPKNLFEQFRRVANFYFLIIFLVQLIIDTPTSPVTSGLPLFFVITVTAIKQGYEDWLRHKADNAMNQCPVHFIQHGKLVRKQSRKLRVGDIVMVKEDETFPCDLIFLSSNRGDGTCHVTTASLDGESSHKTHYAVQDTKGFHTEEDIGGLHATIECEQPQPDLYKFVGRINVYSDLNDPVVRPLGSENLLLRGATLKNTEKIFGVAIYTGMETKMALNYQSKSQKRSAVEKSMNAFLIVYLCILISKALINTVLKYMWQSEPFRDEPWYNQKTESERQRNLFLKAFTDFLAFMVLFNYIIPVSMYVTVEMQKFLGSYFITWDEDMFDEETGEGPLVNTSDLNEELGQVEYIFTDKTGTLTENNMEFKECCIEGHVYVPHVICNGQVLPESSGIDMIDSSPSVNGREREELFFRALCLCHTVQVKDDDSVDGPRKSPDGGKSCVYISSSPDEVALVEGVQRLGFTYLRLKDNYMEILNRENHIERFELLEILSFDSVRRRMSVIVKSATGEIYLFCKGADSSIFPRVIEGKVDQIRARVERNAVEGLRTLCVAYKRLIQEEYEGICKLLQAAKVALQDREKKLAEAYEQIEKDLTLLGATAVEDRLQEKAADTIEALQKAGIKVWVLTGDKMETAAATCYACKLFRRNTQLLELTTKRIEEQSLHDVLFELSKTVLRHSGSLTRDNLSGLSADMQDYGLIIDGAALSLIMKPREDGSSGNYRELFLEICRSCSAVLCCRMAPLQKAQIVKLIKFSKEHPITLAIGDGANDVSMILEAHVGIGVIGKEGRQAARNSDYAIPKFKHLKKMLLVHGHFYYIRISELVQYFFYKNVCFIFPQFLYQFFCGFSQQTLYDTAYLTLYNISFTSLPILLYSLMEQHVGIDVLKRDPTLYRYHPPNSLS

SEQ ID NO: 185181 - DNA, 3405 bp, Artificial Sequence
  derived and/or modified sequence
atggattgttcccttgttaggactctagtgcatcgttactgtgccggggaggagaactgggttgacagtaggaccatttacgtcgggcatagggaacctccacctggggctgaagcctacattccgcagaggtatcctgataaccgcatcgtgagctctaagtatacattttggaacttcattcccaaaaacctgttcgagcagtttaggagagtggctaatttctactttctgataatcttcttagtgcaacttattatcgatactcccacatccccggtaacttctgggctacctctgttttttgtcattacggtcaccgctattaagcaaggttatgaagactggctaaggcacaaggctgacaatgcaatgaatcaatgtcccgtgcacttcatccagcatggcaagctcgtcaggaagcagtcaagaaagttgcgtgttggcgatatcgtcatggtgaaggaggatgaaaccttcccttgcgatttgatcttcctgtccagcaatcggggcgacgggacatgtcacgtcactactgctagcctggatggcgaatcctcccataagacacattacgccgtgcaggatactaagggttttcacaccgaagaagacatcggggggcttcatgccacaatagagtgtgagcagccccagccagacctttacaagttcgtcggccgtataaatgtctactctgacctgaacgacccagtggtaaggcctctcggaagtgagaatcttctgctacggggcgctacattgaaaaatacagagaaaattttcggtgtggctatctacaccggaatggagacaaaaatggctctgaattaccaaagcaaatcccagaaacggtccgcagtggaaaagtctatgaacgcctttttaatcgtctatctatgtatcctcatctctaaggcccttattaatacagtgctcaaatatatgtggcagagcgagcccttcagggatgaaccctggtataaccaaaagaccgagagcgagcgccaacgaaacctgttcctgaaagccttcacggatttcctcgctttcatggtcctgttcaactatattatcccagtgtccatgtacgtgaccgtggaaatgcagaaattcctggggtcatacttcatcacctgggacgaggacatgtttgacgaggagaccggcgagggtcctttagtgaacacttctgatttgaatgaggagctcggacaggtagagtatatcttcacagacaagacgggaaccctaaccgaaaataatatggaatttaaggagtgttgtatcgagggccacgtctacgtgccacacgtaatctgtaacggtcaggttctgccagaatcaagtggtattgatatgatagatagcagccctagtgtgaatgggagggagcgtgaggagcttttttttcgtgccttgtgcttgtgccacacagtccaggtaaaggacgatgacagcgttgatggtcctcgcaagagcccagacgggggtaagagctgtgtgtatatctcgagctcacccgacgaggtagcccttgtggaaggcgtgcagcgccttggatttacgtatttacgattgaaggataactacatggagatactcaatcgagaaaatcatatcgaacggttcgagctgctggagatcctctcttttgactctgtgagacggaggatgagcgtaattgtcaagagcgccaccggcgaaatttacttgttttgtaagggcgctgactcctcaatctttccgcgcgtgattgagggcaaagtggatcaaatccgggctcgggtggagaggaacgctgtggagggcctacggaccctttgtgtcgcctataagagactcattcaggaagagtatgaaggcatttgcaaactcttgcaggcagctaaagtcgccctgcaggaccgagagaaaaagctcgctgaagcatatgaacagatagagaaagatctgacgttacttggggctacagcggtggaggacagactgcaggagaaagcagccgatacgatagaggccctgcagaaagctggaataaaggtgtgggtgctgacgggcgataaaatggagaccgccgcagccacttgctacgcctgcaaactgtttcgacgcaacacacagctactggaattgaccaccaaacggattgaggaacagtccttgcacgacgtactgtttgagttatccaagacagtgctgcgtcactctggcagtctgacacgggacaacttgtcggggctgtctgccgatatgcaggattacggcctcatcatcgatggcgccgccctgtccctgatcatgaaacccagagaggacgggtcctcaggcaactacagggagctgtttcttgaaatctgtaggtcttgcagcgccgttttatgctgtcggatggcccctctccagaaggctcagattgtgaagctgataaaattttctaaggagcatcccatcacactggcgatcggggacggagccaacgacgtaagtatgatcctcgaggcgcatgtaggtataggcgtaatcggtaaagagggccgccaggcggcacgaaattccgattacgctattcctaaatttaaacacctgaaaaagatgctgttggtgcacgggcacttctattacattcggatttcagaactggtgcaatatttcttttacaaaaacgtgtgcttcatctttccgcagttcctgtatcagtttttctgcggattctcccagcaaaccctctatgacaccgcttacctgactttgtataacattagtttcaccagcctccccatcctcctgtactctctcatggagcagcacgtgggaatcgatgtcctgaagcgcgatcccaccttgtatagggacgtggcaaaaaatgccctgttgaggtggagagtgttcatttattggaccttgcttgggctgtttgacgcactagtgttttttttcggcgcttactttgtcttcgagaacacaaccgtgacaagcaatggccagatatttggcaactggactttcggaacattggtctttaccgttatggtctttactgtgactctcaagcttgccctggatacccactactggacctggattaaccactttgttatctggggaagcctactgttctacgtggtattttcgctcctctgggggggtgtcatctggccattcttgaactaccagcggatgtattacgtttttatccagatgttatccagcgggcctgcttggctggctatcgtgttgttggtgactatatcactgctgcccgatgtcttgaaaaaggtgctctgcagacaactttggcccactgccaccgagagagtgcaaactaaaagccaatgcctgtccgtggagcagtcaacaatcttcatgttgtctcagacctcctcttccctcagcttttag

SEQ ID NO: 185182 - DNA, 3405 bp, Artificial Sequence
  derived and/or modified sequence
atggactgcagcctggtgcgcaccctggtccatagatactgcgcaggcgaggaaaactgggtcgacagccgaacaatctacgttgggcacagggaaccgccccccggagccgaggcctacattccccagcggtaccccgacaacaggatcgtaagctctaaatacacattctggaatttcatcccaaagaatctattcgaacagttcagacgcgttgcaaacttttacttccttatcatcttcttggttcagctcataattgacacgcctaccagccctgttacttctggactgcccttattttttgttatcaccgtaacagccattaagcagggatacgaggactggttgaggcacaaggctgataatgcaatgaaccagtgccctgtccacttcatccagcacggtaagctggttaggaagcagagtcggaaactccgagtcggcgacatcgtaatggttaaggaggacgagacatttccttgtgatctaatattcctgagcagcaataggggcgacggcacctgtcacgtgacaacagcctctctcgacggagagtcatctcataaaacccactatgcagtacaagacaccaaaggatttcatactgaggaagacatcggcggattgcatgccactattgagtgtgaacagccacagcctgatctgtacaagtttgtgggccgcatcaacgtatacagtgatctaaacgaccctgtcgtccgcccgctgggcagcgagaacctactcctcagaggcgccacgctcaaaaacacggagaaaattttcggcgtagccatctacacaggaatggagaccaagatggcactgaattaccaaagtaaatcacagaagcggtctgccgttgagaaatccatgaatgctttcttgatcgtctatctatgtatcctaatctcgaaggccctgattaatacagtgcttaagtatatgtggcagagtgagcctttccgggacgagccttggtataaccagaagacagaaagtgaacggcaacgaaatttgtttctgaaggcttttactgatttcctggctttcatggttctatttaactatatcatcccggtatccatgtacgtgactgtggagatgcaaaaatttctcgggtcctacttcatcacctgggatgaagacatgtttgatgaagagacaggagaggggccactggtgaatacttctgatctcaacgaggaattggggcaggtggagtacatttttactgacaagactggcacactgacggagaacaacatggaattcaaagaatgctgcatcgaaggtcatgtgtacgtgcctcacgtgatttgtaacggccaagtacttccggagagctcgggaatcgatatgatcgattcaagcccaagtgttaacggaagggagcgggaggaattgttttttcgcgccctctgcctgtgccacacggtgcaagtgaaggatgatgactccgtagacgggccccgcaagtccccagatgggggaaagagctgcgtgtatatatccagctctccagacgaggtggctctggtggagggtgtacagcggttggggttcacttaccttcggttgaaagacaattacatggagattcttaaccgcgagaaccacattgagcgctttgaattgctggagatcctgagcttcgacagtgtacgacgccgaatgtctgtgatcgtgaagtctgccacaggcgagatttatttgttctgcaaaggagcggacagttcaatctttccgagggtgattgaaggcaaagtcgatcaaattcgggctcgcgtcgaaagaaacgcggtggaaggcctgaggacattgtgcgtggcctacaagcggctgatccaagaggagtatgagggcatctgcaagctactgcaagccgctaaagttgctttacaggaccgcgagaaaaaactggctgaagcatacgaacaaatcgagaaggacctaacactgcttggggctaccgcagtcgaagacagactgcaagagaaagctgccgataccatcgaggctctgcagaaagctggcattaaagtgtgggtgctcaccggggacaagatggagaccgcggctgctacgtgttacgcctgtaaactttttcgtagaaatacccaattgctagagttaactacgaaacgtatagaagaacagtccctgcacgatgtacttttcgaactgagcaaaaccgtgctgaggcattctgggagcctgactcgggacaacctgtctggtctctccgcagatatgcaggactacggactgattatcgacggtgcggccttatcattaattatgaaacccagggaagacggctcatctggtaactatcgggaactgtttctggaaatttgccgatcctgctccgccgtcctgtgctgccgcatggcccctcttcaaaaggctcagattgtgaaactgatcaaattctctaaagaacacccaatcacattggcgattggggatggggcaaatgatgtttccatgatcctggaggcacacgtgggcatcggcgtaataggcaaggaaggcaggcaggctgccagaaattctgactatgctatacctaagtttaagcatcttaagaaaatgctgctggtgcacgggcatttctactatataagaatctccgaactggttcaatactttttttacaaaaatgtctgttttatctttccgcagttcctttatcaattcttctgtggatttagtcagcagactctttacgatactgcgtaccttactctctataacatctctttcacctctctgccaatcctgctgtatagtctaatggagcaacatgtgggtattgacgttctaaagcgggaccctacattgtatcgcgacgttgccaagaatgctctgctgaggtggagggtgttcatttactggacactccttgggctcttcgatgcactggtgtttttttttggagcgtattttgtcttcgagaacactacagtgacttcaaacggccaaatttttgggaactggacttttggcaccctggtgtttacggtcatggtgtttacagttactctcaagcttgcactagacacccactactggacttggatcaatcattttgtgatctggggttccttgctgttttacgtcgtgttttccctgctgtggggtggcgttatttggccctttcttaactaccagagaatgtactacgtgttcatacaaatgttaagtagcggacctgcctggctggcaatcgtgctgctggtcaccattagccttctgcccgacgtgctgaagaaagttttgtgtaggcaactgtggccaacagctacagaaagagtccagacaaaatcgcagtgcctgtctgtggagcaaagcactatctttatgctgtcacagacctcatcgtcgctgagcttctag

SEQ ID NO: 185183 - DNA, 2808 bp, Artificial Sequence
  derived and/or modified sequence
tagtatgtcggccaccgtgagccaccccctggcgcagaagcatacatcccacaacgctaccctgacaaccgtatcgtgtcatctaagtacaccttctggaacttcattcctaaaaacctcttcgagcaatttcgccgcgtcgctaacttttactttctcattatttttctggtgcaattgataatagacacgcccacctcacccgttacctctggactgcctctgtttttcgtgatcaccgtgaccgcaatcaagcagggttatgaggattggttgcgccacaaagccgacaacgcaatgaatcagtgcccagttcatttcatccagcacggcaaacttgtgagaaaacagagcaggaagctacgggtgggcgacattgtaatggtcaaagaggatgagacctttccatgtgacctcatcttcctcagtagcaaccgcggagatggcacatgtcacgttactaccgcctccctcgatggagagtcaagtcacaaaacacattatgccgttcaggataccaagggattccacacagaagaagatataggcggcctgcacgccactatcgagtgtgaacagccccagcccgacctgtacaagtttgttgggaggattaacgtgtactcagacctaaacgatccagtggtgagacccctcggatccgaaaatctgctgctgcggggagctaccttgaaaaacactgagaagatctttggtgtcgcgatatacactgggatggagactaagatggctctaaattaccagtctaagtcccagaagaggtctgccgtcgagaagagcatgaatgcatttctaattgtttatctgtgtatactgatctctaaggccctgatcaacacggtgctcaagtacatgtggcagtcggagccattccgggatgaaccttggtacaatcagaaaactgaatctgagcggcagagaaatctgttcctcaaggcgtttacagatttcttggcattcatggtcctcttcaattacatcattcctgtgtccatgtacgtgaccgtggaaatgcagaaattcctgggtagctatttcatcacttgggatgaggacatgtttgacgaggagactggtgaaggccccctcgtcaatactagcgaccttaacgaggagctcggccaagtggaatacatctttacagataaaactggtaccctgactgaaaataatatggaattcaaggaatgttgtatcgagggacacgtatacgttcctcatgttatttgtaacggacaagtcctgccggaaagctccggcattgatatgatagattcctccccttccgtgaatggtagggagcgcgaggagttgttctttagggctctgtgcctttgccacaccgtccaggtgaaagatgatgacagcgtagatggccccagaaagtcccccgatggggggaaatcttgcgtctacatttccagcagtccagacgaggtggctttggtggaaggcgttcagaggctgggattcacctatctgcgcctgaaagacaactacatggagatcctgaaccgagaaaaccatatagagcgattcgaactgctggagattctctccttcgactccgtgcgcagaagaatgagtgtgatcgtcaaaagtgccactggggaaatctatctgttttgcaagggcgcagatagttccatctttccacgcgtgatcgaggggaaggtcgatcagatccgcgcacgagtggaaaggaatgctgtggaggggcttagaaccctgtgtgttgcctataagcgtctcatacaggaggaatatgagggaatctgtaaattgcttcaggccgccaaggtcgccctgcaagaccgcgaaaagaagttggcagaagcctatgagcaaatcgagaaggatctcaccctgctgggggctaccgccgtggaggatcgccttcaggagaaggctgccgataccatagaagcattacagaaggctggcattaaagtgtgggtcttaaccggggacaaaatggagacggccgccgcgacatgctacgcatgtaaactatttcgtaggaatactcagctactggagcttaccaccaaacggatcgaagagcagagtttgcacgacgttctctttgagctgtccaagaccgtgctcaggcactccggctccttaacgcgagacaacctgtccggtctctccgcagacatgcaggattacggactgatcattgatggagcagctctaagcctgattatgaagcccagggaagatggttcgagcggcaattatagagagctgttcttggaaatatgccggtcctgtagtgcagtcctatgttgcagaatggccccactgcagaaagcccaaatcgtgaagctgattaaatttagcaaagaacatcccattacgctggccatcggggatggagccaacgatgtgtcaatgatacttgaggcccatgtgggcattggggtgatcggtaaggagggtaggcaggctgcccgcaactccgactatgccattccaaaattcaaacatctgaaaaaaatgctgctagttcatggccacttctactacattcggatctcggagttagtccagtattttttctataagaacgtctgttttatctttcctcagttcctgtaccaattcttttgcggattttctcagcagaccctgtacgatactgcatatctcactctttataatatcagcttcacctctctgcccatcctcttgtactcccttatggaacaacacgtagggatcgatgtgctgaaacgagaccctactctgtacagataccatccgcccaatagtttgtcctag

SEQ ID NO: 185184 - DNA, 3405 bp, Artificial Sequence
  derived and/or modified sequence
atggactgcagcttagtacgcacactggtccacaggtactgtgctggcgaagagaattgggttgactcacggaccatttacgtcggccaccgcgaaccgcctcccggcgccgaggcttacatcccccagagataccctgataacagaatcgttagctcgaagtacactttttggaatttcatccccaagaacctgttcgagcagttccgacgggtcgccaacttctactttctcatcatctttttagttcagttgatcatagataccccaacatcacctgtcacatctggcctgccactcttttttgtcattacagtgactgcaatcaaacaggggtacgaagattggctgagacacaaggctgacaatgctatgaatcagtgcccggtccacttcattcagcacgggaaactggtccgcaagcagtcccggaagctccgcgtgggggacatcgtcatggtgaaggaagatgagacatttccctgtgacttgatctttctctccagcaaccgaggcgacgggacttgtcacgttacgacagcttcactagacggggagtcaagccacaagacacactacgctgtccaagacacgaaggggtttcacacggaagaggacattggaggactccatgccaccatcgaatgcgagcagccccagccagacctctataagtttgtgggacgcatcaacgtttacagcgacctgaatgaccctgtcgtgagaccgcttggctcggagaacctgctgttgcggggcgccacgttaaaaaacactgagaagatattcggtgtggctatctacaccggtatggagacaaaaatggccctgaattatcagtccaagagccagaaacgcagcgcggtggaaaagtctatgaatgcttttctgatagtatatttatgtattctgatttctaaggctctgatcaatacggtgctcaaatatatgtggcagtcagaacccttcagagacgagccctggtataaccagaagactgagagtgagcgccagcggaacttattcttgaaggccttcacagatttcctggccttcatggtgctttttaattatattattccagtttcaatgtacgtgacagtcgaaatgcagaaatttttaggcagctactttatcacttgggatgaggatatgtttgacgaggaaaccggagaaggacctcttgtcaataccagcgatctgaatgaagaactcggccaggtggagtatatttttacggacaaaaccggcacccttactgagaacaacatggaattcaaggaatgctgcatcgaggggcacgtatacgtgccccacgttatctgtaacggccaggtgttacctgagagcagtggtatcgatatgatcgatagttctccatccgttaacggacgtgaacgggaggaattgttctttagagccttgtgcttatgtcacactgttcaagtgaaggacgatgactccgtcgatggacccagaaaaagccctgacggcggaaaatcatgtgtctacatatcatcgagccccgacgaagtcgcactggttgaaggggttcaacggttgggctttacctatcttaggcttaaagacaattacatggaaattttgaatcgagaaaatcacatcgaacggttcgaattactggaaatcctgagcttcgactccgtgcgacggcggatgtccgtcatcgtcaagagtgccactggcgagatttatctcttctgcaagggggcagactccagcatttttccgagagtgattgagggcaaagtggatcagatacgtgcccgcgtcgagagaaatgctgttgagggtcttagaacactctgtgtggcctacaagaggctaattcaagaggaatatgaaggaatctgcaagttgttgcaggcagccaaggtggccctgcaggaccgcgaaaagaaactggccgaggcttatgaacagattgagaaggacctaactctgcttggggctacagctgtggaggaccgattgcaggagaaggcggcagacacgattgaggccctccagaaagcaggaatcaaggtctgggtcctgactggagataagatggagaccgccgccgcaacctgctatgcctgtaagctgttccgaagaaacacccagcttcttgaactgacaacgaaacgaattgaagagcagagtctgcacgacgtgctcttcgagctctccaaaaccgtgttgaggcacagcggctccctgaccagggacaatctgagcggcttgtctgcagacatgcaggattacgggctaataatagacggagccgccctttcactgattatgaagccacgcgaggatggctcatccggaaattatagagagctgtttttagagatttgcaggtcctgctccgccgtcttatgttgccgtatggcgccactccagaaagcacaaattgtgaagcttattaagttcagcaaagagcatccaataacactggctatcggggacggcgcaaatgacgtcagcatgatactcgaggcccatgtcggaattggtgttatcgggaaggaggggcggcaggccgcccgcaactctgactacgcgattccaaagtttaagcacttaaagaaaatgttactggtccatggacacttctattatatcaggatctctgagttagtgcagtacttcttttataagaatgtatgcttcatattccctcaatttctttatcagttcttttgtggcttttctcagcagaccctatatgacactgcctacctgacactgtacaatatctcctttaccagtcttccaatcttgctttactctctgatggaacagcatgtgggtattgatgtcctgaagcgggacccaaccctttatagggacgtggcgaagaatgccctactacggtggcgggtctttatctactggactttactgggactgtttgatgcactcgttttctttttcggcgcgtacttcgtcttcgaaaatacaacagttacaagtaatggacaaattttcggcaactggacttttggcacactagtctttactgttatggttttcactgtgacacttaaattggctctggacacgcactactggacttggattaaccacttcgtaatttgggggtccctcctgttttatgtggtgttcagcctactttggggtggggttatctggccattcctcaattaccaaagaatgtattatgtatttattcagatgctatcctcgggccccgcttggttggcaatagtgctcctcgtgacaattagcctcctgccagacgttctgaaaaaggtgctctgcagacagctgtggcctactgccactgaacgggtccaaactaagtcccagtgcctgtcagtcgagcagtctactatatttatgctttctcagacttcctctagtctcagtttttag

SEQ ID NO: 185185 - DNA, 3405 bp, Artificial Sequence
  derived and/or modified sequence
atggactgcagcctggtgaggaccctggtgcaccgctactgtgccggggaggagaactgggtggacagcaggaccatctacgtgggccaccgggagcccccacctggagctgaggcctacatcccccagcgctacccagacaaccgcatcgtgagcagcaagtacaccttctggaacttcatccccaagaacctgtttgagcagttccggcgggtggccaacttctacttcctgatcatcttcctggtgcagctgatcatcgacacccccaccagccctgtgaccagcggcctgcccctcttcttcgtcatcaccgtgacagccatcaagcagggctatgaggactggctgcggcacaaggctgacaatgccatgaaccagtgccctgtgcacttcatccagcacggcaagctggtgaggaagcagagcaggaagctgcgggtgggggacatcgtgatggtgaaggaggatgagaccttcccctgtgacctgatcttcctgagcagcaacagaggagatggcacctgccacgtgaccacagccagcctggatggagagagcagccacaagacccactatgctgtgcaggacaccaagggcttccacacagaagaagatattggaggcctgcacgccaccattgaatgtgagcagccccagcctgacctgtacaagtttgtgggccgcatcaacgtgtacagcgacctgaatgaccctgtggtgcggcccctgggcagcgagaacctgctgctgcggggggccaccctgaagaacacagagaagatctttggagtggccatctacacaggcatggagaccaagatggccctgaactaccagagcaagagccagaagaggtctgctgtggagaagtccatgaatgccttcctgattgtgtacctgtgcatcctgatcagcaaggccctgatcaacacagtgctgaagtacatgtggcagagcgagcccttcagagatgagccctggtacaaccagaagacagaaagtgagcggcagaggaacctcttcctgaaggccttcacagacttcctggccttcatggtgctcttcaactacatcatccctgtgtccatgtatgtgacagtggagatgcagaagttcctgggcagctacttcatcacctgggatgaggacatgtttgatgaggagaccggggagggccccctggtgaacaccagtgacctgaatgaggagctgggccaggtggagtacatcttcacagacaagacaggcaccctgacagagaacaacatggagttcaaggagtgctgcatcgagggccacgtgtatgtgccccacgtgatctgcaatggccaggtgctgcctgagagcagcggcatcgacatgattgacagcagccccagcgtgaatggccgggagcgggaggagctgttcttccgggccctgtgcctgtgccacacagtgcaggtgaaggatgatgacagcgtggatggccccaggaagagcccagatggcggcaagagctgtgtgtacatcagcagcagcccagatgaggtggccctggtggagggcgtgcagaggctgggcttcacctacctgcggctgaaggacaactacatggagatcctgaaccgggagaaccacatcgagagatttgagctgctggagatcctgagctttgattctgtgagaagaaggatgtctgtgattgtgaagagcgccaccggggagatctacctgttctgcaagggagctgacagcagcatcttcccccgggtgattgagggcaaggtggaccagatccgggcccgggtggagagaaatgctgtggagggcctgcggaccctgtgtgtggcctacaagaggctcatccaggaggagtatgagggcatctgcaagctgctgcaggccgccaaggtggccctgcaggaccgggagaagaagctggccgaggcctatgagcagatcgagaaggacctgaccctgctgggcgccacagctgtggaggaccggctgcaggagaaggctgctgacaccatcgaggccctgcagaaggccggcatcaaggtgtgggtgctgactggagacaagatggagacagctgctgccacctgctacgcctgcaagctgttcagaagaaacacccagctgctggagctgaccaccaagagaattgaggagcagagcctgcatgatgtgctgtttgagctgagcaagacagtgctgcggcacagcggcagcctgacccgggacaacctgagcggcctgtctgctgacatgcaggactatggcctcatcattgatggagctgccctgagcctcatcatgaagcccagagaagatggcagcagcggcaactaccgggagctgttcctggagatctgccgcagctgcagcgctgtgctgtgctgcaggatggcccccctgcagaaggcccagatcgtgaagctgatcaagttcagcaaggagcaccccatcaccctggccatcggagatggagccaatgatgtgtccatgatcctggaggcccacgtgggcatcggcgtgattggcaaggagggccggcaggccgccaggaacagcgactatgccatccccaagttcaagcacctgaagaagatgctgctggtgcacggccacttctactacatccgcatcagcgagctggtgcagtacttcttctacaagaatgtgtgcttcatcttcccccagttcctgtaccagttcttctgtggcttcagccagcagaccctgtatgacacagcctacctgaccctgtacaacatctccttcaccagcctgcccatcctgctgtacagcctgatggagcagcacgtgggcattgatgtgctgaagagggaccccaccctgtacagagatgtggccaagaatgccctgctgcgctggagggtcttcatctactggaccctgctgggcctgtttgatgccctggtgttcttctttggagcctactttgtgtttgagaacaccaccgtgaccagcaatggccagatctttggaaactggaccttcggcaccctggtgttcaccgtgatggtgttcaccgtgaccctgaagctggccctggacacccactactggacctggatcaaccactttgtgatctggggcagcctgctcttctacgtggtgttcagcctgctgtggggcggcgtcatctggcccttcctgaactaccagaggatgtactacgtgttcatccagatgctgagcagcggccctgcctggctggccatcgtgctgctggtgaccatcagcctgctgcctgatgtgctgaagaaggtgctgtgccggcagctgtggcccacagccacagagcgggtgcagaccaagagccagtgcctgtctgtggagcagagcaccatcttcatgctgagccagaccagcagcagcctgtccttctag

SEQ ID NO: 185186 - DNA, 2808 bp, Artificial Sequence
  derived and/or modified sequence
tgatatgtgggccaccgggagcccccacctggagctgaggcctacatcccccagcgctacccagacaacagaattgtgagcagcaagtacaccttctggaacttcatccccaagaacctgtttgagcagttcagaagagtggccaacttctacttcctgatcatcttcctggtgcagctgatcatcgacacccccaccagccctgtgaccagcggcctgcccctcttctttgtgatcaccgtgacagccatcaagcagggctatgaggactggctgcggcacaaggctgacaatgccatgaaccagtgccctgtgcacttcatccagcacggcaagctggtgaggaagcagagcaggaagctgcgggtgggggacatcgtgatggtgaaggaggatgagaccttcccctgtgacctgatcttcctgagcagcaacagaggagatggcacctgccacgtgaccacagccagcctggatggagagagcagccacaagacccactatgctgtgcaggacaccaagggcttccacacagaggaggacatcggcggcctgcacgccaccattgaatgtgagcagccccagcctgacctgtacaagtttgtgggccgcatcaacgtgtacagcgacctgaatgaccctgtggtgcggcccctgggcagcgagaacctgctgctgcggggggccaccctgaagaacacagagaagatcttcggcgtggccatctacacaggcatggagaccaagatggccctgaactaccagagcaagagccagaagaggtctgctgtggagaagtccatgaatgccttcctgattgtgtacctgtgcatcctgatcagcaaggccctgatcaacacagtgctgaagtacatgtggcagagcgagcccttcagagatgagccctggtacaaccagaagacagagagcgagcggcagaggaacctcttcctgaaggccttcacagacttcctggccttcatggtgctcttcaactacatcatccctgtgtccatgtatgtgacagtggagatgcagaagttcctgggcagctacttcatcacctgggatgaggacatgtttgatgaggagactggagagggccccctggtgaacaccagtgacctgaatgaggagctgggccaggtggagtacatcttcacagacaagacaggcaccctgacagagaacaacatggagttcaaggagtgctgcatcgagggccacgtgtatgtgccccacgtgatctgcaatggccaggtgctgcctgagagcagcggcatcgacatgattgacagcagccccagcgtgaatggccgggagcgggaggagctgttcttccgggccctgtgcctgtgccacacagtgcaggtgaaggatgatgattctgtggatggccccaggaagagcccagatggcggcaagagctgtgtgtacatcagcagcagcccagatgaggtggccctggtggagggcgtgcagaggctgggcttcacctacctgcggctgaaggacaactacatggagatcctgaaccgggagaaccacatcgagagatttgagctgctggagatcctgagctttgacagcgtgagaagaaggatgtctgtcatcgtgaagagcgccactggagagatctacctgttctgcaagggagctgacagcagcatcttccccagggtcatcgagggcaaggtggaccagatccgggcccgggtggagagaaatgctgtggagggcctgcggaccctgtgtgtggcctacaagaggctcatccaggaggagtatgagggcatctgcaagctgctgcaggccgccaaggtggccctgcaggaccgggagaagaagctggccgaggcctatgagcagatcgagaaggacctgaccctgctgggcgccacagctgtggaggaccggctgcaggagaaggctgctgacaccatcgaggccctgcagaaggccggcatcaaggtgtgggtgctgaccggggacaagatggagacagctgctgccacctgctacgcctgcaagctgttcagaagaaacacccagctgctggagctgaccaccaagagaattgaggagcagagcctgcatgatgtgctgtttgagctgagcaagacagtgctgcggcacagcggcagcctgacccgggacaacctgagcggcctgtctgctgacatgcaggactatggcctcatcattgatggagctgccctgagcctcatcatgaagccccgggaggatggcagcagcggcaactaccgggagctgttcctggagatctgccgcagctgcagcgctgtgctgtgctgcaggatggcccccctgcagaaggcccagatcgtgaagctgatcaagttcagcaaggagcaccccatcaccctggccatcggagatggagccaatgatgtgtccatgatcctggaggcccacgtgggcattggagtcatcggcaaggagggccggcaggccgccaggaacagcgactatgccatccccaagttcaagcacctgaagaagatgctgctggtgcacggccacttctactacatccgcatcagcgagctggtgcagtacttcttctacaagaatgtgtgcttcatcttcccccagttcctgtaccagttcttctgtggcttcagccagcagaccctgtatgacacagcctacctgaccctgtacaacatctccttcaccagcctgcccatcctgctgtacagcctgatggagcagcacgtgggcattgatgtgctgaagagggaccccaccctgtaccgctaccacccccccaacagcctgtcctag

SEQ ID NO: 185187 - DNA, 3405 bp, Artificial Sequence
  derived and/or modified sequence
atggactgcagcctggtgcggaccctggtgcaccggtactgcgccggggaggaaaattgggtggacagcagaactatctatgtggggcacagggagccgccgcctggagctgaggcttacattccccagagataccccgacaatagaattgtctcttctaagtacacgttctggaattttatacccaaaaacctatttgagcagtttagacgggtagctaatttttactttctgattatcttcctggtccaactcatcattgataccccgacctcacctgtcacatcaggactgcccctatttttcgtgatcaccgtgacggcaattaaacaaggctacgaggactggctgagacacaaagctgataacgccatgaaccagtgccctgttcatttcatccagcatggcaagctggtcaggaaacagtcgcggaaacttcgggtgggggatattgtcatggttaaggaggacgaaaccttcccatgtgacctaatttttttaagcagcaatagaggagatggcacttgtcatgtgacaactgccagccttgatggcgagagttctcacaaaacccattatgctgtgcaagacactaaggggtttcatactgaagaggacatcggagggctgcatgcaaccattgagtgtgagcagcctcagccagatctctataagttcgtgggacgaattaatgtatactcggacctgaatgatccagtggttagaccactgggctctgaaaatctgctcctgcgcggggccacactgaagaacaccgagaagatcttcggcgtggcaatatacaccggtatggaaacaaaaatggctttgaattatcaatccaagagccagaagcgctccgccgtggaaaagtccatgaacgcatttcttatagtgtatttatgtatcctcatcagtaaagccctgatcaacacagtactcaagtacatgtggcagtctgaaccatttcgagatgagccctggtacaaccagaagaccgagagtgagcgccagcgcaatctatttctcaaagcatttactgacttcctggcgttcatggtcctgttcaactacataattcccgtcagtatgtacgtaacagtggaaatgcagaaatttttaggatcctattttatcacttgggatgaagacatgtttgacgaggagacaggggaagggccgctggttaatacttccgatcttaatgaggagcttggtcaggtggagtatattttcactgataagaccgggacattgacagagaataacatggagtttaaagaatgctgcatcgaaggacacgtgtacgtaccacatgttatctgcaatgggcaggtgctgcccgagagcagcggcatcgatatgattgactcatctccaagtgtcaatggccgtgaacgggaggagcttttcttcagggcgctgtgtctctgccatacagttcaggtgaaagatgacgactcggttgatgggccccgtaagagccctgatggcggtaaatcttgcgtgtacatttcgtcttcccccgatgaggttgctctcgtggagggggtgcagaggctgggcttcacatatctccgtctgaaggacaattacatggagattcttaatcgtgaaaaccatatcgaaagattcgaactgttagaaattctttctttcgactccgtgcgtcggcgcatgtccgtcattgtgaagtccgctactggggaaatttatctgttctgcaagggtgccgatagtagtatattcccccgcgtgattgagggaaaggtcgatcagatacgtgctcgcgtggagagaaatgctgtcgagggactacgcaccctttgtgtggcctacaagcgcctgatccaggaggaatacgagggaatttgcaaattattacaggccgccaaggtcgcactgcaggacagggagaaaaagctcgcggaagcctacgagcagatcgaaaaggacctgacgctgctgggcgccacagccgtggaagaccgcctgcaggagaaagccgctgacacgattgaggcgctgcagaaagccggcatcaaggtctgggttctaactggggacaaaatggaaacagccgccgctacttgctatgcctgtaagctctttcgaagaaacacccagctgcttgagcttaccactaaacgcattgaggagcagtcacttcatgacgtgctgttcgaactgtccaagactgtactccggcattccggctccctcacccgggacaatttatcaggactcagcgcggatatgcaggactatggactgatcattgacggtgcagcgctgtctctcatcatgaaacctcgggaagacgggtcaagtggcaactatcgggaactgttcctcgagatttgccgaagttgttcggcagtgctatgttgccggatggccccgctccagaaagcacagatcgtgaagctaattaaattctcaaaagaacatcccataacgctcgcaattggggacggtgcaaatgacgtgtctatgatactcgaggctcacgtcggtatcggtgtcatcggcaaggagggacggcaggccgcacggaatagcgattacgccatcccaaaatttaagcaccttaagaaaatgctgctggtgcatggacacttctactatattagaattagtgagctggttcaatacttcttctacaagaatgtgtgttttatttttccccagttcctttatcagttcttttgcgggttcagtcagcagacattatatgacactgcatacttgacattgtacaatatttccttcacttccttgcctatcctcctatattccctgatggagcagcacgtggggattgatgtactcaagcgggatccaacactgtatcgagacgttgccaagaatgctttactgcggtggcgcgttttcatctactggaccctgcttgggctttttgacgccctggtcttcttcttcggggcttattttgtgttcgaaaatacgacggtgacttctaacggtcagatcttcggcaattggaccttcggaactctcgtctttactgtcatggtgtttactgtcacattaaaactggcccttgacacacattattggacgtggataaatcacttcgtaatctggggctcactattgttctacgtcgtattcagtctgctatgggggggagttatttggcccttccttaactatcaaaggatgtattacgtttttattcagatgctctcgagtggcccagcctggctggcgattgtactcctggtcaccatctccctgttacccgacgtgctcaagaaggtgttatgtagacaactgtggcctaccgctaccgagcgcgtccagactaaaagccaatgtcttagtgtagaacagtccacgatttttatgctttcccagacctcctccagcttaagcttctag

SEQ ID NO: 185188 - DNA, 3405 bp, Artificial Sequence
  derived and/or modified sequence
atggactgcagcctggtgcggaccctggtgcaccggtactgcgccggtgaggagaattgggtagactctcgcaccatctacgtgggccaccgtgagcctccacctggcgccgaggcatacatcccccagcgctatccagataatcgtatagtctcgagcaaatacactttttggaattttatacctaagaatcttttcgagcaattccgccgcgtggccaatttctatttcctgatcatctttctggtccagctcattatagacacccccacttcgcccgttacaagtggtttaccattgttcttcgtcattacagtcaccgcaattaaacagggatatgaggactggctgagacacaaggccgacaacgctatgaatcagtgccctgtgcatttcatccaacatgggaagctggtgcgaaaacagtcacgcaagctaagggtaggcgacatagttatggttaaggaagacgaaacattcccatgtgaccttatattcctaagcagcaacaggggggacggcacatgccatgtgacaactgcaagcctcgacggcgagagttcccacaaaacacattacgcagttcaggacactaaagggtttcatactgaggaagatattggaggacttcacgctaccattgaatgcgagcagccacagccagacctttacaaattcgtggggagaatcaacgtttacagcgatctgaacgatcccgttgtcagacctctaggtagcgaaaatttattactgcggggagccaccctgaaaaataccgagaagatttttggggtcgccatatacacaggcatggaaactaagatggctctgaattatcaatccaaatctcaaaagaggtccgcagtggagaagtctatgaatgcttttctgatcgtctatctgtgtatcttgattagcaaggcgcttatcaatacggtgcttaaatacatgtggcaatccgagccttttagggatgagccctggtacaaccagaaaaccgaatcagagcgtcagaggaatctatttttgaaagcatttactgattttctggcattcatggtgctcttcaactacattatccccgtctccatgtacgtgactgtggagatgcagaagttcttaggatcatacttcatcacctgggatgaggacatgttcgatgaagaaactggcgaagggccacttgtgaacaccagtgaccttaatgaggagcttgggcaggtcgaatatatctttacagataaaaccggaaccctgaccgaaaataacatggagtttaaggagtgttgcattgagggccatgtgtatgtgccacatgtcatttgcaacggccaagtactcccagagtcaagcggtattgatatgatcgactcttcaccttccgtgaacggccgtgagagagaagagctcttcttccgcgccctgtgtctttgccacacagtgcaggtgaaagatgacgactccgtggacggacccagaaagtcgcctgatggaggcaagtcttgtgtttatatctcatcaagtcctgatgaggtcgctctggttgagggggtgcaaagattaggttttacttacctcagactcaaggacaactacatggagatactgaaccgggagaaccatatcgagagatttgagttattggagattctatccttcgatagtgtgcggaggaggatgtctgtgattgtaaagtctgccaccggcgaaatttatctgttctgcaagggcgccgatagtagcatctttcccagggtcatcgaggggaaggtcgaccagatccgcgcccgggttgaacggaacgccgtcgagggtcttaggacgctgtgcgtggcctacaagcgattgatccaggaagaatacgagggcatctgcaagctgcttcaggccgccaaagttgctcttcaggaccgggaaaagaaactcgcagaggcatatgagcagatcgaaaaggacctgaccctgctcggcgccacggcagtggaagatagactgcaggaaaaagcagctgatacaatcgaggctctgcaaaaggccggcatcaaggtgtgggtactgacaggtgacaagatggaaaccgcggcggccacctgctacgcctgtaagctctttcgcaggaatacacagctcctggagctcaccaccaagagaatcgaagaacagtcattgcacgacgtgctgtttgagctgagtaagactgttctgcgccactctggaagtctgacaagggacaatctctcgggcctgtctgctgacatgcaagattacgggttaattattgacggggctgctttgagccttattatgaagcctcgcgaagatggcagctccgggaactacagggaattattcttagagatttgccgcagttgctctgctgtgctgtgttgcagaatggcccccctccagaaagctcaaattgtgaagctcatcaagttttccaaagaacaccctataactctggctataggagatggagctaacgacgttagtatgatcttggaggcccatgttggcatcggagtgatcgggaaggaaggtagacaggccgcgcgcaatagcgattacgcgatacccaaatttaaacatctgaagaagatgctcctcgtacacgggcacttctattatattaggatatccgaactggttcagtactttttctataagaatgtttgcttcatctttccacagtttctttaccagtttttttgcggattcagccagcagaccctgtacgacacagcttacctcaccttgtataatataagctttactagcctaccaatcctcctctacagcttgatggaacagcatgtgggaattgacgtgctgaagagagaccctactctttatagagatgttgccaaaaatgccctgctgcgttggcgagtgttcatttattggacacttttaggactgttcgatgcactcgtgttttttttcggtgcctatttcgtgttcgagaacacgaccgtcacatctaatggacaaatttttggcaactggacttttggcaccctggtattcaccgttatggttttcacggtaacactgaaattggcacttgatacccactattggacctggatcaatcactttgtaatttgggggtccctcttgttctatgtcgtgttcagcctcctgtggggaggggtcatctggcccttcctgaattaccaaaggatgtactatgtgttcattcagatgctttcaagtggacccgcctggcttgcaatcgtcctgctcgtgaccatctcgctcctgcctgacgtgttgaaaaaggtgctatgccgccagctgtggcccacagctaccgagcgcgttcagactaagtctcagtgcttatcggtggaacaatccactatttttatgctatctcaaacatcctccagccttagcttctag

SEQ ID NO: 185189 - DNA, 2808 bp, Artificial Sequence
  derived and/or modified sequence
tgatacgtgggccaccgggagcccccccccggcgccgaggcctacatccctcaacggtacccagacaaccgcattgtctcaagtaaatacacattttggaactttattcctaaaaacttgttcgagcagtttagacgagtcgccaatttttactttttaatcatcttcctggtgcagctaatcatcgacacaccaaccagtcccgttacatccggattaccactgtttttcgtgatcaccgtgacagccatcaagcaaggctacgaggactggctgcggcacaaagctgataacgcaatgaatcagtgtccagtccattttatacagcacggcaaattggtccgcaagcagagtcgcaagctgagagtcggagacatcgtcatggtgaaggaggatgaaacattcccctgtgacttaatctttttgagcagtaacagaggcgacggcacatgtcatgtaaccactgcctcactcgatggagagtcaagtcacaaaacacattatgccgtgcaggatacaaagggtttccatactgaagaagacattgggggtttacacgcaacgatagagtgtgaacagccacagccagacctctacaaattcgttggtagaattaatgtatacagcgacctcaacgatcccgttgtccgcccactgggtagcgaaaatctgctgctgcgtggcgcgaccctgaagaacactgaaaaaattttcggcgtggcaatctacactggcatggaaacaaaaatggctctcaactatcagtccaagagccagaagagatccgctgtggagaagtcaatgaacgctttcctgatcgtctatttgtgtatcctcatctctaaggctttgatcaacacggtgctaaaatacatgtggcagtccgagccctttcgcgatgagccttggtacaatcagaagaccgagtctgagaggcaaagaaatctcttcctgaaagctttcaccgactttctggcctttatggtgttgttcaactatatcatcccggtcagcatgtacgtgacggttgaaatgcagaagttccttggttcctacttcatcacctgggacgaagacatgtttgacgaggaaaccggggagggcccactggtgaatacttctgacctgaacgaagagttgggccaggtggagtacatttttactgataaaaccgggaccttgacagaaaataatatggagtttaaggagtgctgcatcgagggtcacgtgtacgtccctcacgtgatttgcaatgggcaggtgctgcccgagagctctggaatagatatgattgattccagcccatccgtcaatggaagggaacgtgaagagctctttttcagagcgctgtgtctgtgtcacacggtgcaagtgaaagacgacgactcagtggacggccccaggaagtctccagatggtgggaagtcttgcgtatacatctcgtcctcccctgacgaagttgcactggtggaaggcgtgcagagactggggttcacttacttgcgcttaaaagataattacatggagatcctgaatcgagaaaatcacatcgagcgtttcgagcttctggaaatccttagctttgattcagtcaggcgccggatgagcgtcatagtgaagtctgccacaggggagatctatctcttctgtaaaggcgccgactcaagcatttttccccgggtgatcgagggcaaagtggaccaaattcgggcgagggtggagagaaacgccgtcgaaggcttgagaactttgtgcgtggcctataaaagattgattcaagaagaatacgaaggcatctgcaaactcctgcaagccgcaaaggtcgcattacaggatcgcgagaaaaagctcgctgaagcttatgagcagatcgagaaggatctcaccctcttgggcgctactgcagttgaagatcgactgcaagaaaaagctgcggacaccattgaagcgttacaaaaggctggaataaaggtgtgggtccttacgggggataaaatggagaccgccgctgccacttgttacgcctgcaaactgtttagacgaaatactcagctactggagctgaccacaaagaggattgaagagcagtccctgcacgacgtgttgtttgaactatccaagacagtcttacggcactctgggtctctgacccgtgacaacttgtccggattgagcgccgatatgcaagactacggccttattatcgatggggcagcgttatctctgattatgaagccacgtgaagacgggtcttctggcaattatcgggaactgttcctggagatatgcaggagctgctctgccgtattgtgttgtagaatggcaccgctgcagaaggcgcagattgtgaagctgatcaaattctccaaggaacacccaatcaccctagcaatcggtgatggcgcaaatgatgtgagcatgattcttgaggcacatgtgggcataggagtgataggcaaagagggtcgccaagcagcccggaatagcgattatgccattcctaagtttaagcacctgaagaagatgctcctggtgcacggacacttctactacatcaggattagtgaactggtgcaatatttcttctataaaaacgtgtgcttcatcttcccccagttcctttaccagtttttctgcggcttcagtcagcaaaccctgtacgacacagcttacctcaccctctacaatatcagcttcacttcacttcccattctcctgtatagtctgatggagcagcacgtcggtatcgacgttctgaagcgtgaccctacactgtaccggtatcatcctcccaattccctgtcatag

SEQ ID NO: 185190 - DNA, 3405 bp, Artificial Sequence
  derived and/or modified sequence
atggactgcagcctggtgcggaccctggtgcaccggtactgcgccggagaggaaaactgggtagactcgcgtaccatctatgtgggtcatagggaaccaccacctggtgcagaggcttacatcccgcagcgctaccctgataatcgcatcgtgtcctccaagtacacattctggaacttcatccctaaaaaccttttcgagcagttcaggcgcgtcgcaaacttctacttcctgatcatctttctggttcagcttataatagacactcctacttcccccgttacctcaggactccccctcttctttgtcatcacagtgactgccataaagcagggctacgaggactggttgcggcataaggcggataatgcaatgaaccagtgccctgtgcacttcattcagcacggaaagttggttcggaaacagagccgcaagctgcgcgtgggtgacattgtgatggtaaaggaggatgaaaccttcccttgtgatctcatatttttgtcctctaataggggagacggcacatgccacgtgactactgcaagcctggacggtgagtcttcgcataaaacccactacgcggtgcaggacaccaaagggtttcacacagaggaggatataggcggtctgcatgcgaccattgaatgcgagcagccacagccagatctctataagttcgtgggaagaatcaatgtctactcagatctgaatgaccctgttgtgagacctttaggttctgagaatctgcttctcaggggcgcgacactgaagaacacagagaaaatcttcggcgtagcaatttataccggaatggagaccaagatggctttgaattatcagtcaaagagccagaagcgatccgctgtggagaagagcatgaatgccttcttaatcgtctatctgtgcatcctaattagcaaagctcttataaacactgttctaaagtacatgtggcagtcagagccttttcgcgatgaaccttggtacaaccaaaagacagaatctgaacgccagcggaatcttttccttaaagcattcaccgacttcctggcatttatggtactcttcaactacataattccagtgtcaatgtacgtgacggttgagatgcaaaagttcctgggttcttatttcatcacctgggacgaagatatgttcgacgaggaaacgggggaagggccactggtgaatactagtgatctgaatgaggagctcgggcaagtcgaatacatctttactgataagactggtacccttactgaaaacaacatggaatttaaagagtgttgtatagaaggccatgtttacgtgccccatgtgatctgtaacggacaggtgctaccagagagctcgggtatcgatatgattgactcatctcctagcgtcaacggccgagaacgtgaggagctgttcttcagagctctttgcctgtgtcacacagtacaggttaaggatgatgacagcgttgacggcccaaggaaatccccggacgggggcaagtcttgcgtctacatttcaagtagtccggatgaggtagccctggtcgaaggcgtccagcgcctggggtttacttacctgcggcttaaagacaattatatggagatcctgaacagagaaaaccacatcgaacgcttcgaactgttagaaatactctcattcgattccgtgagacgtcgcatgagcgtaatcgtaaaatccgctacgggtgagatttacctgttttgtaagggcgccgattcctcaatttttccacgtgtgattgagggtaaagtggaccagatcagggcccgtgtcgagcgtaacgccgtagaaggcctacgaactctatgcgtagcgtacaagcgccttatccaggaggaatacgagggcatctgcaagctgctgcaggccgcaaaagttgccctgcaggacagggagaagaaattggccgaggcatacgagcaaattgaaaaggatcttactctattgggagcaacggctgtagaagacaggttacaagaaaaggcagctgacacgatagaagccctgcagaaagccggaatcaaggtctgggtgctgactggcgacaagatggagacagccgctgccacctgctatgcctgtaaattatttaggcggaacactcaactgttggagttgactacaaagagaatcgaggaacagagcctgcatgacgtgttgttcgagttgagcaagaccgtcctcaggcattcaggcagcttaacaagggacaacctcagtgggctgtccgcggatatgcaggattacggcttgataatagatggggccgcactttctcttatcatgaaaccgcgcgaagacggtagcagcgggaattatcgagagctgtttttggagatatgcagaagctgtagcgcagttctatgctgccgcatggcccccctgcagaaagctcagattgttaaattgataaaatttagcaaagagcaccccatcacactggccattggggacggcgccaatgacgtgagcatgattctggaagcccacgtaggtattggtgtgataggcaaagagggccgacaagccgcccggaacagcgactacgccattcccaagtttaaacatctaaaaaagatgctgcttgtgcacggccatttctattacatacggatctctgagctagtacagtattttttctacaagaatgtgtgctttatctttccccaatttctctatcagtttttttgtggtttttcccagcagactttgtatgacacagcttacttaacactgtacaatatcagcttcacaagcctcccgattctgctgtactccctgatggaacaacatgtgggtattgatgtgctgaagagggacccaactctgtaccgggacgttgctaagaacgcactcctgaggtggagggtgttcatctactggaccctactgggactctttgatgccttggtgtttttcttcggcgcatactttgtgtttgagaacaccaccgttacatcaaatggccagatttttgggaactggacattcggcactctggtgttcacggtcatggtcttcactgtaacactgaaactggctctggatactcattattggacctggattaaccactttgtcatctggggatccctcctattttacgtagtgttttccctgctgtggggtggcgtcatttggccattcctgaactatcaacggatgtactacgtttttattcagatgctgagctccgggcctgcatggctcgctattgtactactcgtgaccatttcccttcttccggacgtattaaagaaagtcctctgtcggcagctgtggcctactgccaccgaacgagtgcagaccaaaagtcagtgcttaagtgtagagcagtctaccattttcatgctgtcccagacaagcagcagcctgagtttctag

SEQ ID NO: 185191 - DNA, 3405 bp, Artificial Sequence
  derived and/or modified sequence
atggattgcagcctggtgaggactttagtgcacagatattgcgcaggcgaggaaaactgggtcgactcacggacgatttacgtcggccaccgggagccgccacccggtgctgaggcttacatcccgcagaggtaccctgacaacaggatagtaagcagcaagtatactttttggaactttatcccaaaaaatctcttcgagcagtttaggagggtcgccaatttttattttttgatcatctttctcgtccaactgattattgacacccccaccagccccgtgacgtctggactcccactgttttttgtaataacagtgaccgctatcaaacaggggtacgaggactggctcaggcataaggccgacaacgccatgaaccagtgcccagttcattttatacagcatgggaagcttgtaaggaagcagtcccgcaagctgcgggtcggcgacatcgtgatggtgaaggaagacgagacattcccctgtgacctcattttcctgtcatccaacaggggagatggcacatgccatgtgacgactgccagcctcgatggtgaatccagccacaaaacacactacgcggtgcaggacaccaaggggttccataccgaagaagacatcgggggactgcatgctactattgagtgtgaacagccccagccagacctctacaagtttgtgggtagaattaacgtttacagcgatctcaacgatcctgtggtaaggcctctcggctctgagaacctcctgctgcgaggggctacactaaagaatacagagaagattttcggcgtcgcgatttatacaggcatggagacaaaaatggctttaaattaccaatccaagtcccaaaaacgctccgccgtggagaaatccatgaacgctttccttattgtgtacctgtgtattctcatatctaaggccctaatcaacacagttctcaagtatatgtggcagtcagaaccattcagagacgagccctggtacaaccagaagactgaatctgaacgccagcgaaacctcttcctaaaagccttcacagacttcttggcttttatggtgctctttaactatattatacccgtctcgatgtacgtcacagtggaaatgcagaaattcttggggtcttacttcattacttgggacgaggacatgttcgacgaagagactggggaggggccactggtaaacacaagtgatcttaatgaggagctgggccaggtagaatatatcttcacagacaagactggcacactgaccgagaataacatggaatttaaagaatgctgtatcgagggacatgtgtatgtcccccatgtgatttgtaacgggcaagtgctgcccgagtcctccggcatcgatatgatcgacagcagtccctctgtgaacgggcgagagagggaggagctctttttcagagccctctgtctgtgtcacaccgtgcaggtcaaggacgatgatagcgtggacggacccagaaagtcacccgacggaggaaaatcctgtgtctatatttcatcctcgccagatgaagtcgctctggtagagggggtgcagagattgggttttacatacctgcgccttaaggataactacatggaaattcttaacagggaaaaccatatcgaacgctttgaactcctcgaaatcttgagcttcgactctgtgagacgcaggatgtcagttattgtgaagtcagctactggggagatctatttattctgcaagggtgcagacagctccattttccccagggtcatcgaaggcaaggtcgaccagattcgggcaagagtggagaggaatgcagtggaggggttacgtacattgtgcgtggcatacaaaaggctgatccaggaagaatacgaaggcatctgcaaacttttgcaagcagctaaggtcgccctacaggaccgcgaaaaaaaattggctgaagcgtatgagcaaattgagaaagacctgaccctgttgggggctacagccgtcgaggatagattacaggagaaggctgctgatactatagaagcacttcagaaggccggtattaaagtgtgggtgctcactggcgataaaatggagactgccgctgcaacctgttacgcctgcaagctgtttagacgcaatactcaacttttggagctgacaacaaaaagaattgaggaacagagcttacacgacgtgcttttcgagctaagtaaaaccgtcttgcgacattccggatcccttactagagacaatctctcgggattatcagcagacatgcaggattacggcctgattatcgacggcgctgccctctccctcattatgaaacccagggaggacggatcttcaggcaattacagggaacttttcttggaaatctgccgatcctgttcggcagtactgtgctgcaggatggcccctctccagaaagctcaaatcgttaagctcattaagttctctaaagagcacccgatcaccctagcaattggcgatggagctaatgacgtatcaatgattctggaagcccatgtcggcatcggagtcatcggtaaggaaggaaggcaggccgctaggaatagtgactatgccattcctaagtttaagcacctgaagaagatgcttctggttcatgggcatttctactacattcgaatttccgagctggtgcagtacttcttctataagaatgtctgctttatctttccccaatttctctatcaattcttctgcggatttagccagcagacactgtacgatactgcctatctcaccctgtacaacatttccttcacgagtctccccatcctcctgtatagcctgatggagcagcatgttggcattgacgtgctaaaacgcgaccctactctttacagagacgtggctaagaatgcactactgcgctggcgagtgttcatttattggacactcctggggctgttcgacgcgcttgtatttttctttggagcgtactttgtttttgagaacacaaccgtcaccagcaacgggcagattttcggcaattggacattcgggactcttgtgttcaccgtcatggtttttactgtcaccctcaaactcgcacttgatacccattactggacctggatcaatcactttgtgatctggggatccctgttattttatgtggtttttagtttgctgtggggaggcgtcatatggccctttctgaattaccagcggatgtactacgtcttcatccagatgctgagctcaggaccggcatggctagctattgtcctgctcgtgacaatcagtctcctgcctgatgtgttaaagaaggtgttgtgccgacagttatggcctacggccacagagcgggtgcaaactaagtcccaatgtctctctgtggaacagtccaccattttcatgctttcacagacctcaagctcactaagcttctag

SEQ ID NO: 185192 - DNA, 3405 bp, Artificial Sequence
  derived and/or modified sequence
atggattgctccttagttagaactttagtgcatagatattgcgccggagaagagaattgggttgattcccggactatttacgtgggccaccgggagccacctcctggagcggaggcatatattccccagcgttatcccgataatcgaatcgtgagcagcaagtacaccttctggaattttatcccaaaaaatctgtttgagcaatttaggagagtggccaacttttactttttaattatattcctagttcaactgatcatcgataccccaacctctcccgtgacatcaggcctgccactcttttttgtgatcactgtgaccgccataaagcagggatatgaagattggctgcggcataaggctgataatgccatgaaccagtgccctgttcacttcatccaacacggcaagctcgtcaggaagcagagcaggaaattaagagtgggtgatatcgttatggttaaagaggatgagaccttcccctgtgaccttatctttctatcctccaatcgaggggacggcacttgtcacgtgacaacggcctccctggatggcgagagttctcacaaaacacattacgctgttcaggacactaagggatttcatacagaagaagatatcggaggcctgcatgcgacgatagagtgcgagcaaccgcagccagatttatacaagtttgtgggaagaatcaatgtgtatagtgaccttaatgatcctgtggtgcgcccactaggtagcgaaaacctcctcctgcgcggtgcgacactcaagaacaccgaaaagatcttcggggtcgcgatatatacgggaatggagaccaagatggccctgaactatcagtcaaaatcacagaaacgcagcgctgtcgagaagagcatgaatgcgttcctcatagtttacctgtgtatactcatttcaaaggccctgattaatactgttctcaagtacatgtggcaatccgaacctttccgtgatgagccttggtacaaccagaaaaccgagtcagagcgtcagcggaacctttttctcaaggcttttacagacttcctggcgttcatggtcctgttcaattacatcatcccagtgtccatgtatgtgactgtggaaatgcagaagttcctcggctcgtacttcatcacttgggatgaggatatgtttgatgaggagaccggcgaagggcctttggtgaatacatccgacctgaacgaagaactgggccaggtcgaatacattttcaccgacaagacaggcacattgactgagaataatatggaattcaaggagtgctgtattgagggccatgtgtatgtacctcatgtgatctgcaatggtcaggtcctcccggaaagcagcgggattgatatgattgattcctctccgagcgttaacgggagggagcgggaggagctgttctttagggcgctgtgcctttgtcacaccgtgcaggtgaaagacgacgatagcgttgacggacctaggaaatctcccgatggcggtaagtcttgtgtctatatctcttcctctcccgacgaggtggcgcttgttgaaggtgtccagcgccttggctttacatatctaaggctgaaggacaattatatggaaatattaaacagagagaatcatattgaaaggtttgagttactagaaatcctttcttttgacagcgttaggcgcaggatgtctgtgatcgtgaagtcggccacaggcgaaatctacctgttctgcaagggtgcggattccagcatatttccgcgagttatagagggaaaagtggatcagattcgagctagggtcgagaggaacgccgttgagggtctacgcaccctgtgcgtggcctataaacggctcattcaggaggagtatgaggggatttgtaaattactccaggccgctaaagtcgcactccaagatcgtgaaaaaaagctggctgaggcttatgaacaaatagagaaagacctaactctgttaggcgctacagctgtggaagaccggcttcaggaaaaggccgctgacactatcgaagcactgcagaaagcaggaattaaagtctgggtcctgacaggggacaagatggagacggctgctgccacatgctacgcatgcaagctgtttaggagaaatacccaactgctggagttgaccactaagcgcatcgaggaacagtccttacacgatgtgttgttcgagttgtccaagaccgtgcttcgtcattccggctctctcaccagggacaatctcagcggtctgagcgccgatatgcaagattacgggctcatcatcgacggggcagccctttccctgattatgaagcccagggaagatggttcttcaggcaattaccgagaactgttcctggagatctgccgctcctgcagcgctgtgctctgttgccggatggcgcctctccaaaaggcccagattgtgaagttaataaaattcagcaaagagcatcccattactctggcgattggggatggtgcaaatgacgtgagcatgatcctggaggctcatgtgggtatcggcgtcatcggtaaagagggcagacaggccgctaggaacagcgactacgccatccccaaatttaagcatctaaaaaaaatgctgctcgtgcatggtcacttctattatatccgcatctccgagctcgttcagtattttttctataagaatgtttgttttatcttcccacagttcctgtaccaatttttttgtgggtttagtcagcagacattatacgataccgcttacctgactctgtacaacataagttttacaagtctgcctattcttctgtattctctgatggaacagcacgttgggattgatgtgctgaagagagatccaaccctgtatcgggatgtcgcaaaaaatgctttgcttagatggagggttttcatatactggactctcctggggctgtttgatgctctggtttttttctttggcgcatacttcgtgttcgaaaatacaaccgtgacttccaacggacaaatctttggtaactggacttttggtaccctggtgttcaccgtgatggtctttacggtgactttaaagctggccctggacacacattattggacttggattaaccactttgtcatctggggttcactgctgttctacgtcgtgttctccctgctctgggggggagtgatatggcccttcctcaactatcagcggatgtactacgtgttcattcaaatgctgtctagcggccctgcatggttagcaatcgtgttactagtgaccattagcctcttgcccgacgtactaaaaaaggttttgtgcaggcagctctggccaaccgccacggaaagggttcagaccaaatcccaatgcctgagtgtggaacaatccaccatatttatgctctcacagacatcttcctccctgtctttttag

SEQ ID NO: 185193 - DNA, 2808 bp, Artificial Sequence
  derived and/or modified sequence
tagtacgtggggcatagagaaccgccaccaggggcagaggcgtacatccctcagcggtaccccgacaatcgcattgtcagctctaagtacactttttggaacttcattcctaaaaatctgtttgagcagttccgtcgcgttgctaacttttacttcctcataatcttcttggtacaacttataatcgatacccctacatccccagttacctccggcctgcctctatttttcgtgatcacggttacagccattaagcaagggtatgaggattggctgcgacataaggcagacaacgccatgaaccaatgtcctgtgcactttatccagcacggaaagctcgtgcgtaagcaatcccgcaaactgcgcgtgggcgacatcgtgatggtcaaagaagacgaaacctttccgtgcgacttgatttttctgtcttctaaccggggtgacgggacttgccacgtgaccacagccagtctcgatggtgaatctagtcacaagacgcactacgccgtccaggacactaagggctttcacacagaagaggacattggagggcttcatgccactatcgaatgcgagcagccacaacccgatctgtataagttcgtcgggaggatcaatgtttactcagacttaaatgatcctgtcgttcggccacttggatccgagaacctgttattgcggggagcaacactgaaaaacacggaaaagatcttcggagtggccatctacaccggcatggagacaaaaatggcccttaactaccagtccaagtcccagaagagaagcgctgtggagaagtcaatgaatgccttccttatcgtctacctatgtattcttatatcaaaagcattgatcaatacggtcctgaagtatatgtggcagtctgaaccatttagagacgaaccttggtataatcagaagacagagtcggagaggcagcgaaatctcttcctgaaggcctttactgacttcttagctttcatggtgttgttcaactacattatacctgtgtcaatgtacgtgacagtggaaatgcagaagtttctcggcagctatttcattacgtgggatgaggatatgttcgacgaagagacaggggagggacccctagtaaatacctccgacctaaatgaagaactgggtcaggtagagtacatctttacggacaaaacggggactctgacagagaataacatggagttcaaagagtgctgtatcgaaggacatgtctatgtccctcatgtgatctgcaatggccaggtgttgcctgagtcctcaggtattgatatgatcgattcgagtccatcggtcaatggtagagagcgggaggagcttttcttccgtgcattgtgcctatgccacacggttcaagtgaaagatgatgactcagtcgatgggccacgcaagtctcctgacggcggaaagagttgtgtctacatatcctcgtcacctgacgaagttgctctggtcgagggcgtgcaaagactgggttttacgtacctccgcctgaaggataactatatggagattctgaacagagagaatcacatcgagcgatttgagttattggaaatcttaagcttcgattccgtgaggagaaggatgtccgttatcgtaaaatctgccaccggtgaaatctacctgttttgcaagggcgctgacagcagtatcttccctcgcgtcatcgagggcaaggtggaccaaattcgggcaagggtcgagaggaacgctgtagagggcctacgaacgctgtgtgtagcgtacaagagattgatccaagaagagtacgagggcatctgtaaattacttcaggcggctaaagtggccctgcaggaccgggagaagaagctggccgaagcatacgaacagatcgagaaggatctgaccctccttggggcaactgcagtggaggacagactccaggagaaagcagctgataccatcgaggcactccaaaaggcaggcataaaggtctgggtgctgaccggcgataagatggaaacggccgcagcaacctgttacgcttgcaagctattcagaaggaacacccagcttttagaactgaccactaagcgtatcgaagaacagtcactgcacgacgtcttatttgagttgagcaagacggtgttgcgtcatagcggctccctgacgcgcgacaatttgagcggcctctccgccgatatgcaggattacggactgataattgatggtgccgctctgtctcttatcatgaaacctagagaggatggcagtagcggcaattacagggagctatttctcgaaatttgtcgaagttgcagcgccgttctgtgctgtcgtatggctcccctgcagaaagcccaaatcgttaagctgataaaattttcaaaagagcatccaatcaccctggcaattggagacggtgccaacgatgtctccatgatcctggaagctcatgtcggcataggagtgatcggcaaagaaggaaggcaagctgcccgaaactccgattatgccataccaaagtttaagcacttgaagaaaatgctcttagtgcacggacatttttattacatcagaatttcagaacttgtgcaatacttcttctacaagaatgtctgtttcatcttcccccagtttctttaccagttcttttgtggttttagccaacagacactatacgacaccgcctatctgacgctctataatatcagtttcactagcctgcctattttactgtacagccttatggagcaacatgtcggtatagacgtactgaagcgagacccaaccctctacaggtaccatccacccaacagcctcagctag

SEQ ID NO: 185194 - DNA, 3405 bp, Artificial Sequence
  derived and/or modified sequence
atggattgcagcctggtcaggacactcgttcatagatactgcgccggtgaagagaactgggtcgactctaggactatctacgtagggcacagggaacctccacccggtgctgaagcctatattccacagaggtaccccgataataggatcgtctcttccaaatatactttttggaattttatccctaagaacttattcgagcagttccggagggtggctaacttttactttctgatcatctttcttgtccagctgattattgacaccccaaccagcccggtcacatcaggcctcccattgtttttcgttatcacagttactgccattaagcaggggtatgaggactggctgaggcacaaagccgataatgctatgaaccagtgtccagtgcactttatccaacatgggaagctggttcgcaagcagtcaaggaagcttcgcgtgggggacatcgtgatggtaaaagaagatgagacttttccttgtgacctaatcttcctctcatcaaatagaggtgatggcacttgtcacgtgacaactgctagcctggatggagagtcatcacacaagacccactacgccgtccaggacaccaaaggctttcatacagaagaagacatcggtggcctgcatgccactattgaatgtgagcagccccagcctgacctatacaagtttgtggggcgtattaacgtgtacagcgacctgaacgatcccgtcgtgcgcccactggggtctgaaaacctgcttttgagaggcgctacactgaagaacaccgaaaagatattcggggttgcgatctacacgggcatggagacgaagatggccctgaactaccagtctaagtcccagaagcgcagcgccgtggagaagagcatgaacgccttccttattgtctatctgtgcatcctgatcagcaaggcactgataaacacggtccttaagtatatgtggcagagtgagccatttcgggacgaaccctggtataaccagaagacagagtctgagcgacagcgcaatctcttccttaaggcttttaccgacttccttgctttcatggtgctgtttaattatataattccggtctcaatgtacgtcacggtcgaaatgcagaagtttttaggaagctattttataacgtgggacgaagatatgttcgatgaagaaacaggtgaagggcctctggtgaacacctctgacctgaacgaagaattggggcaagtcgaatatatcttcaccgataagacgggcacactgacagagaataatatggagtttaaagaatgctgcatcgagggccatgtgtacgtgccgcatgttatctgcaacggccaggtactccctgagagctcgggaatcgacatgattgacagctctcccagtgttaacggtagagaaagagaggagctgttcttcagagccctttgtctgtgccatactgtccaggtgaaggatgatgacagcgtagacggccctagaaagagtcccgacggcggaaagagctgcgtctacatttcgtccagccctgacgaagtggcccttgtggaaggcgtacagagactggggttcacatatcttcggttgaaggataactatatggagatcttgaatagagaaaaccatattgaaagatttgagctgttggaaatcctatcttttgacagtgtgcgccgtaggatgtcagtgattgtaaaaagcgccactggggagatttacctcttctgcaagggcgctgattcttcaatcttccccagagtgatagaggggaaggttgaccagatccgcgctagagtcgagagaaacgcagtagaggggttgagaaccttatgcgtggcttacaaacgcctgatccaggaagaatacgagggaatctgtaaactcctccaggcagccaaggtggccttacaggacagagaaaaaaaactcgcggaggcttatgaacagatcgagaaagacttaactctgctcggagccactgccgttgaggatcgactgcaggagaaggctgccgacaccatcgaagccctgcagaaggcgggaatcaaggtgtgggtgctcacaggagacaaaatggagaccgccgcagccacgtgctacgcctgtaagctgttccgacggaacactcagcttttagaactgacaaccaagcgcattgaggaacagagcctccatgacgtcctatttgaactgagcaaaacagtcctaagacatagcgggagtctgacaagggacaacctgagcggactttctgcggatatgcaagattacggactcataattgatggggctgcgttaagcctgatcatgaaaccaagagaagacgggtcttccggcaactacagggagctgttcctggagatctgccggagttgcagtgcggtgctctgttgtcggatggcaccactgcagaaggctcaaatcgtgaagctgattaaatttagtaaggagcacccaatcactctagcaataggagacggggcaaatgatgtctccatgatcctggaagcccatgttggcattggggtgattggtaaagaaggtcgacaggcggctcgcaacagcgattacgccattcctaaatttaagcacttgaaaaaaatgctactggtccacggacatttttattacatccggatatctgaactagtgcagtactttttctataaaaatgtgtgttttatctttccgcaattcctctatcaattcttctgcggtttttctcagcagacgctgtacgacacagcctacttaactctctacaacatcagctttacctcgctccctattctgctctattctctaatggaacagcatgtaggcattgatgtgcttaagagggaccccacactttaccgagacgtagccaaaaatgctctgctgagatggagggtgtttatctactggacattgctggggcttttcgatgcacttgtcttcttttttggtgcgtattttgtctttgagaacacaactgtgacttccaatgggcaaatcttcgggaactggacctttggaacacttgtttttacagttatggtgttcacagtcactctgaagctggccctcgatacccattactggacctggatcaatcactttgtgatctggggttcccttttattttatgtggtcttctcactcctctgggggggagtgatctggccttttctgaattaccagcggatgtattacgtgtttattcagatgctaagcagcggacccgcttggctggctatcgtgttactagttacaatctctttattaccggatgttttgaagaaggtgctttgccgacagctctggccgaccgcaaccgaaagggtccagaccaagtctcagtgcttgtcagtcgagcaaagcacaatctttatgctgtcccagacctcctcttccttgtcgttctag

SEQ ID NO: 185195 - DNA, 3493 bp, Artificial Sequence
  derived and/or modified sequence
gcggccgcactagtaccccggagcccatgggcgcgccgagccgggcgcgggggcgctgaacggcggagcgggagcggccggaggagccatggactgcagcctcgtgcggacgctcgtgcacagatactgtgcaggagaagagaattgggtggacagcaggaccatctacgtgggacacagggagccacctccgggcgcagaggcctacatcccacagagatacccagacaacaggatcgtctcgtccaagtacacattttggaactttatacccaagaatttatttgaacaattcagaagagtagccaacttttatttccttatcatatttctggtgcagttgattattgatacacccacaagtccagtgacaagcggacttccactcttctttgtcattactgtgacggctatcaaacagggttatgaagactggcttcgacataaagcagacaatgccatgaaccagtgtcctgttcatttcattcagcacggcaagctcgttcggaaacaaagtcgaaagctgcgagttggggacattgtcatggttaaggaggacgagacctttccctgcgacttgatcttcctttccagcaaccggggagatgggacgtgccacgtcaccaccgccagcttggatggagaatccagccataaaacgcattacgcggtccaggacaccaaaggcttccacacagaggaggatatcggcggacttcacgccaccatcgagtgtgagcagccccagcccgacctctacaagttcgtgggtcgcatcaacgtttacagtgacctgaatgaccccgtggtgaggcccttaggatcggaaaacctgctgcttagaggagctacactgaagaacactgagaaaatctttggtgtggctatttacacgggaatggaaaccaagatggcattaaattatcaatcaaaatctcagaagcgatctgccgtggaaaaatcgatgaatgcgttcctcattgtgtatctctgcattctgatcagcaaagccctgataaacactgtgctgaaatacatgtggcagagtgagccctttcgggatgagccgtggtataatcagaaaacggagtcggaaaggcagaggaatctgttcctcaaggcattcacggacttcctggccttcatggtcctctttaactacatcatccctgtgtccatgtacgtcacggtcgagatgcagaagttcctcggctcttacttcatcacctgggacgaagacatgtttgacgaggagactggcgaggggcctctggtgaacacgtcggacctcaatgaagagctgggacaggtggagtacatcttcacagacaagaccggcaccctcacggaaaacaacatggagttcaaggagtgctgcatcgaaggccatgtctacgtgccccacgtcatctgcaacgggcaggtcctcccagagtcgtcaggaatcgacatgattgactcgtcccccagcgtcaacgggagggagcgcgaggagctgtttttccgggccctctgtctctgccacaccgtccaggtgaaagacgatgacagcgtagacggccccaggaaatcgccggacggggggaaatcctgtgtgtacatctcatcctcgcccgacgaggtggcgctggtcgaaggtgtccagagacttggctttacctacctaaggctgaaggacaattacatggagatattaaacagggagaaccacatcgaaaggtttgaattgctggaaattttgagttttgactcagtcagaaggagaatgagtgtaattgtaaaatctgctacaggagaaatttatctgttttgcaaaggagcagattcttcgatattcccccgagtgatagaaggcaaagttgaccagatccgagccagagtggagcgtaacgcagtggaggggctccgaactttgtgtgttgcttataaaaggctgatccaagaagaatatgaaggcatttgtaagctgctgcaggctgccaaagtggcccttcaagatcgagagaaaaagttagcagaagcctatgagcaaatagagaaagatcttactctgcttggtgctacagctgttgaggaccggctgcaggagaaagctgcagacaccatcgaggccctgcagaaggccgggatcaaagtctgggttctcacgggagacaagatggagacggccgcggccacgtgctacgcctgcaagctcttccgcaggaacacgcagctgctggagctgaccaccaagaggatcgaggagcagagcctgcacgacgtcctgttcgagctgagcaagacggtcctgcgccacagcgggagcctgaccagagacaacctgtccggactttcagcagatatgcaggactacggtttaattatcgacggagctgcactgtctctgataatgaagcctcgagaagacgggagttccggcaactacagggagctcttcctggaaatctgccggagctgcagcgcggtgctctgctgccgcatggcgcccttgcagaaggctcagattgttaaattaatcaaattttcaaaagagcacccaatcacgttagcaattggcgatggtgcaaatgatgtcagcatgattctggaagcgcacgtgggcataggtgtcatcggcaaggaaggccgccaggctgccaggaacagcgactatgcaatcccaaagtttaagcatttgaagaagatgctgcttgttcacgggcatttttattacattaggatctctgagctcgtgcagtacttcttctataagaacgtctgcttcatcttccctcagtttttataccagttcttctgtgggttttcacaacagactttgtacgacaccgcgtatctgaccctctacaacatcagcttcacctccctccccatcctcctgtacagcctcatggagcagcatgttggcattgacgtgctcaagagagacccgaccctgtacagggacgtcgccaagaatgccctgctgcgctggcgcgtgttcatctactggacgctcctgggactgtttgacgcactggtgttcttctttggtgcttatttcgtgtttgaaaatacaactgtgacaagcaacgggcagatatttggaaactggacgtttggaacgctggtattcaccgtgatggtgttcacagttacactaaagcttgcattggacacacactactggacttggatcaaccattttgtcatctgggggtcgctgctgttctacgttgtcttttcgcttctctggggaggagtgatctggccgttcctcaactaccagaggatgtactacgtgttcatccagatgctgtccagcgggcccgcctggctggccatcgtgctgctggtgaccatcagcctccttcccgacgtcctcaagaaagtcctgtgccggcagctgtggccaacagcaacagagagagtccagactaagagccagtgcctttctgtcgagcagtcaaccatctttatgctttctcagacttccagcagcctgagtttctga

SEQ ID NO: 185196 - DNA, 3163 bp, Artificial Sequence
  derived and/or modified sequence
tctacgtgggacacagggagccacctccgggcgcagaggcctacatcccacagagatacccagacaacaggatcgtctcgtccaagtacacattttggaactttatacccaagaatttatttgaacaattcagaagagtagccaacttttatttccttatcatatttctggtgcagttgattattgatacacccacaagtccagtgacaagcggacttccactcttctttgtcattactgtgacggctatcaaacagggttatgaagactggcttcgacataaagcagacaatgccatgaaccagtgtcctgttcatttcattcagcacggcaagctcgttcggaaacaaagtcgaaagctgcgagttggggacattgtcatggttaaggaggacgagacctttccctgcgacttgatcttcctttccagcaaccggggagatgggacgtgccacgtcaccaccgccagcttggatggagaatccagccataaaacgcattacgcggtccaggacaccaaaggcttccacacagaggaggatatcggcggacttcacgccaccatcgagtgtgagcagccccagcccgacctctacaagttcgtgggtcgcatcaacgtttacagtgacctgaatgaccccgtggtgaggcccttaggatcggaaaacctgctgcttagaggagctacactgaagaacactgagaaaatctttggtgtggctatttacacgggaatggaaaccaagatggcattaaattatcaatcaaaatctcagaagcgatctgccgtggaaaaatcgatgaatgcgttcctcattgtgtatctctgcattctgatcagcaaagccctgataaacactgtgctgaaatacatgtggcagagtgagccctttcgggatgagccgtggtataatcagaaaacggagtcggaaaggcagaggaatctgttcctcaaggcattcacggacttcctggccttcatggtcctctttaactacatcatccctgtgtccatgtacgtcacggtcgagatgcagaagttcctcggctcttacttcatcacctgggacgaagacatgtttgacgaggagactggcgaggggcctctggtgaacacgtcggacctcaatgaagagctgggacaggtggagtacatcttcacagacaagaccggcaccctcacggaaaacaacatggagttcaaggagtgctgcatcgaaggccatgtctacgtgccccacgtcatctgcaacgggcaggtcctcccagagtcgtcaggaatcgacatgattgactcgtcccccagcgtcaacgggagggagcgcgaggagctgtttttccgggccctctgtctctgccacaccgtccaggtgaaagacgatgacagcgtagacggccccaggaaatcgccggacggggggaaatcctgtgtgtacatctcatcctcgcccgacgaggtggcgctggtcgaaggtgtccagagacttggctttacctacctaaggctgaaggacaattacatggagatattaaacagggagaaccacatcgaaaggtttgaattgctggaaattttgagttttgactcagtcagaaggagaatgagtgtaattgtaaaatctgctacaggagaaatttatctgttttgcaaaggagcagattcttcgatattcccccgagtgatagaaggcaaagttgaccagatccgagccagagtggagcgtaacgcagtggaggggctccgaactttgtgtgttgcttataaaaggctgatccaagaagaatatgaaggcatttgtaagctgctgcaggctgccaaagtggcccttcaagatcgagagaaaaagttagcagaagcctatgagcaaatagagaaagatcttactctgcttggtgctacagctgttgaggaccggctgcaggagaaagctgcagacaccatcgaggccctgcagaaggccgggatcaaagtctgggttctcacgggagacaagatggagacggccgcggccacgtgctacgcctgcaagctcttccgcaggaacacgcagctgctggagctgaccaccaagaggatcgaggagcagagcctgcacgacgtcctgttcgagctgagcaagacggtcctgcgccacagcgggagcctgaccagagacaacctgtccggactttcagcagatatgcaggactacggtttaattatcgacggagctgcactgtctctgataatgaagcctcgagaagacgggagttccggcaactacagggagctcttcctggaaatctgccggagctgcagcgcggtgctctgctgccgcatggcgcccttgcagaaggctcagattgttaaattaatcaaattttcaaaagagcacccaatcacgttagcaattggcgatggtgcaaatgatgtcagcatgattctggaagcgcacgtgggcataggtgtcatcggcaaggaaggccgccaggctgccaggaacagcgactatgcaatcccaaagtttaagcatttgaagaagatgctgcttgttcacgggcatttttattacattaggatctctgagctcgtgcagtacttcttctataagaacgtctgcttcatcttccctcagtttttataccagttcttctgtgggttttcacaacagactttgtacgacaccgcgtatctgaccctctacaacatcagcttcacctccctccccatcctcctgtacagcctcatggagcagcatgttggcattgacgtgctcaagagagacccgaccctgtacaggtaccatcctccaaacagcctctcctgagagcagagagagtaactaggcagcactctggcagttccttccaatagccacctggcagacctcagttgagggccagaagcattcggcatctgctgatattcttgcttgatcaggagcttgtttaaactggaagcaacatagctcaaatggagattcttcaagtcttgctggatggtttatgctgcatttggaacatctgtgtggagccagtttgcactttcctgtgctttctgacagtcctgagggagctggggtacaagcgtcttcctcgttgtgaccctagggaatctgtggcctaagttatcctttaaaaccatgtgtgttccattcagtgagaaaaaacaaaaattaacagc

SEQ ID NO: 185197 - DNA, 2720 bp, Artificial Sequence
  derived and/or modified sequence
tctacgtgggacacagggagccacctccgggcgcagaggcctacatcccacagagatacccagacaacaggatcgtctcgtccaagtacacattttggaactttatacccaagaatttatttgaacaattcagaagagtagccaacttttatttccttatcatatttctggtgcagttgattattgatacacccacaagtccagtgacaagcggacttccactcttctttgtcattactgtgacggctatcaaacagggttatgaagactggcttcgacataaagcagacaatgccatgaaccagtgtcctgttcatttcattcagcacggcaagctcgttcggaaacaaagtcgaaagctgcgagttggggacattgtcatggttaaggaggacgagacctttccctgcgacttgatcttcctttccagcaaccggggagatgggacgtgccacgtcaccaccgccagcttggatggagaatccagccataaaacgcattacgcggtccaggacaccaaaggcttccacacagaggaggatatcggcggacttcacgccaccatcgagtgtgagcagccccagcccgacctctacaagttcgtgggtcgcatcaacgtttacagtgacctgaatgaccccgtggtgaggcccttaggatcggaaaacctgctgcttagaggagctacactgaagaacactgagaaaatctttggtgtggctatttacacgggaatggaaaccaagatggcattaaattatcaatcaaaatctcagaagcgatctgccgtggaaaaatcgatgaatgcgttcctcattgtgtatctctgcattctgatcagcaaagccctgataaacactgtgctgaaatacatgtggcagagtgagccctttcgggatgagccgtggtataatcagaaaacggagtcggaaaggcagaggaatctgttcctcaaggcattcacggacttcctggccttcatggtcctctttaactacatcatccctgtgtccatgtacgtcacggtcgagatgcagaagttcctcggctcttacttcatcacctgggacgaagacatgtttgacgaggagactggcgaggggcctctggtgaacacgtcggacctcaatgaagagctgggacaggtggagtacatcttcacagacaagaccggcaccctcacggaaaacaacatggagttcaaggagtgctgcatcgaaggccatgtctacgtgccccacgtcatctgcaacgggcaggtcctcccagagtcgtcaggaatcgacatgattgactcgtcccccagcgtcaacgggagggagcgcgaggagctgtttttccgggccctctgtctctgccacaccgtccaggtgaaagacgatgacagcgtagacggccccaggaaatcgccggacggggggaaatcctgtgtgtacatctcatcctcgcccgacgaggtggcgctggtcgaaggtgtccagagacttggctttacctacctaaggctgaaggacaattacatggagatattaaacagggagaaccacatcgaaaggtttgaattgctggaaattttgagttttgactcagtcagaaggagaatgagtgtaattgtaaaatctgctacaggagaaatttatctgttttgcaaaggagcagattcttcgatattcccccgagtgatagaaggcaaagttgaccagatccgagccagagtggagcgtaacgcagtggaggggctccgaactttgtgtgttgcttataaaaggctgatccaagaagaatatgaaggcatttgtaagctgctgcaggctgccaaagtggcccttcaagatcgagagaaaaagttagcagaagcctatgagcaaatagagaaagatcttactctgcttggtgctacagctgttgaggaccggctgcaggagaaagctgcagacaccatcgaggccctgcagaaggccgggatcaaagtctgggttctcacgggagacaagatggagacggccgcggccacgtgctacgcctgcaagctcttccgcaggaacacgcagctgctggagctgaccaccaagaggatcgaggagcagagcctgcacgacgtcctgttcgagctgagcaagacggtcctgcgccacagcgggagcctgaccagagacaacctgtccggactttcagcagatatgcaggactacggtttaattatcgacggagctgcactgtctctgataatgaagcctcgagaagacgggagttccggcaactacagggagctcttcctggaaatctgccggagctgcagcgcggtgctctgctgccgcatggcgcccttgcagaaggctcagattgttaaattaatcaaattttcaaaagagcacccaatcacgttagcaattggcgatggtgcaaatgatgtcagcatgattctggaagcgcacgtgggcataggtgtcatcggcaaggaaggccgccaggctgccaggaacagcgactatgcaatcccaaagtttaagcatttgaagaagatgctgcttgttcacgggcatttttattacattaggatctctgagctcgtgcagtacttcttctataagaacgtctgcttcatcttccctcagtttttataccagttcttctgtgggttttcacaacagggacgtcgccaagaatgccctgctgcgctggcgcgtgttcatctactggacgctcctgggactgtttga

SEQ ID NO: 185198 - DNA, 3405 bp, Artificial Sequence
  derived and/or modified sequence
atggactgcagcctggtgagaaccctggtgcacagatactgcgccggcgaggagaactgggtggacagcagaaccatctacgtgggccacagagagcccccccccggcgccgaggcctacatcccccagagataccccgacaacagaatcgtgagcagcaagtacaccttctggaacttcatccccaagaacctgttcgagcagttcagaagagtggccaacttctacttcctgatcatcttcctggtgcagctgatcatcgacacccccaccagccccgtgaccagcggcctgcccctgttcttcgtgatcaccgtgaccgccatcaagcagggctacgaggactggctgagacacaaggccgacaacgccatgaaccagtgccccgtgcacttcatccagcacggcaagctggtgagaaagcagagcagaaagctgagagtgggcgacatcgtgatggtgaaggaggacgagaccttcccctgcgacctgatcttcctgagcagcaacagaggcgacggcacctgccacgtgaccaccgccagcctggacggcgagagcagccacaagacccactacgccgtgcaggacaccaagggcttccacaccgaggaggacatcggcggcctgcacgccaccatcgagtgcgagcagccccagcccgacctgtacaagttcgtgggcagaatcaacgtgtacagcgacctgaacgaccccgtggtgagacccctgggcagcgagaacctgctgctgagaggcgccaccctgaagaacaccgagaagatcttcggcgtggccatctacaccggcatggagaccaagatggccctgaactaccagagcaagagccagaagagaagcgccgtggagaagagcatgaacgccttcctgatcgtgtacctgtgcatcctgatcagcaaggccctgatcaacaccgtgctgaagtacatgtggcagagcgagcccttcagagacgagccctggtacaaccagaagaccgagagcgagagacagagaaacctgttcctgaaggccttcaccgacttcctggccttcatggtgctgttcaactacatcatccccgtgagcatgtacgtgaccgtggagatgcagaagttcctgggcagctacttcatcacctgggacgaggacatgttcgacgaggagaccggcgagggccccctggtgaacaccagcgacctgaacgaggagctgggccaggtggagtacatcttcaccgacaagaccggcaccctgaccgagaacaacatggagttcaaggagtgctgcatcgagggccacgtgtacgtgccccacgtgatctgcaacggccaggtgctgcccgagagcagcggcatcgacatgatcgacagcagccccagcgtgaacggcagagagagagaggagctgttcttcagagccctgtgcctgtgccacaccgtgcaggtgaaggacgacgacagcgtggacggccccagaaagagccccgacggcggcaagagctgcgtgtacatcagcagcagccccgacgaggtggccctggtggagggcgtgcagagactgggcttcacctacctgagactgaaggacaactacatggagatcctgaacagagagaaccacatcgagagattcgagctgctggagatcctgagcttcgacagcgtgagaagaagaatgagcgtgatcgtgaagagcgccaccggcgagatctacctgttctgcaagggcgccgacagcagcatcttccccagagtgatcgagggcaaggtggaccagatcagagccagagtggagagaaacgccgtggagggcctgagaaccctgtgcgtggcctacaagagactgatccaggaggagtacgagggcatctgcaagctgctgcaggccgccaaggtggccctgcaggacagagagaagaagctggccgaggcctacgagcagatcgagaaggacctgaccctgctgggcgccaccgccgtggaggacagactgcaggagaaggccgccgacaccatcgaggccctgcagaaggccggcatcaaggtgtgggtgctgaccggcgacaagatggagaccgccgccgccacctgctacgcctgcaagctgttcagaagaaacacccagctgctggagctgaccaccaagagaatcgaggagcagagcctgcacgacgtgctgttcgagctgagcaagaccgtgctgagacacagcggcagcctgaccagagacaacctgagcggcctgagcgccgacatgcaggactacggcctgatcatcgacggcgccgccctgagcctgatcatgaagcccagagaggacggcagcagcggcaactacagagagctgttcctggagatctgcagaagctgcagcgccgtgctgtgctgcagaatggcccccctgcagaaggcccagatcgtgaagctgatcaagttcagcaaggagcaccccatcaccctggccatcggcgacggcgccaacgacgtgagcatgatcctggaggcccacgtgggcatcggcgtgatcggcaaggagggcagacaggccgccagaaacagcgactacgccatccccaagttcaagcacctgaagaagatgctgctggtgcacggccacttctactacatcagaatcagcgagctggtgcagtacttcttctacaagaacgtgtgcttcatcttcccccagttcctgtaccagttcttctgcggcttcagccagcagaccctgtacgacaccgcctacctgaccctgtacaacatcagcttcaccagcctgcccatcctgctgtacagcctgatggagcagcacgtgggcatcgacgtgctgaagagagaccccaccctgtacagagacgtggccaagaacgccctgctgagatggagagtgttcatctactggaccctgctgggcctgttcgacgccctggtgttcttcttcggcgcctacttcgtgttcgagaacaccaccgtgaccagcaacggccagatcttcggcaactggaccttcggcaccctggtgttcaccgtgatggtgttcaccgtgaccctgaagctggccctggacacccactactggacctggatcaaccacttcgtgatctggggcagcctgctgttctacgtggtgttcagcctgctgtggggcggcgtgatctggcccttcctgaactaccagagaatgtactacgtgttcatccagatgctgagcagcggccccgcctggctggccatcgtgctgctggtgaccatcagcctgctgcccgacgtgctgaagaaggtgctgtgcagacagctgtggcccaccgccaccgagagagtgcagaccaagagccagtgcctgagcgtggagcagagcaccatcttcatgctgagccagaccagcagcagcctgagcttctag

SEQ ID NO: 185199 - DNA, 2808 bp, Artificial Sequence
  derived and/or modified sequence
tgatacgtgggccacagagagcccccccccggcgccgaggcctacatcccccagagataccccgacaacagaatcgtgagcagcaagtacaccttctggaacttcatccccaagaacctgttcgagcagttcagaagagtggccaacttctacttcctgatcatcttcctggtgcagctgatcatcgacacccccaccagccccgtgaccagcggcctgcccctgttcttcgtgatcaccgtgaccgccatcaagcagggctacgaggactggctgagacacaaggccgacaacgccatgaaccagtgccccgtgcacttcatccagcacggcaagctggtgagaaagcagagcagaaagctgagagtgggcgacatcgtgatggtgaaggaggacgagaccttcccctgcgacctgatcttcctgagcagcaacagaggcgacggcacctgccacgtgaccaccgccagcctggacggcgagagcagccacaagacccactacgccgtgcaggacaccaagggcttccacaccgaggaggacatcggcggcctgcacgccaccatcgagtgcgagcagccccagcccgacctgtacaagttcgtgggcagaatcaacgtgtacagcgacctgaacgaccccgtggtgagacccctgggcagcgagaacctgctgctgagaggcgccaccctgaagaacaccgagaagatcttcggcgtggccatctacaccggcatggagaccaagatggccctgaactaccagagcaagagccagaagagaagcgccgtggagaagagcatgaacgccttcctgatcgtgtacctgtgcatcctgatcagcaaggccctgatcaacaccgtgctgaagtacatgtggcagagcgagcccttcagagacgagccctggtacaaccagaagaccgagagcgagagacagagaaacctgttcctgaaggccttcaccgacttcctggccttcatggtgctgttcaactacatcatccccgtgagcatgtacgtgaccgtggagatgcagaagttcctgggcagctacttcatcacctgggacgaggacatgttcgacgaggagaccggcgagggccccctggtgaacaccagcgacctgaacgaggagctgggccaggtggagtacatcttcaccgacaagaccggcaccctgaccgagaacaacatggagttcaaggagtgctgcatcgagggccacgtgtacgtgccccacgtgatctgcaacggccaggtgctgcccgagagcagcggcatcgacatgatcgacagcagccccagcgtgaacggcagagagagagaggagctgttcttcagagccctgtgcctgtgccacaccgtgcaggtgaaggacgacgacagcgtggacggccccagaaagagccccgacggcggcaagagctgcgtgtacatcagcagcagccccgacgaggtggccctggtggagggcgtgcagagactgggcttcacctacctgagactgaaggacaactacatggagatcctgaacagagagaaccacatcgagagattcgagctgctggagatcctgagcttcgacagcgtgagaagaagaatgagcgtgatcgtgaagagcgccaccggcgagatctacctgttctgcaagggcgccgacagcagcatcttccccagagtgatcgagggcaaggtggaccagatcagagccagagtggagagaaacgccgtggagggcctgagaaccctgtgcgtggcctacaagagactgatccaggaggagtacgagggcatctgcaagctgctgcaggccgccaaggtggccctgcaggacagagagaagaagctggccgaggcctacgagcagatcgagaaggacctgaccctgctgggcgccaccgccgtggaggacagactgcaggagaaggccgccgacaccatcgaggccctgcagaaggccggcatcaaggtgtgggtgctgaccggcgacaagatggagaccgccgccgccacctgctacgcctgcaagctgttcagaagaaacacccagctgctggagctgaccaccaagagaatcgaggagcagagcctgcacgacgtgctgttcgagctgagcaagaccgtgctgagacacagcggcagcctgaccagagacaacctgagcggcctgagcgccgacatgcaggactacggcctgatcatcgacggcgccgccctgagcctgatcatgaagcccagagaggacggcagcagcggcaactacagagagctgttcctggagatctgcagaagctgcagcgccgtgctgtgctgcagaatggcccccctgcagaaggcccagatcgtgaagctgatcaagttcagcaaggagcaccccatcaccctggccatcggcgacggcgccaacgacgtgagcatgatcctggaggcccacgtgggcatcggcgtgatcggcaaggagggcagacaggccgccagaaacagcgactacgccatccccaagttcaagcacctgaagaagatgctgctggtgcacggccacttctactacatcagaatcagcgagctggtgcagtacttcttctacaagaacgtgtgcttcatcttcccccagttcctgtaccagttcttctgcggcttcagccagcagaccctgtacgacaccgcctacctgaccctgtacaacatcagcttcaccagcctgcccatcctgctgtacagcctgatggagcagcacgtgggcatcgacgtgctgaagagagaccccaccctgtacagataccacccccccaacagcctgagctag

SEQ ID NO: 185200 - protein, 916 aa, Artificial Sequence
  derived and/or modified sequence
METSQETSLFLVKILEELDSKQNTVSYQDLCKSLCARFDLSQLAKLRSVLFYTACLDPNFPATLFKDKMKCTVNNQQSKKIMVAADIVTIFNLIQMNGGAAKEKLPTGRQKVRKKEASFESCRSDTEICNAAECEPLNCELSERSFSRGYPIRQSSKCRKMDCKDCPQFVPASEPNFLLGVSKEVKNRAASLDRLQALAPYSVTSPQPCEMQRTYFPMNIENESISDQDSLPINQSIKETFISNEEPFVVQSCVQKRNIFKEDFHNLMAVSPSLVGPISKAENEHREPQSRKEPHKPPFFNHSFEMPYNSQYLNPVYSPVPDKRRAKHESLDDLQASTYFGPTPVMGTQEARRCLGKPNKQTPWPAKSWSLNTEEVPDFERSFFNRNPSEEKLHYPNASSQTPNFPAPERRPTYLVPKDQQPILPIAYAAKQNGLKSKEISSPVDLEKHEPVKKFKDKSINCTSGQLSSDTSSVGTQTEHVLEPKKCRDLCTSGQGKYSDRHTMKHSDDDSEIVSDDISDIFRFLDDMSISGSTGVIQSSCYNSTGSLSQLHKSDCDSSPEHNLTKIANGVPNSKGDKGNRPENTHHSEEELKTSVCKLVLRIGEIERKLESLSGVRDEISQVLGKLNKLDQKMQQPEKVSVQIDLNSLTSEGPSDDSASPRMFHAHSGSHGPKLENNPDWCCSDASGSNSESLRVKALKKSLFTRPSSRSLTEENSATESKIASISNSPRDWRTITYTNRVGLNEEEIKDTGPGDNKDWHRKSKEADRQYDIPPQHRLPKQPKDGFLVEQVFSPHPYPASLKAHMKSNPLYTDMRLTELAEVKRGQPSWTIEEYARNAGDKGKLTALDLQTQESLNPNNLEYWMEDIYTPGYDSLLKRKEAEFRRAKVCKIAALIAAAACTVILVIVVPICTMKS

SEQ ID NO: 185201 - DNA, 2751 bp, Artificial Sequence
  derived and/or modified sequence
atggagaccagccaggagaccagcctgttcctggtgaagatcctggaggagctggacagcaagcagaacaccgtgagctaccaggacctgtgcaagagcctgtgcgccagattcgacctgagccagctggccaagctgagaagcgtgctgttctacaccgcctgcctggaccccaacttccccgccaccctgttcaaggacaagatgaagtgcaccgtgaacaaccagcagagcaagaagatcatggtggccgccgacatcgtgaccatcttcaacctgatccagatgaacggcggcgccgccaaggagaagctgcccaccggcagacagaaggtgagaaagaaggaggccagcttcgagagctgcagaagcgacaccgagatctgcaacgccgccgagtgcgagcccctgaactgcgagctgagcgagagaagcttcagcagaggctaccccatcagacagagcagcaagtgcagaaagatggactgcaaggactgcccccagttcgtgcccgccagcgagcccaacttcctgctgggcgtgagcaaggaggtgaagaacagagccgccagcctggacagactgcaggccctggccccctacagcgtgaccagcccccagccctgcgagatgcagagaacctacttccccatgaacatcgagaacgagagcatcagcgaccaggacagcctgcccatcaaccagagcatcaaggagaccttcatcagcaacgaggagcccttcgtggtgcagagctgcgtgcagaagagaaacatcttcaaggaggacttccacaacctgatggccgtgagccccagcctggtgggccccatcagcaaggccgagaacgagcacagagagccccagagcagaaaggagccccacaagccccccttcttcaaccacagcttcgagatgccctacaacagccagtacctgaaccccgtgtacagccccgtgcccgacaagagaagagccaagcacgagagcctggacgacctgcaggccagcacctacttcggccccacccccgtgatgggcacccaggaggccagaagatgcctgggcaagcccaacaagcagaccccctggcccgccaagagctggagcctgaacaccgaggaggtgcccgacttcgagagaagcttcttcaacagaaaccccagcgaggagaagctgcactaccccaacgccagcagccagacccccaacttccccgcccccgagagaagacccacctacctggtgcccaaggaccagcagcccatcctgcccatcgcctacgccgccaagcagaacggcctgaagagcaaggagatcagcagccccgtggacctggagaagcacgagcccgtgaagaagttcaaggacaagagcatcaactgcaccagcggccagctgagcagcgacaccagcagcgtgggcacccagaccgagcacgtgctggagcccaagaagtgcagagacctgtgcaccagcggccagggcaagtacagcgacagacacaccatgaagcacagcgacgacgacagcgagatcgtgagcgacgacatcagcgacatcttcagattcctggacgacatgagcatcagcggcagcaccggcgtgatccagagcagctgctacaacagcaccggcagcctgagccagctgcacaagagcgactgcgacagcagccccgagcacaacctgaccaagatcgccaacggcgtgcccaacagcaagggcgacaagggcaacagacccgagaacacccaccacagcgaggaggagctgaagaccagcgtgtgcaagctggtgctgagaatcggcgagatcgagagaaagctggagagcctgagcggcgtgagagacgagatcagccaggtgctgggcaagctgaacaagctggaccagaagatgcagcagcccgagaaggtgagcgtgcagatcgacctgaacagcctgaccagcgagggccccagcgacgacagcgccagccccagaatgttccacgcccacagcggcagccacggccccaagctggagaacaaccccgactggtgctgcagcgacgccagcggcagcaacagcgagagcctgagagtgaaggccctgaagaagagcctgttcaccagacccagcagcagaagcctgaccgaggagaacagcgccaccgagagcaagatcgccagcatcagcaacagccccagagactggagaaccatcacctacaccaacagagtgggcctgaacgaggaggagatcaaggacaccggccccggcgacaacaaggactggcacagaaagagcaaggaggccgacagacagtacgacatccccccccagcacagactgcccaagcagcccaaggacggcttcctggtggagcaggtgttcagcccccacccctaccccgccagcctgaaggcccacatgaagagcaaccccctgtacaccgacatgagactgaccgagctggccgaggtgaagagaggccagcccagctggaccatcgaggagtacgccagaaacgccggcgacaagggcaagctgaccgccctggacctgcagacccaggagagcctgaaccccaacaacctggagtactggatggaggacatctacacccccggctacgacagcctgctgaagagaaaggaggccgagttcagaagagccaaggtgtgcaagatcgccgccctgatcgccgccgccgcctgcaccgtgatcctggtgatcgtggtgcccatctgcaccatgaagagctag

SEQ ID NO: 185202 - DNA, 2751 bp, Artificial Sequence
  derived and/or modified sequence
atggaaacaagccaggagacatcccttttcttggtaaagatattggaggagctggactcgaaacaaaataccgtgagctatcaggacctgtgcaagagcctttgcgccaggtttgatttatcgcagctggctaaattgaggtctgtactcttttataccgcttgcctggacccgaacttcccggctacactctttaaggacaaaatgaagtgtaccgtcaataaccaacagagcaaaaagatcatggtggccgcggacatcgtgacaatattcaacctgatccagatgaacgggggcgccgccaaggaaaaacttcctacaggccgccagaaagtgcgcaagaaagaagccagctttgagagttgccgcagtgacactgaaatttgcaacgctgcagaatgcgagccgctgaactgtgagctcagcgaacgcagcttcagccgcggatatcccattaggcaaagcagcaagtgcaggaaaatggattgcaaagattgcccacagtttgtacccgcgagcgagcccaatttcctgttgggtgtgagcaaggaggtgaaaaatcgagccgcgagtctcgatagattgcaagctctggccccctatagcgtgacctcgccacaaccttgcgaaatgcaacggacatatttccctatgaatatcgagaatgaaagcatttcggatcaagactccctcccgatcaaccagtctatcaaggagaccttcatttctaatgaagagcccttcgtagtgcagtcgtgtgtgcagaagagaaacatatttaaggaggattttcacaacctgatggctgtgagcccatccttagtggggcccatcagcaaggcagagaacgagcatagggagcctcagagccggaaggagccccacaagcctcccttctttaaccactcatttgaaatgccatacaatagccaatatcttaacccggtgtattccccagttcccgataaaagacgagctaaacacgagagcctcgatgacctgcaagccagcacgtatttcggcccaacccccgtcatgggcactcaagaagcgcgccgctgtctcggcaaacctaataagcagactccgtggcctgcaaagtcctggagtttgaacactgaggaagtgcccgacttcgaacggtcgttctttaataggaatccatccgaagagaaacttcactatcctaacgcaagtagtcaaacaccgaatttcccggcccccgagaggagacccacttacctggtgccaaaagatcaacagcctatcctgccgatcgcatatgcagctaagcagaacggcttgaaaagcaaagagatcagtagcccagtggacctcgagaagcacgagcccgtgaagaagtttaaggacaagagtattaactgcaccagcggccagctgagctctgataccagctctgtgggtacccaaaccgaacacgtgctggaacccaagaagtgtcgggacctatgtaccagcggacaggggaagtactctgatcgacatactatgaagcatagcgatgatgactccgaaatcgtgtcggatgatatctcagacatcttccgttttctggacgacatgagcatctccggcagtaccggcgtcatccagagttcatgttacaattcaactggctcattgagtcagttgcacaagagtgactgtgacagtagccctgaacacaatctgacaaagatcgcaaacggggtccccaattcaaagggagacaagggcaataggcctgagaatactcaccatagtgaagaagaactgaaaacctcagtgtgcaaactcgtattacggataggtgagattgagagaaaactcgagtctctgagtggggttcgagacgaaatcagtcaggtgctggggaagctgaacaaactcgaccagaaaatgcaacagccagagaaggtaagcgttcagattgatctgaactctctgacaagtgaggggccatctgacgattccgcaagtccaaggatgttccacgctcatagcgggagccacggacccaagctcgagaacaaccccgattggtgctgtagcgatgctagtggctcgaactctgaaagcttgcgggtgaaagctttaaaaaagtcattgttcacacgcccgagctcacgctcgctcaccgaagagaactccgcgaccgaatccaagatcgcctccatctcaaactcaccgagagactggcgcactatcacatataccaaccgcgtggggttgaatgaggaagagatcaaggacaccggccctggggacaacaaagattggcaccgtaaatccaaagaagcagaccggcagtacgatatccccccacagcacagactaccaaagcagccaaaagacggctttctggtggagcaggtgttctccccccacccttatcctgcgtctctgaaggcacatatgaaaagtaatcctttgtacacagatatgcggttaaccgagctggcagaggttaagcgcggacagcctagctggactattgaggaatacgcgaggaatgcaggcgataagggcaagctgaccgcactcgatctgcagacacaggaatcattgaatccaaataacttggagtactggatggaagacatctatacccctggctacgattctctactgaaacgcaaggaggcagagttcaggcgagcgaaggtgtgcaaaatcgctgcgctgatcgctgctgccgcctgcacggtgattcttgttatcgttgtgccaatctgcaccatgaagagttag

SEQ ID NO: 185203 - DNA, 6732 bp, Artificial Sequence
  derived and/or modified sequence
gccctgcgcccggggcgcctcggagaactgacctgaagtttcagtgtagtcagagagctcttcaagtaataaatcatggagaccagtcaggaaacttccctcttcttggtgaagatcttggaggaactggacagcaagcaaaataccgtttcttatcaggacctgtgcaaatctctctgtgcccggttcgacctgtcgcagcttgccaaactgagaagtgtgctcttctacacagcttgtctcgatcccaattttccagccacgctattcaaagacaagatgaaatgcactgtgaataaccagcaatcaaagaaaatcatggtggcagcagatattgtgacgatattcaacctgatccaaatgaatggcggggctgccaaggagaagctgcccacgggccgccagaaggtacgcaagaaggaggcatcctttgaatcatgtaggtcggacacagagatctgcaatgcagctgagtgtgagcccctgaactgtgagctgagtgagaggtctttcagccggggctaccccatcaggcagtcgtccaagtgccggaagatggactgcaaggactgcccacagtttgtccctgcctctgagcctaacttcctgttgggagttagcaaagaggtgaaaaaccgcgccgcttccctggacaggttgcaggccctggctccgtactctgtgaccagccctcagccctgtgagatgcagaggacctacttccccatgaacatcgaaaacgagtccatttcagaccaggactccctgcccatcaatcagagcatcaaggagaccttcatttccaatgaggagccatttgtggtccagtcctgtgtccagaaaaggaatatcttcaaagaggattttcacaatttgatggcagtgtcccccagtttggttggccccatcagcaaagcagagaatgagcacagggaaccccagagtcgaaaggaaccccacaagccacccttcttcaaccacagctttgaaatgccctataacagccagtacctgaatccagtgtattccccggttcctgacaaaaggcgagcaaagcacgaaagcttagatgaccttcaagcctctacatattttgggcccactcccgtgatgggaacccaagaagccaggcgctgtctagggaagcccaacaagcagactccctggccagccaaaagctggagcctaaacacagaggaagttcctgactttgaacggtcctttttcaatagaaatccctccgaggagaagctacactatccaaatgccagtagccagacccccaatttcccagccccagaaaggcgcccaacttaccttgtgccaaaggatcaacagccaattctccccattgcttatgcggcaaaacaaaatgggctcaaatctaaagagatctcatcccctgttgacctggagaagcatgaaccagtcaaaaagtttaaagacaagagcattaactgcaccagtgggcagctcagctcagacaccagtagcgtgggcacccagactgagcacgtgctggagcccaagaaatgcagagacctgtgcacctctggtcagggcaagtacagtgacaggcacaccatgaagcactcagacgatgactcagaaattgtcagcgacgacatcagtgacattttccgatttcttgatgacatgagcatcagtggctccacgggagtgatacagtcgtcctgctacaacagcacaggatccttgtctcagctccataagtcagactgcgacagttcccctgagcacaacttaaccaaaattgccaatggggtccccaacagcaagggagacaagggcaaccggcctgaaaacacccaccactcggaagaagagctgaagaccagtgtgtgcaaactggtgctcaggattggcgaaattgaacggaagctggaatccctgtcgggtgtccgtgatgaaatctcccaggtcttgggcaaactaaataaattggaccagaaaatgcaacagcctgagaaggtgagtgtgcagatagatctgaactccttgacaagcgagggtccgtctgatgacagtgcctctccccggatgttccacgcacacagtggctcccacggacccaaactagagaacaaccctgactggtgctgctctgatgctagcgggagcaacagtgaaagcctgcgggtcaaggccttaaaaaaaagcctcttcaccaggccatcctctaggtccctaacagaggagaacagtgccacagagtccaaaattgccagcatctccaactcgcccagagactggcgcaccatcacttataccaaccgtgtgggcctcaatgaggaggagataaaagacacaggcccaggagataataaagactggcatcggaaatctaaagaggcagacaggcagtacgacattcccccacagcaccgactgcccaagcagcccaaagatggcttcctggtggagcaggtgttcagccctcacccctaccctgcctccctcaaggcccacatgaagagcaaccccctgtacacagacatgcggctgaccgagttggccgaggtgaagcggggccaaccttcttggaccattgaggagtatgcacggaatgcgggcgacaagggcaagctgacagccctggacctgcagacgcaagaatctttaaacccaaataatttagagtactggatggaagacatttatactccaggatacgattcattactaaaacgtaaagaagccgaattcagacgagccaaggtctgcaagatagctgctctgatcgctgctgcggcatgcaccgtcatcctcgttattgtcgtgcccatctgcacaatgaaatcatgagctaagaatgcaaccttacgtacagcttatgactaccaatgtcgtcgtctgtatcttagaatcttgcagcagtgaggcaacaatttgttgaaatggagatgaaatcatggaggcatttctacaaatgttgaatgaaggtggttttcagaaagtatacattctagtgagaaatctacctacctattagctttgactcaattacactctgacgcatttttagaagtgcaatatcttttcctaccaaaagaacatcatggactatcaataaatacaaattgaatattccaagccaaaaaaggaagattaattgggttctttccattttgatgatgtttcatggtggggaataagttatacagaagatatttaatacacgcctctttagaagaaactaagggaaatagcaacataagaagaaaagaggtggcttctcttttccataatgttcttagaccattgctggtgaagtaacagggtgtgtgtccctaaagggtattacttctctgtcgacttttatcaagggctactgacgtttcattcttgcccttttgtcatcaacacgacagagtgtctgcatcactgcagatcttcatggaaacattctggaccttcttccttgcacttggagtgagaaggagctggactaccaagtcaggcgtggaatgaagtatgctcagactgcatgatgggccaaggtattcaggccaggagacctcgtcctcaatccaaagtgtaggggagctgcctgctaacgatgtaaggtcagtatttgaaaatcatggccactccaaaggatctcctgttcttgctttggtgtgtggctccattccttgattttctatctcctggtggtaccagatgctctgcctctcatacatgagttgaagagtttggaacttgtccttgtgccttgaagagtagagacaatggctaaacgttgacattctatctgtaaaccatggttttcacgcaccactaatatctgccattttcaatggctttaaaaagattttgaaagcttgctcaataatgttcaataatataataataataaaggcactgaggtcttctcagttaccccaacacctactccagagttttgaatacttgtcagcagtgcaaaaaatattatctgtttaaccacttatctatatgtctatctatctatctatatgtctatctatctatctaaatacttgatttttatttattgtcttctctgttaaataacttgagagcaaggtttctttcgtgtaaaagaagctgttgtaatttcatccaaatttgatctgtttccacctgctgaatggtgctctgacaataatggaacagaaagaatccttatcagcatctgattccaatgtcttgttacaggtcaaagaaaaaaggattgacagaaactagctaccttatatatattttttgataataaggtgggatataaatagattttggtagcaagtgtaatcactccgtatgatataataaatttctaaaagatttgagagcatctcaatttttaaagcaataggagtctagcatccattctgaaaaatcgcaaataatgcttagcttgctgtgtctgattctgttgttcaccattaaggggtagacagttaattttattatgttaacaagtgagggatgaatgttttcatctgtggtgaacctttatttttagaagtcttcatgttatctatttgtattatcatgtttatgtatggattttcaatttcagtaaccgaaaacttaagccttagtatgaaaaactgaggatttataattgaaaatgaaaaaaatatgttactctctatcatcagaattatagtctttggtgctctgttttcaatggggcatattacataaggttgtttctttcaccccaaagagactactaggttaccactctgggcattgcctttccacctaacccctcaaccagtaagactctacaccatattgtagccccactattctcctctttatcacagatgaagtgccagagcatcagagataggtagctcccaacctcttgctctggatttgcagaagagggggagatgtacttacccaggataagaaaaatctagtcaaatccaccccaaatcttccatttaacaggtaggaccatcgaggctggaccaaaccactttttccactgcccttggtgaatctattcctagtggaccccatttgggcatgtgcctagctaccttgggaaggcatgactataagtcacacctcaggcttggaaatgaaaggattctatagaatattctatactttccatagctggagaggtagtcagaaattcagtcttgctctgagtccacagtagctttaaaattcaactcaacattgttgtcacgtaacggaaacatctagacctggtaataatccaggaaattgcaaaatggaggccaaaagtaaggtgggtttctctggaaaggggtcatcctcagtctgataataccaagtctgacgctgaggttatgaatcattaccatggcttggagctattggatgcttggggtcttgggatagatagaaggtgaggttcacagttggagcttttcttgccattgaccccaagctcaccccagccttccttccctgaccctgagactcaccctatctatctcccctattccctcagtttgcagaatgagcaagatagagtctggctaggagggaaacatctatccatctctctaatctttgcccatcacctcctgttgcaatgagttcccgcaggtgacatacggactggcctctctactgtactgggtgccatctcccaccatactctggcatttttatgtaaaggataatttcttgtacctgagtctaaaattacaacgttatcaaaattcacttcgtttttcctgcattttaaaagtaataaaatattatttgagattattttgaaattaaatatccttaaccaatgattaaattcataatcatttcatcttctttcataatcatttcatcttctaatctgaatttgttttgaacacagccttgcagaaaagcaaaaaatatttccccgctcaaattttgccgacattttataccagtatccccttcattacagtaaactaaatcataacttacatcatccattactagctgatcataaattgttagtattttaaggtatgcaactatgtgattgacatctgtaaggctagtttaatagacgtgctaaatatcactgttctgaatatctgtgccatagttctgatacccttattggaatcaaggcagtgctgtttctgtttacaagttatcaagataagagcagtggcatcacatttgttgttgttgtttttttttttgaaatagaaaaaaacagaagaagctctgccaacaataaaagattttgttaagtggtataaaaatttgtgaatgttgaaattcaacatgcttcatattataaccaacctgcaagaatattgtggtcaattgtgtgaataccaaatcagtatatactgtatactgtactatgaaaatttgtatttaaaggcaaagatacaagtaattgttggtataattggggaaaagggtattcaatatttattaagtaacaatgagaaatgcaacaaacttccttatttatgccttatgaataaaagagtgtggaatgtaaggtgaaattttatgtgcaagatcctgaaggaatgggtattcttgaaggcagggactgtcttttctatgtttgttctgtacagctctcagcacactcttggtgcttgataaatgttatgttatataataccaataactaagcacatttttagatcttttttcaaatggcttgtgtaaaatttggttaatgtacaatggttggtttgaagctatcatgtaaaattggcctctccaaatataatcagaaataaaccg

SEQ ID NO: 185204 - DNA, 2751 bp, Artificial Sequence
  derived and/or modified sequence
atggagaccagccaggagaccagcctcttcctggtgaagatcctggaggagctggacagcaagcagaacacagtgtcctaccaggacctgtgcaagagcctgtgtgccaggtttgacctgagccagctggccaagctgcggtctgtgctcttctacacagcctgcctggaccccaacttccctgccaccctcttcaaggacaagatgaagtgcaccgtgaacaaccagcagagcaagaagatcatggtggccgctgacatcgtgaccatcttcaacctgatccagatgaatggaggagctgccaaggagaagctgcccaccggccggcagaaggtgaggaagaaggaggccagctttgagagctgccgcagtgacacagagatctgcaatgctgctgaatgtgagcccctgaactgtgagctgtctgagaggagcttcagccggggctaccccatccggcagagcagcaaatgtaggaagatggactgcaaggactgcccccagtttgtgcctgccagcgagcccaacttcctgctgggcgtgtccaaggaggtgaagaacagagctgccagcctggaccggctgcaggccctggccccctacagcgtgaccagcccccagccctgtgagatgcagaggacctacttccccatgaacattgaaaatgaaagcatcagtgaccaggacagcctgcccatcaaccagagcatcaaggagaccttcatcagcaatgaggagccctttgtggtgcagagctgtgtgcagaagaggaacatcttcaaggaggacttccacaacctgatggctgtgagccccagcctggtgggccccatcagcaaggccgagaatgagcaccgggagccccagagcaggaaggagccccacaagccacccttcttcaaccacagctttgagatgccctacaacagccagtacctgaaccctgtgtacagccctgtgcctgacaagaggcgggccaagcatgagagcctggatgacctgcaggccagcacctacttcggccccacccctgtgatgggcacccaggaggcccggcgctgcctgggcaagcccaacaagcagaccccctggccagccaagtcctggagcctgaacacagaggaggtgcctgactttgagaggagcttcttcaacagaaaccccagcgaggagaagctgcactacccaaatgccagcagccagacccccaacttccctgcccctgagcggcggcccacctacctggtgcccaaggaccagcagcccatcctgcccatcgcctatgctgccaagcagaatggcctgaagagcaaggagatcagcagccctgtggacctggagaagcatgagcctgtgaagaagttcaaggacaagagcatcaactgcaccagcggccagctgagcagtgacaccagctctgtgggcacccagacagagcacgtgctggagcccaagaagtgccgggacctgtgcaccagcggccagggcaagtacagcgacagacacaccatgaagcacagtgatgatgattctgaaattgtgtctgatgacatcagtgacatcttccgcttcctggatgacatgagcatcagcggcagcactggagtcatccagagcagctgctacaacagcacaggcagcctgagccagctgcacaagagtgactgtgacagcagccctgagcacaacctgaccaagatcgccaatggagtgcccaacagcaaaggagacaagggcaacagacctgagaacacccaccacagcgaggaggagctgaagacctctgtgtgcaagctggtgctgagaattggagaaattgaaaggaagctggagagcctgagcggcgtgagagatgagatcagccaggtgctgggcaagctgaacaagctggaccagaagatgcagcagcctgagaaggtgtctgtgcagattgacctgaacagcctgaccagcgagggccccagtgatgacagcgccagccccaggatgtttcatgcccacagcggcagccacggccccaagctggagaacaacccagactggtgctgcagtgatgccagcggcagcaacagcgagagcctgcgggtgaaggccctgaagaagagcctcttcacccggcccagcagccgcagcctgacagaagaaaattctgccacagagagcaagatcgccagcatcagcaacagcccccgggactggaggaccatcacctacaccaacagagtgggcctgaatgaggaggagatcaaggacaccggccctggggacaacaaggactggcacaggaagagcaaggaggccgaccggcagtatgacatccccccccagcaccggctgcccaagcagcccaaggatggcttcctggtggagcaggtgttcagcccccacccctacccagccagcctgaaggcccacatgaagagcaaccccctgtacacagacatgaggctgacagagctggccgaggtgaagaggggccagcccagctggaccatcgaggagtatgccagaaatgctggggacaagggcaagctgacagccctggacctgcagacccaggagagcctgaaccccaacaacctggagtactggatggaggacatctacaccccaggctatgacagcctgctgaagaggaaggaggccgagttcagaagagccaaggtgtgcaagattgctgccctgattgctgctgctgcctgcaccgtcatcctggtgattgtggtgcccatctgcaccatgaagagctag

SEQ ID NO: 185205 - DNA, 2751 bp, Artificial Sequence
  derived and/or modified sequence
atggagaccagccaggagaccagcctgttcctggtgaagatcctggaagagttggactccaagcagaatacagtcagttaccaggacctatgcaagtccctgtgcgcccggttcgacctttcccagctggccaagcttcgttcagtcctcttttataccgcctgcctggacccaaatttccctgctaccctgttcaaagataaaatgaagtgtacggtcaataaccaacagtccaaaaaaatcatggtcgccgccgacatcgtgaccatctttaatcttatccaaatgaatggcggtgccgctaaggaaaagttgccgacaggacgccagaaagtacggaaaaaagaagcctcattcgaaagctgccggtccgataccgagatatgtaacgccgctgagtgtgaaccgctgaattgcgagctctccgagaggtcgttctctcgcggctatcccatcaggcagtctagcaaatgtaggaagatggactgcaaggactgtccccagtttgttccagcctccgagccgaatttcctcctgggcgtgagcaaggaagtgaaaaatagagcagcctcgctcgatcggctgcaagctctcgcaccctattccgtcacatcccctcagccatgcgaaatgcaacgcacatacttcccaatgaacatcgagaacgagagtatctctgatcaggacagcttgccaattaaccagtccatcaaagagacttttatatctaatgaggagcccttcgtcgtccagtcttgcgtgcaaaaaagaaacatctttaaagaggatttccataacctaatggcagtctccccgtccctggtgggccctatttccaaggcagagaacgagcacagagagccccagtcccggaaggaaccccacaagccccccttctttaatcacagcttcgagatgccatataactcccagtatttaaatcccgtgtactctccagtgccagacaaacgcagagctaaacatgagtcgctcgacgatctgcaagccagcacttattttggacccacgcccgtcatggggacgcaggaggctcgacgttgtctcggcaagccaaacaaacagacaccttggcccgcgaaaagctggagtttgaataccgaggaggtcccggatttcgaaaggagtttcttcaaccggaacccctccgaagagaaactgcactacccaaacgcaagctcccagacccccaactttccagccccagagagacggcccacctatctggtgcccaaggaccaacagccaatactgcccatcgcctacgccgctaagcagaatggcctgaaaagtaaggaaatttcttctccagtggatcttgaaaaacatgaacccgttaaaaagttcaaggataaatccattaattgcacgagtggacagctgagcagtgataccagcagcgttggaacccagactgaacatgtgcttgaacctaagaagtgtcgggacttatgtacctctggccaaggcaagtacagtgatcgacacactatgaagcactctgatgatgactctgagatagtaagcgacgacatctcagatattttccgatttttagacgatatgtcaattagtggatctactggggtgatccagagctcctgctataactcaacaggatctcttagccagctgcacaaaagtgactgcgacagttctcctgaacataacctcaccaagatcgccaacggggtcccaaattctaagggtgacaaagggaacagacccgagaacacccaccattctgaagaagagcttaagacgtccgtctgcaaactggtcctgcggattggtgaaatagagcgaaaactggagagtctctccggagtaagagacgagatctcccaagtgctggggaaattaaataagctggatcagaagatgcagcagccggaaaaagtcagcgtgcaaatcgacctgaacagtctcacgtctgagggccctagtgatgacagcgctagtccgagaatgttccacgcgcactctggcagtcacgggcccaagcttgagaataaccccgactggtgctgttctgacgcgtctggaagcaactctgagagcctgagggtgaaagccttaaagaaatctctgttcactcggcccagcagtcgatccttgacagaagaaaatagcgccaccgagtcaaagatcgcctcgatttccaattccccacgcgattggagaactatcacatatacaaatcgggtgggcctgaatgaagaggaaataaaggacactggaccaggtgataataaggactggcacagaaagtccaaagaagccgaccgccagtacgatattccccctcagcacagattacctaaacagcccaaggacgggtttctcgtcgaacaggttttcagccctcacccatacccagcctccctcaaagcacatatgaagtccaaccccttatataccgacatgaggctgactgagcttgccgaggttaagagaggacagccctcttggaccatcgaggagtacgcccgaaacgctggcgacaaaggaaagctgacagccctggatctgcagacacaggagtcgctgaacccaaataatttggagtactggatggaagatatttacacacctgggtacgactccctcctcaagaggaaggaggctgagttccgccgggctaaggtttgcaagattgcggctctgatcgccgctgcagcttgcacagtgattctggtgattgtggtgccgatttgtaccatgaaatcctag

SEQ ID NO: 185206 - DNA, 2751 bp, Artificial Sequence
  derived and/or modified sequence
atggagactagtcaagagacatcactctttctggtgaaaatactggaggaactggactccaaacagaacacagtcagctaccaggacctgtgcaagtccctctgcgctcgctttgacctgagccaacttgctaagctgcggagcgtgctgttctacaccgcctgtcttgaccccaatttccccgcaaccttgttcaaggataaaatgaagtgtacggtgaataaccaacaatccaaaaagatcatggttgccgcagacatcgtgaccatattcaatctgattcagatgaacggcggtgccgcaaaggaaaaactgccaactggcaggcagaaagtcaggaaaaaggaggcgtctttcgaatcctgtcggagtgatacggagatttgtaacgcagccgagtgtgagccgttaaattgtgaattgagtgaacgatcgtttagccggggatatcctatccggcagagttctaagtgtcgcaagatggactgtaaggactgccctcagttcgtacctgcttcagagcccaacttcttgcttggggtgagcaaggaagtcaagaacagggccgcatctctagatcggctccaggctttagccccttacagcgtaacttctccacagccgtgcgagatgcaaagaacatatttcccaatgaatatcgaaaacgagagcatcagcgaccaggatagcttacctattaaccagtctattaaggagacattcatcagtaatgaggaacctttcgtcgtacaaagttgtgtacagaaacgaaacatcttcaaagaagattttcataacctgatggcagtgtctccctcgctggtggggccaataagcaaggctgagaacgaacaccgtgagcctcagtctcggaaggagccacacaagccaccttttttcaatcattctttcgagatgccctacaattcacaatatctgaaccctgtctatagtcctgtgcccgataaaagaagagccaaacacgagtctttggatgatcttcaggcctccacatatttcggacccacccccgtgatgggcacccaagaagcccgaagatgcctcggcaagcctaataagcagaccccttggccagcaaagtcctggtcgttaaataccgaagaggtaccagatttcgagaggagcttttttaatcgtaaccctagtgaggagaaactgcattatccaaacgcttcctcacagacccccaatttcccagctcccgagcgcagacccacttacctcgtgccaaaggatcagcagcctattcttccaattgcctacgcagccaaacagaatggtctcaagtccaaggagataagctcccctgtggacctggaaaagcacgagcccgtcaagaaatttaaagataagtcaatcaattgtacttccggtcagttgtcttccgacacatcttccgtgggtacccagacagagcacgtgcttgaacccaagaaatgcagagacttgtgcacatccggtcaaggcaaatattccgaccggcataccatgaaacacagcgatgacgacagcgagatcgtgagcgacgacatctcagatatttttaggttcttggacgatatgtcaataagcgggtctactggcgttatccaaagctcctgttacaacagcacgggctcactgtctcaactgcataagagcgactgcgacagcagccctgaacacaaccttacaaaaatcgccaatggtgtaccaaactccaaaggagataaagggaatcgcccagaaaacacacatcactccgaggaggagctgaaaacctcagtgtgcaaactggtcctgagaataggagagatcgagcgaaagctcgagtccctgagcggggtgagggacgaaattagccaggtcttgggtaagctaaataagctggaccagaagatgcagcagcccgagaaggtgagcgtccaaatcgatttgaatagcttgacttccgaagggcctagtgacgattcggccagccctcgcatgtttcacgctcactcgggctctcacggacctaagctggaaaataatccagattggtgctgctccgacgcaagtggaagtaacagtgaatccctccgggtgaaggccctaaagaagtcactgttcactcgccctagtagcagaagcctgaccgaggaaaatagtgcgacggagagcaaaatcgcgtctattagtaacagtccacgggattggagaaccatcacgtacaccaatcgggtcgggctgaacgaggaggagataaaagacaccggccctggtgataataaggattggcacagaaagagtaaggaagctgatcggcaatatgatattcctccccaacaccgacttccaaagcaacctaaggatggtttccttgtagaacaggtgtttagcccacatccctacccagcttccctcaaggctcatatgaagtcaaaccctctatatacagacatgaggttgaccgaactagctgaagtgaaaagagggcagccaagctggacgatcgaggagtacgcgagaaatgctggggacaagggaaagctgaccgcgctggacctgcaaactcaggagagtctcaaccccaacaacctggagtattggatggaagacatttatacacctggctacgattctctattaaaaaggaaagaggccgaattcagacgtgcaaaggtctgtaagattgcggcactcattgctgccgcagcctgcactgttatcctggttatcgtcgtgcccatctgcacaatgaaaagctag

SEQ ID NO: 185207 - protein, 2062 aa, Artificial Sequence
  derived and/or modified sequence
MPKSGFTKPIQSENSDSDSNMVEKPYGRKSKDKIASYSKTPKIERSDVSKEMKEKSSMKRKLPFTISPSRNEERDSDTDSDPGHTSENWGERLISSYRTYSEKEGPEKKKTKKEAGNKKSTPVSILFGYPLSERKQMALLMQMTARDNSPDSTPNHPSQTTPAQKKTPSSSSRQKDKVNKRNERGETPLHMAAIRGDVKQVKELISLGANVNVKDFAGWTPLHEACNVGYYDVAKILIAAGADVNTQGLDDDTPLHDSASSGHRDIVKLLLRHGGNPFQANKHGERPVDVAETEELELLLKREVPLSDDDESYTDSEEAQSVNPSSVDENIDSETEKDSLICESKQILPSKTPLPSALDEYEFKDDDDEEINKMIDDRHILRKEQRKENEPEAEKTHLFAKQEKAFYPKSFKSKKQKPSRVLYSSTESSDEEALQNKKISTSCSVIPETSNSDMQTKKEYVVSGEHKQKGKVKRKLKNQNKNKENQELKQEKEGKENTRITNLTVNTGLDCSEKTREEGNFRKSFSPKDDTSLHLFHISTGKSPKHSCGLSEKQSTPLKQEHTKTCLSPGSSEMSLQPDLVRYDNTESEFLPESSSVKSCKHKEKSKHQKDFHLEFGEKSNAKIKDEDHSPTFENSDCTLKKMDKEGKTLKKHKLKHKEREKEKHKKEIEGEKEKYKTKDSAKELQRSVEFDREFWKENFFKSDETEDLFLNMEHESLTLEKKSKLEKNIKDDKSTKEKHVSKERNFKEERDKIKKESEKSFREEKIKDLKEERENIPTDKDSEFTSLGMSAIEESIGLHLVEKEIDIEKQEKHIKESKEKPEKRSQIKEKDIEKMERKTFEKEKKIKHEHKSEKDKLDLSECVDKIKEKDKLYSHHTEKCHKEGEKSKNTAAIKKTDDREKSREKMDRKHDKEKPEKERHLAESKEKHLMEKKNKQSDNSEYSKSEKGKNKEKDRELDKKEKSRDKESINITNSKHIQEEKKSSIVDGNKAQHEKPLSLKEKTKDEPLKTPDGKEKDKKDKDIDRYKERDKHKDKIQINSLLKLKSEADKPKPKSSPASKDTRPKEKRLVNDDLMQTSFERMLSLKDLEIEQWHKKHKEKIKQKEKERLRNRNCLELKIKDKEKTKHTPTESKNKELTRSKSSEVTDAYTKEKQPKDAVSNRSQSVDTKNVMTLGKSSFVSDNSLNRSPRSENEKPGLSSRSVSMISVASSEDSCHTTVTTPRPPVEYDSDFMLESSESQMSFSQSPFLSIAKSPALHERELDSLADLPERIKPPYANRLSTSHLRSSSVEDVKLIISEGRPTIEVRRCSMPSVICEHTKQFQTISEESNQGSLLTVPGDTSPSPKPEVFSNVPERDLSNVSNIHSSFATSPTGASNSKYVSADRNLIKNTAPVNTVMDSPVHLEPSSQVGVIQNKSWEMPVDRLETLSTRDFICPNSNIPDQESSLQSFCNSENKVLKENADFLSLRQTELPGNSCAQDPASFMPPQQPCSFPSQSLSDAESISKHMSLSYVANQEPGILQQKNAVQIISSALDTDNESTKDTENTFVLGDVQKTDAFVPVYSDSTIQEASPNFEKAYTLPVLPSEKDFNGSDASTQLNTHYAFSKLTYKSSSGHEVENSTTDTQVISHEKENKLESLVLTHLSRCDSDLCEMNAGMPKGNLNEQDPKHCPESEKCLLSIEDEESQQSILSSLENHSQQSTQPEMHKYGQLVKVELEENAEDDKTENQIPQRMTRNKANTMANQSKQILASCTLLSEKDSESSSPRGRIRLTEDDDPQIHHPRKRKVSRVPQPVQVSPSLLQAKEKTQQSLAAIVDSLKLDEIQPYSSERANPYFEYLHIRKKIEEKRKLLCSVIPQAPQYYDEYVTFNGSYLLDGNPLSKICIPTITPPPSLSDPLKELFRQQEVVRMKLRLQHSIEREKLIVSNEQEVLRVHYRAARTLANQTLPFSACTVLLDAEVYNVPLDSQSDDSKTSVRDRFNARQFMSWLQDVDDKFDKLKTCLLMRQQHEAAALNAVQRLEWQLKLQELDPATYKSISIYEIQEFYVPLVDVNDDFELTPI

SEQ ID NO: 185208 - DNA, 6189 bp, Artificial Sequence
  derived and/or modified sequence
atgcccaaaagcggctttacaaagccgatccaaagcgagaattcagacagcgattcaaatatggtggaaaagccatacgggagaaaaagcaaggataaaatcgcttcctatagcaaaacccccaaaatcgaaagaagcgacgtctccaaagaaatgaaggagaagtcctcaatgaaaagaaaactgccgttcactatctccccttctcgtaacgaggagagggactcggataccgattcagacccaggacacaccagcgagaactggggggagagactgatcagttcctatcggacctattctgagaaggagggacccgaaaagaagaagactaaaaaggaggctggcaataagaaaagcacgcccgtgtcaattctgttcggatacccgctttcggaacggaaacagatggctctgttaatgcaaatgaccgcccgcgacaactccccagacagcacccccaaccacccttcacagaccacaccagcccagaagaagacacctagctcaagctcccgccagaaggataaggtcaacaaaagaaacgaaaggggggagacaccccttcatatggcagcaataaggggtgacgtcaaacaggttaaggagcttattagcctgggcgccaacgtgaatgttaaagattttgccgggtggactcccctgcatgaagcttgcaatgtgggttactatgacgtggcgaaaatcctgattgcagctggtgctgacgtgaatacccagggattggacgacgatactccgttgcatgactctgccagctcaggccatcgcgatattgtgaaattgctgttacggcacggtggaaaccctttccaagcgaataagcatggggagcgccctgttgacgtggccgaaacagaggaattggaactgctactgaagagagaggtcccactgagtgatgatgatgagtcgtacacagattcggaggaggcccagagtgtcaatccgtctagtgtggacgaaaacatcgacagtgagaccgaaaaggactcgttaatctgcgagagcaagcagattctgccttccaagactcccctgcctagcgctctagatgagtacgagttcaaggatgatgacgacgaggagatcaataaaatgatcgatgacagacacattctgcgtaaagagcagcgcaaggagaatgaacccgaagccgaaaagacccatctgttcgcgaagcaagagaaagctttctaccccaaatcttttaaatccaaaaagcagaagccgagcagagtgctgtattcgtccacagaatcatctgatgaggaggctctccaaaataagaagataagtacatcctgctctgtgatccccgaaacgtcgaactccgatatgcagacaaaaaaagagtacgtggtgtctggagagcataaacaaaaaggtaaagtgaaaagaaaattaaaaaatcagaacaagaacaaagaaaaccaggaattgaaacaggaaaaggaaggcaaggagaataccaggatcactaatctcacagtgaataccggcctggattgcagtgaaaagacccgtgaggaggggaatttcagaaagtctttttcacccaaggatgacacatcacttcacctcttccacatttccacaggtaaatcccccaagcactcttgcggcctgtccgagaagcagagcacccctctgaaacaagaacataccaagacgtgtctctctcccgggtccagcgagatgtccttgcaacccgatcttgtgagatacgataatactgaaagtgaatttctccctgaatcttcttctgttaaatcttgtaaacacaaagagaagtcaaaacaccagaaggacttccacttggagttcggagagaagagcaacgccaagatcaaggacgaagaccatagcccaactttcgagaacagcgattgcactcttaagaagatggacaaggaggggaagaccctcaagaaacacaaattaaagcataaagaaagagagaaggaaaaacataagaaggagattgagggggaaaaggaaaagtacaagaccaaggactctgcgaaggagctccagagatccgtggagttcgaccgagagttctggaaggagaattttttcaaatctgatgagaccgaggacttattcctcaacatggaacacgagagcctgacactggagaaaaaatcgaagctagaaaaaaatatcaaagacgacaagagcacaaaggaaaagcacgtgagcaaagaaagaaacttcaaagaggagagagataaaataaaaaaagaaagcgaaaaaagctttcgcgaggaaaaaatcaaagatctcaaggaagaaagagaaaatattcctacggacaaagactcagagttcaccagcctgggtatgtcagcaatcgaagaatccattgggctgcacctcgtagaaaaagagatagatatcgaaaaacaggagaaacacattaaggaaagcaaagaaaagcctgagaaacgaagccagattaaggagaaggacattgaaaagatggagcgcaagaccttcgagaaagagaagaaaatcaaacacgaacataagtccgagaaagacaagttggatctgtctgaatgtgtcgacaagatcaaggagaaggacaagctgtactctcaccacacagaaaagtgccacaaggaaggggagaagtctaagaatacggctgcaatcaagaaaactgacgaccgagagaagtcaagggaaaaaatggacagaaaacacgataaagaaaagcccgaaaaggaacgacatttagcagagtccaaagaaaagcacctgatggaaaagaaaaataaacaatccgacaatagcgagtactccaagagcgaaaaaggtaagaacaaggagaaagacagggaacttgataagaaagagaagtcgcgagacaaggaatccatcaacatcaccaacagtaagcacatccaagaggagaagaagtcttcaatcgtcgatggcaacaaggcccagcacgagaagcccttgtctctgaaggaaaaaacaaaggatgaacccctgaaaacccccgacgggaaggagaaggacaaaaaagataaggacatagatcgctacaaagaacgggataagcacaaggacaaaatccagatcaactccctgctcaagctgaagagcgaggctgataagcccaagcccaagtcaagtcctgcaagcaaggatacgcgccctaaggagaaacgcctggtgaatgacgaccttatgcagaccagcttcgagagaatgctgagcctaaaggacctggagatcgaacagtggcacaaaaagcacaaggagaaaattaagcagaaagaaaaagagaggctcaggaaccggaattgcttggaattgaaaattaaggataaagagaagacaaaacacacacccacagagtcaaaaaataaggagctcactagaagcaaatcaagcgaagtgaccgacgcatatacgaaggaaaaacagcctaaggacgcagtctcaaatcgttcccagtcggtcgacacgaaaaacgtgatgacattaggcaagtcatctttcgtgtcagataactcccttaataggtccccacggtccgaaaatgagaagccagggttgtcatcccgttccgtctctatgatctctgtagcctcatcagaagactcatgccacacaactgtcaccactccgcggccccccgtggaatacgattcagatttcatgcttgagtcatctgaatcccaaatgtcatttagccagtctccattcctgtccattgccaagagtccagctttgcacgagagagagctagactccttggcggacttgcccgaaaggataaaacctccgtacgccaatcggctgagcacgtcacacttgcgttcatccagcgtcgaagacgtcaagctaatcatcagtgaaggccggcccaccatcgaggtgcggcgttgcagcatgccttcagtgatctgcgaacacaccaagcaattccaaactatcagtgaagagtccaaccagggttccttactgaccgtgcccggggacactagcccgtctcccaagccagaggtgttctctaacgtcccggaacgtgacctttcaaacgtctccaacatccacagctcatttgccaccagcccaacaggcgccagcaattctaaatacgtatcggcagatcgtaacctgatcaagaacacagcccccgttaatacagtgatggacagtcccgtgcatctggagccttcatctcaagtaggggttatacagaataagtcgtgggagatgcccgtggatcgccttgaaaccctcagtacgcgggactttatctgccctaatagcaacattccggaccaggaaagcagtctccagagtttctgtaactccgagaacaaagtgctgaaggagaatgccgactttctttcccttcggcagacagagttaccaggaaatagttgcgcccaagaccccgcgagcttcatgccaccacaacaaccatgttcattccctagtcagtcactaagcgacgcagaaagcatctccaagcacatgtcgttgtcttatgtcgccaatcaggaacctggaattctgcagcagaagaacgccgtccagattataagcagtgccctcgatactgacaatgaaagcacaaaagatacagagaatacattcgtgctgggcgatgtgcagaagacagacgcgttcgttccagtgtatagcgacagcactattcaagaggcctcccctaattttgagaaagcctacacgctgccagtcttaccctcagaaaaggacttcaacgggtccgacgcatccactcagttgaacacccactatgcattctccaagctgacttataaatcttcctccggccacgaggtcgaaaactcgaccactgacactcaggtgatttctcacgagaaggagaataagctggagtctctcgtccttactcacctgtcaaggtgtgactccgacctgtgcgagatgaatgcaggaatgcccaagggtaacctgaacgaacaggatccaaaacactgtcctgagtcagaaaaatgcctgctgtccattgaagacgaggagagccaacaatcgatcctatcttcactggagaatcacagtcaacagtccacccaacccgagatgcacaagtacggacaactggtgaaagttgaactcgaggaaaacgccgaggatgataaaaccgaaaaccagatcccccagaggatgaccagaaacaaagctaatacaatggccaatcaatctaaacagattttggcttcctgtaccctcttgagtgagaaggacagtgagtcctcctctccccgcggcagaatccgtcttactgaggatgatgatcctcagatccaccacccccggaagcgaaaggtgagtagggtgccccaacccgtgcaggtttcgccaagcctcttacaggctaaagaaaagacccagcagagccttgccgcaattgtggattccctgaagcttgacgagatccaaccttactctagcgaaagagccaacccatacttcgaatacctgcatatccgtaaaaaaatagaagaaaaaaggaaacttctctgttctgtgattcctcaggcaccacagtactacgacgagtatgttaccttcaatggttcatatctgttggacgggaatccactcagcaagatttgcattcctaccataaccccacctccgtcactatctgaccctttaaaagaacttttccggcagcaggaagtggtcaggatgaaattgcggctccagcactcaatcgaaagagagaagctgatcgtcagcaatgaacaggaggtgttacgcgtccactaccgggctgccagaactcttgctaaccagaccctgccatttagtgcgtgtactgtgttgctcgatgccgaggtatataacgtgccactggattctcaaagcgacgattctaaaactagcgtgcgagaccggttcaatgcacggcagtttatgagttggttgcaggacgtagacgacaaattcgacaaactcaagacttgtctgctaatgcggcaacaacacgaagcagctgccctgaacgccgtgcaacggctggagtggcagttgaagctgcaagagctggaccctgccacgtataagagcatctcaatatatgagatccaagaattctatgtgcctttggtggatgtcaacgatgacttcgagctgaccccgatatag

SEQ ID NO: 185209 - DNA, 6189 bp, Artificial Sequence
  derived and/or modified sequence
atgcccaagagcggcttcaccaagcccatccagagtgaaaattctgacagcgacagcaacatggtggagaagccctacggcaggaagagcaaggacaagatcgccagctacagcaagacccccaagattgaaagaagtgatgtgtccaaggagatgaaggagaagagctccatgaagaggaagctgcccttcaccatcagccccagcagaaatgaggagcgggacagcgacacagacagcgaccccggccacaccagcgagaactggggcgagcggctcatcagcagctaccgcacctacagcgagaaggagggccctgagaagaagaagaccaagaaggaggccggcaacaagaagagcacccctgtgtccatcctgtttggctaccccctgtctgagaggaagcagatggccctgctgatgcagatgacagcccgggacaacagcccagacagcacccccaaccaccccagccagaccaccccagcccagaagaagacccccagcagcagcagccggcagaaggacaaggtgaacaagagaaatgaaagaggagagacccccctgcacatggccgccatcagaggagatgtgaagcaggtgaaggagctgatcagcctgggcgccaacgtgaatgtgaaggactttgctggctggacccccctgcacgaggcctgcaatgtgggctactatgatgtggccaagatcctgattgctgctggagcagatgtgaacacccagggcctggatgatgacacccccctgcatgacagcgccagcagcggccaccgggacatcgtgaagctgctgctgcggcatggaggcaaccccttccaggccaacaagcatggagagaggcctgtggatgtggccgagacagaggagctggagctgctgctgaagcgggaggtgcccctgagtgatgatgatgagagctacacagacagcgaggaggcccagagcgtgaaccccagctctgtggatgaaaatattgattctgaaacagagaaggacagcctcatctgtgagagcaagcagatcctgcccagcaagacccccctgcccagcgccctggatgaatatgagttcaaggatgatgatgatgaggagatcaacaagatgattgatgacagacacatcctgaggaaggagcagaggaaagaaaatgaacctgaggccgagaagacccacctgtttgccaagcaggagaaggccttctaccccaagagcttcaagagcaagaagcagaagcccagccgggtgctgtacagcagcacagagagcagtgatgaggaggccctgcagaacaagaagatcagcaccagctgcagcgtcatccctgagaccagcaacagcgacatgcagaccaagaaggagtatgtggtgtctggagagcacaagcagaagggcaaggtgaagaggaagctgaagaaccagaacaagaacaaggagaaccaggagctgaagcaggagaaggagggcaaggagaacacccgcatcaccaacctgactgtgaacacaggcctggactgcagcgagaagacccgggaggagggcaacttcaggaagagcttcagccccaaggatgacaccagcctgcacctgttccacatcagcacaggcaagagccccaagcacagctgtggcctgtctgagaagcagagcacccccctgaagcaggagcacaccaagacctgcctgagccctggcagcagcgagatgagcctgcagcctgacctggtgcgctatgacaacacagagagcgagttcctgcctgagagcagctctgtgaagagctgcaagcacaaggagaagagcaagcaccagaaggacttccacctggagtttggagagaagagcaatgccaagatcaaggatgaggaccacagccccacctttgagaacagcgactgcaccctgaagaagatggacaaggagggcaagaccctgaagaagcacaagctgaagcacaaggagcgggagaaggagaagcacaagaaggagattgaaggagagaaggagaagtacaagaccaaggacagcgccaaggagctgcagaggtctgtggagtttgaccgggagttctggaaggagaacttcttcaagagtgatgaaacagaagatctcttcctgaacatggagcacgagagcctgaccctggagaagaagagcaagctggagaagaacatcaaggatgacaagagcaccaaggagaagcacgtgtccaaggagaggaacttcaaggaggagcgggacaagatcaagaaggagagcgagaagagcttccgggaggagaagatcaaggacctgaaggaggagcgggagaacatccccacagacaaggacagcgagttcaccagcctgggcatgtctgccatcgaggagagcatcggcctgcacctggtggagaaggagattgacatcgagaagcaggagaagcacatcaaggagagcaaggagaagccagagaagaggagccagatcaaggagaaggacatcgagaagatggagaggaagacctttgagaaggagaagaagatcaagcatgagcacaagtctgagaaggacaagctggacctgtctgaatgtgtggacaagatcaaggagaaggacaagctgtacagccaccacacagagaagtgccacaaggagggggagaagagcaagaacacagctgccatcaagaagacagatgaccgggagaagagccgggagaagatggacaggaagcatgacaaggagaagccagagaaggagcggcacctggccgagagcaaggagaagcacctgatggagaagaagaacaagcagagcgacaacagcgagtacagcaagtctgagaagggcaagaacaaggagaaggaccgggagctggacaagaaggagaagagccgggacaaggagagcatcaacatcaccaacagcaagcacatccaggaggagaagaagagcagcatcgtggatggcaacaaggcccagcacgagaagcccctgagcctgaaggagaagaccaaggatgagcccctgaagaccccagatggcaaggagaaggacaagaaggacaaggacatcgaccgctacaaggagcgggacaagcacaaggacaagatccagatcaacagcctgctgaagctgaagtctgaggccgacaagcccaagcccaagagcagccctgccagcaaggacacccggcccaaggagaagaggctggtgaatgatgacctgatgcagaccagctttgagaggatgctgagcctgaaggacctggagattgagcagtggcacaagaagcacaaggagaagatcaagcagaaggagaaggagcggctgaggaacagaaactgcctggagctgaagatcaaggacaaggagaagaccaagcacacccccacagagagcaagaacaaggagctgaccaggagcaagagcagcgaggtgacagatgcctacaccaaggagaagcagcccaaggatgctgtgagcaacagaagccagagcgtggacaccaagaatgtgatgaccctgggcaagagcagctttgtgtctgacaacagcctgaacagaagccccaggagtgaaaatgagaagccaggcctgagcagccgctctgtgtccatgatctctgtggccagcagcgaggacagctgccacaccaccgtgaccacccccaggcctcctgtggagtatgacagcgacttcatgctggagagcagcgagagccagatgtccttcagccagagccccttcctgagcatcgccaagagccctgccctgcacgagcgggagctggacagcctggccgacctgcctgagcgcatcaagccaccctatgccaaccggctgagcaccagccacctgcggagcagctctgtggaggatgtgaagctgatcatcagcgagggccggcccaccatcgaggtgcggcgctgcagcatgcccagcgtcatctgtgagcacaccaagcagttccagaccatcagcgaggagagcaaccagggcagcctgctgactgtgcctggggacaccagccccagccccaagccagaggtgttcagcaatgtgcctgagcgggacctgagcaatgtgagcaacatccacagcagctttgccaccagccccaccggggccagcaacagcaaatatgtgtctgctgacaggaacctgatcaagaacacagcccctgtgaacacagtgatggacagccctgtgcacctggagcccagcagccaggtgggcgtcatccagaacaagtcctgggagatgcctgtggaccggctggagaccctgagcacccgggacttcatctgccccaacagcaacatcccagaccaggagagcagcctgcagagcttctgcaacagcgagaacaaggtgctgaaggaaaatgctgacttcctgagcctgcggcagacagagctgcccggcaacagctgtgcccaggaccctgccagcttcatgccaccccagcagccctgcagcttccccagccagagcctgagtgatgctgagagcatcagcaagcacatgagcctgtcctatgtggccaaccaggagcccggcatcctgcagcagaagaatgctgtgcagatcatcagcagcgccctggacacagacaatgaaagcaccaaggacacagagaacacctttgtgctgggagatgtgcagaagacagatgcctttgtgcctgtgtacagcgacagcaccatccaggaggccagccccaactttgagaaggcctacaccctgcctgtgctgcccagcgagaaggacttcaacggcagtgatgccagcacccagctgaacacccactacgccttcagcaagctgacctacaagagcagcagcggccacgaggtggagaacagcaccacagacacccaggtgatcagccatgagaaggagaacaagctggagagcctggtgctgacccacctgagccgctgtgacagcgacctgtgtgagatgaatgccggcatgcccaagggcaacctgaatgagcaggaccccaagcactgcccagagagcgagaagtgcctgctgagcattgaagatgaggagagccagcagagcatcctgagcagcctggagaaccacagccagcagagcacccagcctgagatgcacaagtatggccagctggtgaaggtggagctggaggagaatgcagaagatgacaagacagagaaccagatcccccagaggatgaccaggaacaaggccaacaccatggccaaccagagcaagcagatcctggccagctgcaccctgctgtctgagaaggacagcgagagcagcagcccccggggccgcatccggctgacagaagatgatgacccccagatccaccaccccaggaagaggaaggtgtcccgggtgccccagcctgtgcaggtgagccccagcctgctgcaggccaaggagaagacccagcagagcctggccgccatcgtggacagcctgaagctggatgagatccagccctacagcagcgagcgggccaacccctactttgagtacctgcacatcaggaagaagattgaggagaagaggaagctgctgtgcagcgtcatcccccaggccccccagtactatgatgaatatgtgaccttcaacggcagctacctgctggatggcaaccccctgagcaagatctgcatccccaccatcaccccaccacccagcctgagtgaccccctgaaggagctgttccggcagcaggaggtggtgaggatgaagctgcggctgcagcacagcattgagcgggagaagctgattgtgtccaatgagcaggaggtgctgcgggtgcactacagagctgcccggaccctggccaaccagaccctgcccttcagcgcctgcaccgtgctgctggatgctgaggtgtacaacgtgcccctggacagccagagtgatgacagcaagacctctgtgcgggaccgcttcaatgcccggcagttcatgtcctggctgcaggatgtggatgacaagtttgacaagctgaagacctgcctgctgatgaggcagcagcacgaggccgccgccctgaatgctgtgcagaggctggagtggcagctgaagctgcaggagctggaccctgccacctacaagagcatcagcatctatgagatccaggagttctacgtgcccctggtggatgtgaatgatgactttgagctgacccccatctag

SEQ ID NO: 185210 - DNA, 6189 bp, Artificial Sequence
  derived and/or modified sequence
atgcccaagagcggcttcaccaagcccatccagagcgagaacagcgactccgatagcaacatggttgaaaagccttacggccgaaagtcgaaggacaagattgcctcctatagcaaaactccaaagatcgagcgatccgatgtcagtaaggagatgaaagaaaaatcctcaatgaaacggaagctccctttcaccattagtccatctcggaacgaggagcgcgactccgacactgacagtgaccctggtcacacgtctgagaactggggtgagcgtttgataagttcttaccgaacctactctgaaaaggaagggccagaaaaaaagaaaaccaaaaaggaagcagggaacaaaaaatctacacccgtcagtattctgtttggctaccctctgagtgaaaggaaacagatggccctgctgatgcagatgacagcaagggacaattcacccgactccactcctaatcatccatcccagactaccccagcccagaagaagacccccagctcatcttccagacagaaggataaagttaacaaaaggaatgagcgaggcgagacgccacttcacatggccgccattcgcggtgacgtgaaacaggtcaaagagttgatcagcctgggagccaatgttaatgtaaaagactttgcaggatggacaccactgcacgaggcatgcaatgtgggatactacgatgtggccaagatacttattgcggcaggtgctgacgtcaatactcagggtcttgatgacgatacaccccttcacgattctgcttcctcaggccatagagatatagtgaagctgctgttacggcacggaggtaatccattccaggctaacaagcatggtgagaggccagtggacgtcgccgaaaccgaagagctggaactgctgttaaaacgggaagtgcccctgagcgatgacgatgaaagctacacagatagcgaggaggctcagagtgtgaacccaagcagcgtagacgagaacatcgacagcgagactgagaaagattcattgatctgtgaatcaaagcagatccttcccagcaagacacccctgccgtcggctttggacgagtatgagttcaaagatgacgacgacgaggaaatcaataagatgatcgacgatcgccacatcctcagaaaggagcaaagaaaggagaacgaaccagaggctgaaaaaacgcatctcttcgctaagcaagaaaaggctttctacccgaaatcttttaagtctaaaaaacagaagccatccagagtactgtattcttctacagagtcaagcgacgaggaggccctgcagaacaagaaaatctctacttcatgtagcgtgatccccgagacaagtaattcagacatgcagacaaaaaaagaatacgtggtctctggcgagcacaaacagaagggcaaagtcaaaaggaaactcaaaaatcagaataaaaacaaggaaaaccaggagctgaagcaggagaaggaaggaaaggaaaacactcgtatcaccaacctaaccgttaatacaggccttgactgctcagaaaagacaagagaggaaggcaacttcaggaagtcgttcagccccaaggatgacacttcactccacctgttccacatctctaccggaaagtcccctaagcattcatgcgggctctccgagaagcagagtactcccctgaaacaggagcataccaagacctgcctttctcccgggtcttcagagatgtctctgcaaccagatctggtccggtatgataatacagagagtgaatttctgcccgagtcgtccagcgtcaaatcatgcaagcataaggaaaaaagtaagcaccagaaggatttccacttagaattcggagagaaatcgaacgctaaaataaaagacgaggatcactcaccaaccttcgaaaactccgactgtactctaaaaaagatggataaggagggtaaaacactgaaaaaacacaagctgaaacataaagaacgggagaaagaaaaacacaagaaggagatcgaaggcgaaaaggagaaatacaagaccaaagatagcgccaaggagctgcagcgtagcgtagaatttgacagggagttttggaaggaaaacttcttcaagtccgacgaaaccgaggatcttttcctcaatatggagcatgagtcgcttacccttgagaagaaaagcaaactcgagaagaatattaaagacgataagtcgacaaaagagaagcacgtgtcaaaagaacggaacttcaaggaagagagagacaagataaaaaaagaaagcgagaaaagctttagagaagaaaaaatcaaggacctgaaagaagaacgcgagaacattccaactgataaggacagcgaatttacctccttgggtatgagtgcaatcgaagaaagcattggtttgcatctggttgagaaagagattgacatcgaaaagcaggaaaagcacatcaaggaatctaaggaaaaaccagaaaagcggagccagattaaggaaaaggatatcgaaaagatggagcggaagacctttgaaaaggaaaagaagatcaagcacgaacacaagtctgagaaagacaaactcgacctgtccgagtgcgtcgacaagatcaaggagaaggataagctgtattcacaccataccgaaaagtgccacaaggagggcgaaaagtccaagaataccgccgccattaagaagaccgatgatagggagaaatcacgcgagaagatggatcgcaagcatgacaaggaaaagccggaaaaggaaagacatctggccgaaagtaaggagaagcacctcatggagaaaaaaaataaacaatcagataactccgagtactcgaagtcggaaaaaggcaaaaacaaagagaaggaccgagaattggacaagaaagaaaagtcccgtgacaaggaatctattaatataacgaacagcaagcatatccaagaggaaaaaaagtcttcaatagtggacggtaataaggcccagcacgaaaaaccactgtccctgaaggagaagaccaaggacgaaccattaaagacaccggatgggaaggagaaggacaagaaggacaaggacatcgatcgatataaagaaagggataagcataaggacaagattcagattaacagtcttctgaagctgaagtctgaggccgataaacccaagcccaagagtagccccgcatctaaggacactaggcctaaggaaaagcggctggttaatgatgaccttatgcaaaccagtttcgaaagaatgctcagtctgaaggacttggaaattgagcagtggcacaaaaaacacaaggaaaaaattaaacagaaggaaaaggagcggctgcgaaatcgtaattgcctggaactgaaaattaaggataaagaaaaaactaagcacactcccactgagagtaagaacaaggaattaacccgcagcaagtcatcagaggtcacggatgcatatacaaaagagaaacagcccaaggacgcagtttctaacaggagccagtctgttgacacaaagaacgtgatgactctgggaaagtctagcttcgtgtcagacaatagcctgaacaggtcccctaggtcagaaaacgaaaagccaggcctgtctagcagatccgtatccatgatttctgtggcttcttcggaagacagttgccacaccactgtcacaacgccacgccctcctgtggagtacgactccgacttcatgttagagagctccgagtcccagatgagtttcagccagagtccatttctgtctattgcaaagtctcctgcgttacacgagagggaacttgacagcctggctgatctccctgaacgaattaaacccccgtatgccaatcgcctgtccactagccacttgcgcagctcttcagtggaggatgtcaagctgatcatttccgagggccgacctactatcgaggtgagacgctgcagcatgcctagcgtgatctgcgagcacacaaaacaatttcagactataagcgaagagtctaatcaaggaagcttactcacagttccaggcgatacctccccctcacctaaaccggaggtgttctcaaacgtgcctgagcgcgatcttagtaatgtctccaatattcatagctcattcgcaacttctcctaccggcgcatccaactcgaaatacgtttccgctgatcgaaatttaatcaaaaacacagcccccgttaacacggtaatggacagccctgtgcacctggaaccgtcctctcaagtgggggttatccagaacaagtcctgggagatgcccgtcgaccgtctcgagacactcagcactcgggacttcatctgtcctaacagcaacataccagaccaggaaagctccctgcaatccttttgcaattccgaaaacaaagtcttgaaggagaatgccgactttctatctcttcgacaaacagagctcccagggaacagttgcgcccaggaccctgcgagtttcatgcctccacagcagccttgttcctttccttctcagtctctgtccgatgccgagtcaatttccaaacacatgtctctcagttacgtggcaaatcaggagccaggaatcctgcagcaaaagaatgccgtgcagatcatttcatcagccctggacaccgacaatgaaagtactaaggataccgagaatacttttgtgctaggcgatgtgcagaaaaccgatgcattcgtccctgtgtatagcgatagcacaattcaagaggcttccccgaattttgagaaggcctacacgctgccagtactgccttccgagaaggactttaatggatcagatgcctccactcagctgaatacccactacgccttttccaagttgacttacaaatcttctagcggtcacgaggtggagaattccactacagatacacaagtgatcagccacgagaaggaaaataagctagagtccctcgttctcactcatttgtctcgctgtgactctgatctgtgtgaaatgaatgccggtatgccgaaaggcaacctgaatgaacaggatcccaaacactgtccggagtccgagaaatgtctgttatccattgaagacgaggagagtcaacaatctattctcagcagcctggaaaaccattctcagcagagcacccagccagagatgcataagtacgggcagctggtgaaagtcgagctggaagagaacgctgaagatgataaaacagaaaatcagattccccaaagaatgacaagaaacaaagccaacacaatggcgaatcagagtaaacagatcctcgcttcctgcactcttcttagtgagaaggattccgagtcatcttctccaagaggtcgtattaggctgactgaggacgacgatccacagattcaccacccaagaaaacgaaaggtgtcacgggtcccgcagccggtgcaggtgtcccctagcctcctacaggccaaagagaagacacagcagagcctggctgccatcgttgatagtcttaagctcgatgagattcagccatattcttccgaacgagctaacccatacttcgaatacttacacatccgcaagaagattgaggagaagagaaagctgctgtgcagcgtgatcccacaggcccctcagtattacgacgaatatgtgaccttcaacgggtcctatcttctcgacggaaatccgctatcgaaaatatgtatcccaactatcactccccccccctccctctcggatcccctgaaggagctcttccgtcagcaagaagtagttaggatgaagctgcgccttcagcattccattgagcgagaaaagctcattgtcagcaatgagcaggaagtacttagggtccattatcgggccgccaggaccctggccaaccagaccttaccgttcagcgcctgtactgtgctattagacgcggaagtgtacaatgtcccactagactcccagtcggatgattcaaaaacctccgtcagggatcggttcaatgccaggcagtttatgtcttggctccaggatgtcgatgataaattcgataaactcaaaacctgcctgctcatgaggcaacagcacgaagccgctgcactgaatgccgtgcagcgacttgagtggcagcttaaactgcaagaactggaccccgctacgtataagtctattagtatttatgaaatccaggaattctacgttccgttggtcgacgttaacgatgactttgagctcacacccatttag

SEQ ID NO: 185211 - DNA, 9069 bp, Artificial Sequence
  derived and/or modified sequence
aatcgcggggcgacgctgtcctgggagcgaggaggctgtggtgagagacggaccgagaccggagatgttttcaagcccggctccggcggctttacaggcggctgcagcggcgacgaagacaacgacagcgacggctacgccgaagcactcgttccgggggtgaagcctcctgcgccggccttgcctcggatccaggatgagaagactgataaaagaagaagctagctgaacagctgtaaaatgcccaaatctgggttcacaaaaccaattcagagtgaaaattctgacagtgacagcaatatggtagagaaaccatatggaagaaagagtaaagacaagattgcatcctacagcaaaactccaaaaattgaacgaagtgatgtgagcaaggagatgaaagagaaatcatccatgaaacgtaaacttccttttactattagcccatcaagaaatgaagaacgagattcagacacagattcagatccaggacatacaagtgaaaattggggggagagacttatatcttcttacaggacatactcagagaaagaaggtccagaaaagaagaagacaaaaaaggaagctggaaataagaaatccacaccagttagcattctttttggttatccactctctgagcgaaaacagatggcacttcttatgcagatgacagcaagagacaacagtccagattccacaccaaatcatccatcacaaacaacgcctgcccaaaagaaaactcccagttcttcatctcgacagaaagataaagttaataaaagaaatgaacgtggtgaaactcctttacacatggctgctattcgaggagatgtgaaacaagttaaagaattaataagtttaggggcaaatgtgaatgtgaaagattttgcaggttggacaccactgcatgaagcttgcaatgttggatattacgatgttgctaagatacttatagcagctggagcagatgttaacacacaaggattagatgatgacactccactccatgattctgctagtagtgggcacagagatatagtaaagctgttacttcgtcacggtggaaatccatttcaagctaataaacatggggagcgtccagtggatgtagcagaaacagaggagttggagttgctactaaaaagagaggtgcctttatctgatgatgatgaaagttacacagattccgaagaggctcaatctgtaaatccttctagtgttgatgaaaatattgactctgaaacagagaaagactctctcatctgtgaaagtaaacagatacttcccagtaaaacacctcttccatctgcccttgatgagtatgagttcaaagatgatgatgatgaagaaattaataagatgattgatgataggcatattcttaggaaagaacaacgaaaagaaaatgaacctgaagcagaaaaaactcatttatttgcaaaacaggagaaagccttctatcctaaatcatttaaaagtaaaaaacaaaagccatctagggtcttatattcaagtactgaaagttctgatgaagaagctcttcagaataaaaagatttctacttcatgttccgtcatccctgaaacatcaaattctgatatgcaaaccaaaaaggaatatgtagtttcaggtgaacacaaacagaaaggcaaagttaaaagaaaattgaaaaatcagaataaaaataaagagaaccaagagctaaagcaagaaaaggaaggaaaagaaaatacaagaataacaaacttgacagtaaatactggactagattgttcagaaaagaccagagaggaggggaactttaggaaatcttttagcccaaaagatgatacttcattacatttatttcatatttccactggtaaatctcccaaacattcttgtggattaagtgaaaaacagtcaacaccactaaaacaagaacatactaaaacatgtttatcaccaggaagttctgaaatgtcattacagcctgatcttgttcggtatgataatacagaatctgaattcttgccagaaagttcaagtgtaaaatcttgtaagcataaggaaaaaagcaaacatcagaaagatttccacttagaatttggtgaaaaatcaaatgccaaaataaaggatgaagatcatagtccaacatttgaaaattcagattgcacactgaaaaaaatggataaagaaggtaaaacattaaaaaaacataaattgaagcataaagagagggaaaaagaaaagcataaaaaagaaattgaaggtgaaaaggaaaaatacaaaactaaggatagtgccaaagaactgcagaggagtgtggaatttgatagagaattttggaaagagaatttttttaaaagtgatgaaactgaagatctctttttaaatatggaacatgaatccttaacattagaaaaaaaatcaaaattggaaaaaaacatcaaagatgataaatcaaccaaggaaaagcatgtgtcaaaagagaggaactttaaagaggaacgagacaagattaaaaaggaaagcgagaaatcttttagggaggaaaaaataaaagatctaaaagaagagagagaaaacatacccacagataaagactcagaatttacttctttgggtatgagtgccattgaggaatctatagggcttcatttagtggaaaaggaaatagacattgaaaaacaagaaaagcatataaaggaaagtaaagaaaaacctgagaagcgatctcaaattaaagaaaaggacattgagaagatggaaagaaaaacctttgaaaaagaaaagaagataaaacatgagcataagtcagaaaaagacaaattagatcttagtgaatgtgttgataaaataaaagaaaaggacaagctatattcgcatcacacagaaaaatgccataaagaaggtgagaagagcaaaaatactgctgctattaaaaaaactgacgacagagagaaaagtagagaaaagatggataggaaacatgacaaagaaaagcctgaaaaagagaggcatctagcagaaagcaaagaaaagcacttgatggagaaaaaaaataaacaatcagataatagtgaatacagtaaatcagaaaaaggcaaaaataaagaaaaagacagggagctagataaaaaggaaaaatctagagataaagaaagtataaatataactaactccaaacacatacaggaagaaaaaaaatcaagtatagtagacggtaataaagcacaacatgaaaaacccttatcccttaaagaaaaaacaaaagatgaacctttgaaaactccagatggaaaagaaaaagataaaaaagataaagatatagatagatacaaagaacgagacaaacataaagataaaattcaaataaatagcttactcaaactaaaatctgaagcagataagcctaaacctaagtcatcaccagcatcaaaagatacccgacctaaagaaaagaggttagtgaatgatgatttaatgcagacaagttttgaacgaatgctaagccttaaagacctagaaatagaacagtggcacaaaaaacataaggaaaaaattaagcaaaaagaaaaggaacggttgagaaaccgaaactgtttagaacttaaaataaaagataaagaaaaaacaaagcatacaccaactgaatccaaaaataaagaacttactaggtcaaagagttcagaagtgactgatgcatataccaaggagaaacaacctaaagatgctgtaagtaacagatcacaatctgttgacaccaaaaatgtaatgactttagggaagtcatcttttgtttcagataatagcttaaacaggtctcctagatcagaaaatgaaaagccgggtctcagctccagatctgtatccatgatttctgttgctagttcagaagattcctgccatactacagtgacaaccccaaggcctccagttgagtatgactctgactttatgttagagagttcagaatcccaaatgtccttttcccagtcaccttttttgtcaattgccaaatctcctgctcttcatgaaagggaattggacagcctggctgacttgccggagcggattaaaccaccatatgcaaacagactttcaacatcccatcttaggtcatcttctgtagaagatgttaaactaattataagcgaggggagacctaccatagaagttcgaagatgtagcatgccttctgtcatttgtgaacataccaaacaattccaaacaatatcagaagagagcaatcaaggtagcttattaactgtgccaggagatactagtccttctcccaaacctgaggtattctcaaatgtgcctgaaagagacctttcaaatgtatctaacatacattccagttttgcaacttctccaactggagcttcaaacagcaagtatgtttcagctgatagaaatctcatcaagaatactgccccagtgaacactgtaatggacagtccagtgcatttagagccatctagtcaggttggtgtgatccagaataaatcatgggagatgcctgttgatagactagagacattaagcaccagagactttatctgcccaaattctaacatacctgatcaagaatcctctcttcagagtttttgtaattctgaaaataaggtattgaaagaaaatgctgattttttatccctgcgccagactgaactgccaggaaactcttgtgctcaggatccggcatcctttatgcctccacagcagccttgctctttccccagccaatcactttcagatgctgaatcgatttctaaacatatgtctttgtcatatgttgctaatcaagagccaggtattttacaacaaaaaaatgcagttcagattattagttctgctttagatactgataatgaatctacaaaagatacagaaaatacttttgtcctaggagatgttcaaaaaacagatgcctttgtcccagtgtactctgacagcactattcaagaagcatcaccaaactttgagaaagcttatactttacctgtgttaccatcagaaaaggactttaatggaagtgatgcctctacccagctaaatacacattatgcatttagcaaactaacttacaagtcttccagtggccatgaagttgagaatagcacaactgatactcaggtcatttcacatgaaaaagaaaacaaactggagagtttggttttaactcatttgagtaggtgtgattctgatttatgtgaaatgaatgcagggatgccaaaaggaaacctaaatgaacaagatccaaaacattgtcctgaaagtgaaaagtgtttgctttccatagaagatgaggaatctcaacaaagcattttatcaagtctggaaaaccattcacagcagtcaactcaaccagaaatgcataaatatggtcagttagttaaagtagaattagaagaaaatgccgaagatgataaaactgaaaaccaaatccctcaaagaatgactagaaacaaagcaaatacaatggcaaatcaaagcaaacagattcttgctagctgtacactattatcagaaaaagacagtgaatcctcatctcctagaggaagaataagattaactgaagatgacgatcctcaaattcaccatccacggaaaaggaaagtgtcacgtgtacctcagcctgtgcaagtgagtccctctttactacaagcaaaagagaaaactcagcaatctctggcagccattgtagattctctaaaactagatgagattcagccatacagttcagagagagcaaatccatattttgaatacttgcacataaggaaaaaaatagaagaaaaacgcaaattactgtgtagtgtgattcctcaagcacctcagtactatgacgaatatgtaacatttaacggatcatatctcctggatggaaaccccttaagcaagatttgtattcccacaattacaccaccaccttcactgtcagatccacttaaagagctttttcgacaacaggaagttgtaaggatgaaactacgtttgcaacacagtattgaaagggaaaaactcattgtatccaacgaacaagaagttttgcgagttcattacagagctgcaagaacattggcaaatcaaacactgccatttagtgcttgtactgttttgctggatgccgaagtatacaatgtaccattggactctcagtctgatgacagtaaaacttctgtgagggatcgctttaatgcaagacaattcatgtcttggttacaagatgtggatgataaatttgacaaattaaagacctgtcttttaatgaggcaacaacatgaagctgcggctttaaatgctgtccagaggttagaatggcagctcaaactccaggaacttgatcctgccacctataaatctatcagcatttacgaaatccaggagttttatgttccccttgttgatgttaacgacgactttgaattgactcctatatagcagtcagtacttcctgatggtattgtcctaaactggtgatgctcaagcattatactgtggaatactgccttttgacaaaaatactcatgcctttacaattgttagtaaagttcgattatagttggttatgtagtaaacactgtcattttataaaaaatgagaattattttggatcttagatccaaacacagtttctaatagaaaactattatttatattgggaaaggtaactattgcattagagcatgttggcagactggtaggtatttaaaaagttgagaatctgctaacagcgctggaagttgttagcgctctaagtaataagataaccactagtattcaaatctctttcaggttttattaaaaaatatatatcaataaactaaaaggttcaattcctaccaaatagtttctaatgtgggagaaaaacttggcacaaaatttcttcagtttattatctgtaaattgtacagttttctttttgaaagttttaatattgtcttcctttttaataacttattttatacatattgtgcagatgtaaatcttgtaattaatggtcaaactgtataaagggattggtagtcaaaacatgtacaaagaaatacctgtaaaactgttttgtctcatgttttattggaccaaagttgtggtttgtatggagtgtagtagtagtgtgtacaggtagaaaacttttaaatacagcatgcaggtgtttcagttagcttgttttcatcaccataactgcaaagatgtggcttagttgtattgcatgcttcctataatttaactctccataattgatgcctgcagtagtgtaaggcatttcatactagtctcctctagtagacctgtgacttactgtgttggacatattatttagacttagtcatacaaagaaacttagctcttttttcatctcacagtaaagcctatttccccaggaaaaaaataaatgcctttgaatgaaaattctgaaattgtaaatgtctattttaatattcacctatgaaagaatctgtgaatatatgtaaatacgtttaataaattttattggtcatgttaaatcattgtaaaacttttttacattgcttaatgttttaagcttaatagcctttgcacttttaaaataaaaaccaagtatgcaaatcaaagatatttggtagtcaaaataagtaaaagaaatataggaatattccagtcaatctctgaaatgtttatgaaaaacaggttaatatgttgtatttttttccttgtatcaagatgcaaaacataatttgcaaaattttataattgaaataaaacttggtatgctgttttataataaattagcaatatactttaaaaaaaatccagtttctcctataacatgatgtaaattaaatattcaggaatatttcaggtctgaaatctgctgctgaacttgttagacatttttgaaaggaaaattaggttagcgtacaatttatcataaatatatgaggtaaaatttgcaaaactttccacagtactttcttgaattataatactgaatgttttctgttccgatagagaaaagtgaagcaaatatgtgaggaatgaagtgatctagtgcaagttggtaattccagctaatgggagagaatgtaaatgtgcaaaggtacatattaagcttagggatttttgaatttttacgtcagtttatattttaattcttactgtacttggcatgcgcaataaagcagcacatgtaaaaaaaaaatacacagtgcaaggactttattataaaggttggatgtagttttccttagaaatttaggtgagagattttggccttttttattggataaattgggccagaaaggcagggtagatttcgaagcactggttctgttgaagttaagtttattaagcctgggaacattaaaagctaatttataaaagcaatactttttaatatgaaaacttactgcaaagtttgtttatacttttgcctaaaaaggaaattggatgggatactgtggcaaatcataaaaaaccagataattgaactttgaagttatagaaaatcagagaggggtaagtttatagggcattttgttctgatggttcaaccagaggtctgggaaatagcactgttggcccaaacagaacaggcttttagaagataaaagcgacaagaaggaatctggtgaattttagtcatcccagctttttagtcttaaccacagttctcactctcttaaatggtacctcaaaaagctggagcctctctgccatgattatgcttctacaaatttcttttataaagagactcaaagctaatgatagcttaaaagaaaagttaatgccttctcattggaaatgtataatcaaataagtagttaagggcttttggtattaaagatattctgaagctctgaaatgctagaaaaaaatttggaatggagtatatgcctgaaaaggttttggattcagaaagaaaaaggatggttagtttaatcagtgattctttttaaactcttcaaatatcatgaacaagatactaaattgtacctaaggatttgtatttctttacaatttgttctaaatatctgtttaatgactagttgatatttgtgcatgttatttaataaagagttatatttttatagaaaaaaa

SEQ ID NO: 185212 - DNA, 451 bp, Artificial Sequence
  derived and/or modified sequence
actgaagatctctttttaaatatggaacatgaatccttaacattagaaaaaaaatcaaaattggaaaaaaacatcaaagatgataaatcaaccaaggaaaagcatgtgtcaaaagagaggaactttaaagaggaacgagacaagattaaaaaggaaagcgagaaatcttttagggagggtatgagtgccattgaggaatctatagggcttcatttagtggaaaaggaaatagacattgaaaaacaagaaaagcatataaaggaaagtaaagaaaaacctgagaagcgatctcaaattaaagaaaaggacattgagaagatggaaagaaaaacctttgaaaaagggacaagctatattcgcatcacacagaaaaatgccataaagaaggtgagaagagcaaaaatactgctgctattaaaaaaactgacgacagagagaaaagtagagaaaa

SEQ ID NO: 185213 - DNA, 6189 bp, Artificial Sequence
  derived and/or modified sequence
atgcctaaatctggtttcactaaaccgatccagtcagagaactcagactctgacagtaacatggtggagaaaccatatgggcgaaagtccaaggataaaatcgctagctactcgaagacccctaaaattgaacgctccgacgtaagcaaagaaatgaaggaaaagtcctccatgaaacgaaagctgcctttcaccatctcgccatctcgaaacgaggagagggacagcgacacagactctgaccctggacacacatcggagaactggggggaacggctgatatcaagctaccgcacgtacagtgaaaaggaggggcctgaaaagaagaagacaaagaaggaggccggaaataaaaaatcgacgcccgttagtattctgttcgggtaccctttatcagagcgcaagcagatggcccttcttatgcagatgactgctcgggataatagccccgattccacccccaatcatccatcacagaccactcccgcacagaaaaaaacgccaagttccagctcgcgccagaaggacaaggtcaacaagaggaacgagcgcggtgagacacccctgcatatggcagctattcggggtgacgtgaaacaggttaaagaacttattagcttaggcgcaaacgttaacgtgaaagactttgctgggtggacccccttacatgaggcatgtaatgtcggctactacgacgtagctaagattttaattgcagctggggcagacgtaaatacccaagggctcgatgacgataccccactgcatgacagtgccagctcaggccatcgggacatagtcaagctcttattgaggcacggcggaaatccgtttcaagccaataaacacggggaaaggccagtggatgtagccgagactgaggagctggagctgcttctcaaacgagaagtacctttgagcgatgacgatgagtcttatacggactctgaggaggcccagagcgtgaacccttcgtccgtagacgagaacatagattctgaaactgagaaggactcactgatctgcgagagcaagcaaatcttaccctccaaaactccattacccagcgctctcgatgagtatgaatttaaagatgatgatgacgaggagatcaataaaatgatcgatgatagacacatccttagaaaagagcagcgaaaagagaatgagcccgaggccgagaagacccacctcttcgccaagcaggaaaaggcgttttaccctaagagcttcaagtctaagaagcagaagccaagcagagtgctatattcgtccactgaatcaagtgacgaggaggcgctgcaaaataaaaaaatctctacatcttgctctgtgatcccagaaacatctaactccgacatgcagacaaagaaggagtatgttgtgagcggtgagcataaacaaaaaggcaaggtaaaaagaaaacttaagaaccagaacaaaaataaagagaatcaggaactaaagcaagaaaaagaggggaaggagaataccaggatcacgaacctgacggtaaacactgggctggattgtagcgagaaaacccgcgaagagggaaattttaggaaaagcttcagccccaaggatgatactagcctgcacctgttccatatctctactggtaagtctcctaagcattcttgtggactgtcagaaaaacagagcactccccttaagcaggagcacactaagacttgcctatccccaggctcttccgagatgagtttgcagcctgacctggttcgctacgacaacacagagagtgagttcctccctgaatccagctcagttaagagttgtaaacacaaagagaaaagtaaacaccagaaggactttcatttggagttcggagagaaatctaacgctaagattaaggatgaggatcactctccaacgttcgagaacagcgattgtacgctcaagaagatggataaagagggcaagaccctcaagaaacacaagttgaagcataaagagcgagagaaagagaaacacaagaaggaaatcgagggcgagaaagagaagtacaaaactaaagattccgctaaggagctgcagcgttctgtagaattcgaccgagagttttggaaggagaacttttttaagagtgacgagacggaggacctgttcctgaatatggaacatgaaagtcttaccctcgagaagaagtctaaactggaaaaaaatataaaggacgacaagtcaacaaaggagaaacacgtgtcaaaggaacggaactttaaggaggaacgggataagattaagaaagagtcagagaaatcgtttcgagaggagaaaatcaaagaccttaaagaggagagagaaaacatacctactgacaaggactctgaatttaccagcctcggaatgtccgctatcgaagaatctatcggactgcatcttgtggagaaggagattgatatcgagaagcaagagaagcacattaaggaatcaaaagaaaagcccgaaaagcgcagccagatcaaagaaaaggacattgagaagatggagagaaagactttcgaaaaggaaaagaaaatcaaacacgaacacaagtctgagaaggacaagcttgacctctcagagtgcgtggataaaatcaaggaaaaggataagctgtacagccatcatactgagaagtgccataaggaaggcgaaaaatctaagaatactgcagcaatcaagaaaaccgacgacagggagaaatcaagggagaagatggaccgcaaacatgacaaagaaaaaccagaaaaagagcgccacctagctgagtcaaaggaaaaacatctgatggaaaaaaagaataagcagagcgacaattccgagtactcaaagagtgagaaaggcaagaacaaagagaaggaccgcgagctggataaaaaggagaaatcgagagataaggaatctattaatattacgaacagcaagcatattcaggaggaaaaaaagagctctattgtggatggcaataaggcccaacacgagaaacccctgtccctgaaagaaaaaactaaggacgaacccctgaagaccccagacgggaaggagaaggataagaaggataaagatatcgaccgctataaagagagagacaagcacaaagacaaaatacagatcaactcactgctcaagctgaaatccgaggcagataagcccaagcctaagtcatctcctgcttctaaggatacgaggccaaaggaaaaacgtctcgtcaacgacgatttgatgcagacaagcttcgaaagaatgctctcccttaaggacctggagattgagcagtggcacaagaagcataaggagaagatcaagcagaaggaaaaggagaggctgcgcaaccgtaactgtttagaactcaaaatcaaagataaagagaagactaaacacacaccaaccgagtctaaaaacaaggagttgacgaggtctaaatcaagtgaagtgactgacgcctataccaaagaaaagcaaccaaaagatgccgttagtaacaggtcacaaagtgtggacactaaaaacgtaatgactttgggaaaaagcagcttcgtcagcgacaattccctaaaccggagcccacgaagcgaaaatgagaagcctggattatcctctcggtctgtgtctatgatctcagttgcgagttcagaggattcctgccacaccaccgttactacccctagaccacctgtagagtacgacagtgacttcatgttagagtcctcggaatcacagatgagcttcagtcagtctccttttttaagtattgcaaagagtccggctctacacgaaagagaattagacagcttggccgacctacctgagcgcatcaagcccccatatgccaatcggctgtcgacctcccatttgagaagctcgagcgtcgaggacgtcaaattgatcatttccgagggaaggcccaccatagaagtgaggagatgttcaatgccttcagtcatttgcgaacacaccaagcagtttcaaactatcagcgaggagtctaaccaggggagccttcttactgtgcctggggacacaagcccaagtcctaagccagaggtgttctccaatgtgccggaaagggacttgagcaacgtttctaacattcatagttcattcgccacttcacccaccggagctagcaactcaaagtacgtcagcgcggaccgaaatctgatcaagaatacagccccagtaaacactgtcatggactctccagtacacctcgagccctcatcgcaggtgggagtaatccagaacaagtcgtgggagatgccagtcgataggctagagacgctgagtactagggactttatctgtcctaattccaatattccggatcaggaaagcagtttacaatccttctgtaattctgaaaacaaggtgttaaaagagaacgcagactttttgagcctgcgccagacggagctgcccggaaactcctgtgcacaagatcccgctagtttcatgcctccgcagcagccgtgctccttcccctcccaatccctttctgatgcagagtccatatccaaacatatgtctcttagctacgtggccaatcaggaaccaggcattttgcagcaaaaaaacgcggtgcagatcatctcttccgcgctggatacagacaatgagagcactaaggataccgaaaacactttcgttttgggagacgtgcagaagactgatgccttcgtccccgtctatagcgacagtaccattcaggaagcgagcccgaactttgagaaggcttacaccctccccgtcttgcctagcgaaaaagattttaacggttcggacgcgtcgacacaattgaatacacactacgcattttctaagctcacttataaaagttcttccggccatgaggttgagaacagtacaacagacacacaggtgatctctcatgaaaaggaaaacaagctggagtccctggtcttgacccacttgagccggtgtgattccgatttgtgcgagatgaatgctggtatgcccaaggggaatctgaacgagcaggaccctaagcactgcccagaaagtgaaaaatgtctcctcagtattgaagacgaagagtctcagcagagcattttgtcttctctggagaaccattcccagcagagcacccagcctgaaatgcacaaatacggtcaacttgtcaaagtcgaattggaagagaacgcggaagatgataaaaccgaaaaccagatcccgcagagaatgacccggaacaaagctaacactatggccaaccagtctaaacagatactcgcctcctgcaccctgctctcagaaaaagactccgagtccagctcacccagaggcagaattcgacttacagaggatgacgacccccagattcatcatccgaggaagcgcaaagtatcacgggtcccccagcctgtgcaggtctccccttcgctattacaggccaaggagaaaacccagcagtctctggcagccatcgttgacagcctgaaacttgatgaaatccaaccatactctagcgagagggccaatccctattttgaataccttcacatccgtaagaagatcgaagaaaaaaggaaactcctatgctccgtgatcccacaagcaccccaatactatgacgaatatgtaacattcaacggtagctatctgttggacggtaaccccctatccaagatctgtattccaacgattactccccctccaagcttaagcgatccactgaaggagcttttcagacagcaggaggtggtgcgcatgaagctgaggttgcagcacagcattgagagggagaagctgatcgtgtctaacgagcaggaagtgctgagagttcactacagggcagcacggacacttgcaaatcaaactctgccctttagtgcctgcaccgtactcctagacgctgaggtctataacgtgcccctcgattctcaaagcgacgactcaaagacctctgtgagggatcggtttaatgctagacagttcatgtcgtggctccaggacgtcgacgacaagttcgacaagctcaagacatgtctgctgatgaggcaacagcacgaggctgccgctttaaacgccgttcaacggctggagtggcagctcaagttacaagaactcgaccctgccacatataaaagcattagcatttatgaaattcaggagttctatgtgccattggtagacgtgaacgatgatttcgaactgactcctatatac

SEQ ID NO: 185214 - DNA, 6189 bp, Artificial Sequence
  derived and/or modified sequence
atgcccaagagcggcttcaccaagcccatccagagcgagaacagcgacagcgacagcaacatggtggagaagccctacggcagaaagagcaaggacaagatcgccagctacagcaagacccccaagatcgagagaagcgacgtgagcaaggagatgaaggagaagagcagcatgaagagaaagctgcccttcaccatcagccccagcagaaacgaggagagagacagcgacaccgacagcgaccccggccacaccagcgagaactggggcgagagactgatcagcagctacagaacctacagcgagaaggagggccccgagaagaagaagaccaagaaggaggccggcaacaagaagagcacccccgtgagcatcctgttcggctaccccctgagcgagagaaagcagatggccctgctgatgcagatgaccgccagagacaacagccccgacagcacccccaaccaccccagccagaccacccccgcccagaagaagacccccagcagcagcagcagacagaaggacaaggtgaacaagagaaacgagagaggcgagacccccctgcacatggccgccatcagaggcgacgtgaagcaggtgaaggagctgatcagcctgggcgccaacgtgaacgtgaaggacttcgccggctggacccccctgcacgaggcctgcaacgtgggctactacgacgtggccaagatcctgatcgccgccggcgccgacgtgaacacccagggcctggacgacgacacccccctgcacgacagcgccagcagcggccacagagacatcgtgaagctgctgctgagacacggcggcaaccccttccaggccaacaagcacggcgagagacccgtggacgtggccgagaccgaggagctggagctgctgctgaagagagaggtgcccctgagcgacgacgacgagagctacaccgacagcgaggaggcccagagcgtgaaccccagcagcgtggacgagaacatcgacagcgagaccgagaaggacagcctgatctgcgagagcaagcagatcctgcccagcaagacccccctgcccagcgccctggacgagtacgagttcaaggacgacgacgacgaggagatcaacaagatgatcgacgacagacacatcctgagaaaggagcagagaaaggagaacgagcccgaggccgagaagacccacctgttcgccaagcaggagaaggccttctaccccaagagcttcaagagcaagaagcagaagcccagcagagtgctgtacagcagcaccgagagcagcgacgaggaggccctgcagaacaagaagatcagcaccagctgcagcgtgatccccgagaccagcaacagcgacatgcagaccaagaaggagtacgtggtgagcggcgagcacaagcagaagggcaaggtgaagagaaagctgaagaaccagaacaagaacaaggagaaccaggagctgaagcaggagaaggagggcaaggagaacaccagaatcaccaacctgaccgtgaacaccggcctggactgcagcgagaagaccagagaggagggcaacttcagaaagagcttcagccccaaggacgacaccagcctgcacctgttccacatcagcaccggcaagagccccaagcacagctgcggcctgagcgagaagcagagcacccccctgaagcaggagcacaccaagacctgcctgagccccggcagcagcgagatgagcctgcagcccgacctggtgagatacgacaacaccgagagcgagttcctgcccgagagcagcagcgtgaagagctgcaagcacaaggagaagagcaagcaccagaaggacttccacctggagttcggcgagaagagcaacgccaagatcaaggacgaggaccacagccccaccttcgagaacagcgactgcaccctgaagaagatggacaaggagggcaagaccctgaagaagcacaagctgaagcacaaggagagagagaaggagaagcacaagaaggagatcgagggcgagaaggagaagtacaagaccaaggacagcgccaaggagctgcagagaagcgtggagttcgacagagagttctggaaggagaacttcttcaagagcgacgagaccgaggacctgttcctgaacatggagcacgagagcctgaccctggagaagaagagcaagctggagaagaacatcaaggacgacaagagcaccaaggagaagcacgtgagcaaggagagaaacttcaaggaggagagagacaagatcaagaaggagagcgagaagagcttcagagaggagaagatcaaggacctgaaggaggagagagagaacatccccaccgacaaggacagcgagttcaccagcctgggcatgagcgccatcgaggagagcatcggcctgcacctggtggagaaggagatcgacatcgagaagcaggagaagcacatcaaggagagcaaggagaagcccgagaagagaagccagatcaaggagaaggacatcgagaagatggagagaaagaccttcgagaaggagaagaagatcaagcacgagcacaagagcgagaaggacaagctggacctgagcgagtgcgtggacaagatcaaggagaaggacaagctgtacagccaccacaccgagaagtgccacaaggagggcgagaagagcaagaacaccgccgccatcaagaagaccgacgacagagagaagagcagagagaagatggacagaaagcacgacaaggagaagcccgagaaggagagacacctggccgagagcaaggagaagcacctgatggagaagaagaacaagcagagcgacaacagcgagtacagcaagagcgagaagggcaagaacaaggagaaggacagagagctggacaagaaggagaagagcagagacaaggagagcatcaacatcaccaacagcaagcacatccaggaggagaagaagagcagcatcgtggacggcaacaaggcccagcacgagaagcccctgagcctgaaggagaagaccaaggacgagcccctgaagacccccgacggcaaggagaaggacaagaaggacaaggacatcgacagatacaaggagagagacaagcacaaggacaagatccagatcaacagcctgctgaagctgaagagcgaggccgacaagcccaagcccaagagcagccccgccagcaaggacaccagacccaaggagaagagactggtgaacgacgacctgatgcagaccagcttcgagagaatgctgagcctgaaggacctggagatcgagcagtggcacaagaagcacaaggagaagatcaagcagaaggagaaggagagactgagaaacagaaactgcctggagctgaagatcaaggacaaggagaagaccaagcacacccccaccgagagcaagaacaaggagctgaccagaagcaagagcagcgaggtgaccgacgcctacaccaaggagaagcagcccaaggacgccgtgagcaacagaagccagagcgtggacaccaagaacgtgatgaccctgggcaagagcagcttcgtgagcgacaacagcctgaacagaagccccagaagcgagaacgagaagcccggcctgagcagcagaagcgtgagcatgatcagcgtggccagcagcgaggacagctgccacaccaccgtgaccacccccagaccccccgtggagtacgacagcgacttcatgctggagagcagcgagagccagatgagcttcagccagagccccttcctgagcatcgccaagagccccgccctgcacgagagagagctggacagcctggccgacctgcccgagagaatcaagcccccctacgccaacagactgagcaccagccacctgagaagcagcagcgtggaggacgtgaagctgatcatcagcgagggcagacccaccatcgaggtgagaagatgcagcatgcccagcgtgatctgcgagcacaccaagcagttccagaccatcagcgaggagagcaaccagggcagcctgctgaccgtgcccggcgacaccagccccagccccaagcccgaggtgttcagcaacgtgcccgagagagacctgagcaacgtgagcaacatccacagcagcttcgccaccagccccaccggcgccagcaacagcaagtacgtgagcgccgacagaaacctgatcaagaacaccgcccccgtgaacaccgtgatggacagccccgtgcacctggagcccagcagccaggtgggcgtgatccagaacaagagctgggagatgcccgtggacagactggagaccctgagcaccagagacttcatctgccccaacagcaacatccccgaccaggagagcagcctgcagagcttctgcaacagcgagaacaaggtgctgaaggagaacgccgacttcctgagcctgagacagaccgagctgcccggcaacagctgcgcccaggaccccgccagcttcatgcccccccagcagccctgcagcttccccagccagagcctgagcgacgccgagagcatcagcaagcacatgagcctgagctacgtggccaaccaggagcccggcatcctgcagcagaagaacgccgtgcagatcatcagcagcgccctggacaccgacaacgagagcaccaaggacaccgagaacaccttcgtgctgggcgacgtgcagaagaccgacgccttcgtgcccgtgtacagcgacagcaccatccaggaggccagccccaacttcgagaaggcctacaccctgcccgtgctgcccagcgagaaggacttcaacggcagcgacgccagcacccagctgaacacccactacgccttcagcaagctgacctacaagagcagcagcggccacgaggtggagaacagcaccaccgacacccaggtgatcagccacgagaaggagaacaagctggagagcctggtgctgacccacctgagcagatgcgacagcgacctgtgcgagatgaacgccggcatgcccaagggcaacctgaacgagcaggaccccaagcactgccccgagagcgagaagtgcctgctgagcatcgaggacgaggagagccagcagagcatcctgagcagcctggagaaccacagccagcagagcacccagcccgagatgcacaagtacggccagctggtgaaggtggagctggaggagaacgccgaggacgacaagaccgagaaccagatcccccagagaatgaccagaaacaaggccaacaccatggccaaccagagcaagcagatcctggccagctgcaccctgctgagcgagaaggacagcgagagcagcagccccagaggcagaatcagactgaccgaggacgacgacccccagatccaccaccccagaaagagaaaggtgagcagagtgccccagcccgtgcaggtgagccccagcctgctgcaggccaaggagaagacccagcagagcctggccgccatcgtggacagcctgaagctggacgagatccagccctacagcagcgagagagccaacccctacttcgagtacctgcacatcagaaagaagatcgaggagaagagaaagctgctgtgcagcgtgatcccccaggccccccagtactacgacgagtacgtgaccttcaacggcagctacctgctggacggcaaccccctgagcaagatctgcatccccaccatcacccccccccccagcctgagcgaccccctgaaggagctgttcagacagcaggaggtggtgagaatgaagctgagactgcagcacagcatcgagagagagaagctgatcgtgagcaacgagcaggaggtgctgagagtgcactacagagccgccagaaccctggccaaccagaccctgcccttcagcgcctgcaccgtgctgctggacgccgaggtgtacaacgtgcccctggacagccagagcgacgacagcaagaccagcgtgagagacagattcaacgccagacagttcatgagctggctgcaggacgtggacgacaagttcgacaagctgaagacctgcctgctgatgagacagcagcacgaggccgccgccctgaacgccgtgcagagactggagtggcagctgaagctgcaggagctggaccccgccacctacaagagcatcagcatctacgagatccaggagttctacgtgcccctggtggacgtgaacgacgacttcgagctgacccccatctag

SEQ ID NO: 185215 - protein, 1586 aa, Artificial Sequence
  derived and/or modified sequence
MEEMRDSYLEEDVYQLQELRRELDRANKNCRILQYRLRKAEQKSLKVAETGQVDGELIRSLEQDLKVAKDVSVRLHHELKTVEEKRAKAEDENETLRQQMIEVEISKQALQNELERLKESSLKRRSTREMYKEKKTFNQDDSADLRCQLQFAKEEAFLMRKKMAKLGREKDELEQELQKYKSLYGDVDSPLPTGEAGGPPSTREAELKLRLKLVEEEANILGRKIVELEVENRGLKAEMEDMRGQQEREGPGRDHAPSIPTSPFGDSLESSTELRRHLQFVEEEAELLRRSISEIEDHNRQLTHELSKFKFEPPREPGWLGEGASPGAGGGAPLQEELKSARLQISELSGKVLKLQHENHALLSNIQRCDLAAHLGLRAPSPRDSDAESDAGKKESDGEESRLPQPKREGPVGGESDSEEMFEKTSGFGSGKPSEASEPCPTELLKAREDSEYLVTLKHEAQRLERTVERLITDTDSFLHDAGLRGGAPLPGPGLQGEEEQGEGDQQEPQLLGTINAKMKAFKKELQAFLEQVNRIGDGLSPLPHLTESSSFLSTVTSVSRDSPIGNLGKELGPDLQSRLKEQLEWQLGPARGDERESLRLRAARELHRRADGDTGSHGLGGQTCFSLELRGPPVLPEQSVSIEELQGQLVQAARLHQEETETFTNKIHKMEEEHLYALRWKELEMHSLALQNTLHERTWSDEKNLMQQELRSLKQNIFLFYVKLRWLLKHWRQGKQMEEEGEEFTEGEHPETLSRLGELGVQGGHQADGPDHDSDRGCGFPVGEHSPHSRVQIGDHSLRLQTADRGQPHKQVVENQQLFSAFKALLEDFRAELREDERARLRLQQQYASDKAAWDVEWAVLKCRLEQLEEKTENKLGELGSSAESKGALKKEREVHQKLLADSHSLVMDLRWQIHHSEKNWNREKVELLDRLDRDRQEWERQKKEFLWRIEQLQKENSPRRGGSFLCDQKDGNVRPFPHQGSLRMPRPVAMWPCADADSIPFEDRPLSKLKESDRCSASENLYLDALSLDDEPEEPPAHRPEREFRNRLPEEEENHKGNLQRAVSVSSMSEFQRLMDISPFLPEKGLPSTSSKEDVTPPLSPDDLKYIEEFNKSWDYTPNRGHNGGGPDLWADRTEVGRAGHEDSTEPFPDSSWYLTTSVTMTTDTMTSPEHCQKQPLRSHVLTEQSGLRVLHSPPAVRRVDSITAAGGEGPFPTSRARGSPGDTKGGPPEPMLSRWPCTSPRHSRDYVEGARRPLDSPLCTSLGFASPLHSLEMSKNLSDDMKEVAFSVRNAICSGPGELQVKDMACQTNGSRTMGTQTVQTISVGLQTEALRGSGVTSSPHKCLTPKAGGGATPVSSPSRSLRSRQVAPAIEKVQAKFERTCCSPKYGSPKLQRKPLPKADQPNNRTSPGMAQKGYSESAWARSTTTRESPVHTTINDGLSSLFNIIDHSPVVQDPFQKGLRAGSRSRSAEPRPELGPGQETGTNSRGRSPSPIGVGSEMCREEGGEGTPVKQDLSAPPGYTLTENVARILNKKLLEHALKEERRQAAHGPPGLHSDSHSLGDTAEPGPMENQTVLLTAPWGL

SEQ ID NO: 185216 - DNA, 4761 bp, Artificial Sequence
  derived and/or modified sequence
atggaggagatgagagacagctacctggaggaggacgtgtaccagctgcaggagctgagaagagagctggacagagccaacaagaactgcagaatcctgcagtacagactgagaaaggccgagcagaagagcctgaaggtggccgagaccggccaggtggacggcgagctgatcagaagcctggagcaggacctgaaggtggccaaggacgtgagcgtgagactgcaccacgagctgaagaccgtggaggagaagagagccaaggccgaggacgagaacgagaccctgagacagcagatgatcgaggtggagatcagcaagcaggccctgcagaacgagctggagagactgaaggagagcagcctgaagagaagaagcaccagagagatgtacaaggagaagaagaccttcaaccaggacgacagcgccgacctgagatgccagctgcagttcgccaaggaggaggccttcctgatgagaaagaagatggccaagctgggcagagagaaggacgagctggagcaggagctgcagaagtacaagagcctgtacggcgacgtggacagccccctgcccaccggcgaggccggcggcccccccagcaccagagaggccgagctgaagctgagactgaagctggtggaggaggaggccaacatcctgggcagaaagatcgtggagctggaggtggagaacagaggcctgaaggccgagatggaggacatgagaggccagcaggagagagagggccccggcagagaccacgcccccagcatccccaccagccccttcggcgacagcctggagagcagcaccgagctgagaagacacctgcagttcgtggaggaggaggccgagctgctgagaagaagcatcagcgagatcgaggaccacaacagacagctgacccacgagctgagcaagttcaagttcgagccccccagagagcccggctggctgggcgagggcgccagccccggcgccggcggcggcgcccccctgcaggaggagctgaagagcgccagactgcagatcagcgagctgagcggcaaggtgctgaagctgcagcacgagaaccacgccctgctgagcaacatccagagatgcgacctggccgcccacctgggcctgagagcccccagccccagagacagcgacgccgagagcgacgccggcaagaaggagagcgacggcgaggagagcagactgccccagcccaagagagagggccccgtgggcggcgagagcgacagcgaggagatgttcgagaagaccagcggcttcggcagcggcaagcccagcgaggccagcgagccctgccccaccgagctgctgaaggccagagaggacagcgagtacctggtgaccctgaagcacgaggcccagagactggagagaaccgtggagagactgatcaccgacaccgacagcttcctgcacgacgccggcctgagaggcggcgcccccctgcccggccccggcctgcagggcgaggaggagcagggcgagggcgaccagcaggagccccagctgctgggcaccatcaacgccaagatgaaggccttcaagaaggagctgcaggccttcctggagcaggtgaacagaatcggcgacggcctgagccccctgccccacctgaccgagagcagcagcttcctgagcaccgtgaccagcgtgagcagagacagccccatcggcaacctgggcaaggagctgggccccgacctgcagagcagactgaaggagcagctggagtggcagctgggccccgccagaggcgacgagagagagagcctgagactgagagccgccagagagctgcacagaagagccgacggcgacaccggcagccacggcctgggcggccagacctgcttcagcctggagctgagaggcccccccgtgctgcccgagcagagcgtgagcatcgaggagctgcagggccagctggtgcaggccgccagactgcaccaggaggagaccgagaccttcaccaacaagatccacaagatggaggaggagcacctgtacgccctgagatggaaggagctggagatgcacagcctggccctgcagaacaccctgcacgagagaacctggagcgacgagaagaacctgatgcagcaggagctgagaagcctgaagcagaacatcttcctgttctacgtgaagctgagatggctgctgaagcactggagacagggcaagcagatggaggaggagggcgaggagttcaccgagggcgagcaccccgagaccctgagcagactgggcgagctgggcgtgcagggcggccaccaggccgacggccccgaccacgacagcgacagaggctgcggcttccccgtgggcgagcacagcccccacagcagagtgcagatcggcgaccacagcctgagactgcagaccgccgacagaggccagccccacaagcaggtggtggagaaccagcagctgttcagcgccttcaaggccctgctggaggacttcagagccgagctgagagaggacgagagagccagactgagactgcagcagcagtacgccagcgacaaggccgcctgggacgtggagtgggccgtgctgaagtgcagactggagcagctggaggagaagaccgagaacaagctgggcgagctgggcagcagcgccgagagcaagggcgccctgaagaaggagagagaggtgcaccagaagctgctggccgacagccacagcctggtgatggacctgagatggcagatccaccacagcgagaagaactggaacagagagaaggtggagctgctggacagactggacagagacagacaggagtgggagagacagaagaaggagttcctgtggagaatcgagcagctgcagaaggagaacagccccagaagaggcggcagcttcctgtgcgaccagaaggacggcaacgtgagacccttcccccaccagggcagcctgagaatgcccagacccgtggccatgtggccctgcgccgacgccgacagcatccccttcgaggacagacccctgagcaagctgaaggagagcgacagatgcagcgccagcgagaacctgtacctggacgccctgagcctggacgacgagcccgaggagccccccgcccacagacccgagagagagttcagaaacagactgcccgaggaggaggagaaccacaagggcaacctgcagagagccgtgagcgtgagcagcatgagcgagttccagagactgatggacatcagccccttcctgcccgagaagggcctgcccagcaccagcagcaaggaggacgtgaccccccccctgagccccgacgacctgaagtacatcgaggagttcaacaagagctgggactacacccccaacagaggccacaacggcggcggccccgacctgtgggccgacagaaccgaggtgggcagagccggccacgaggacagcaccgagcccttccccgacagcagctggtacctgaccaccagcgtgaccatgaccaccgacaccatgaccagccccgagcactgccagaagcagcccctgagaagccacgtgctgaccgagcagagcggcctgagagtgctgcacagcccccccgccgtgagaagagtggacagcatcaccgccgccggcggcgagggccccttccccaccagcagagccagaggcagccccggcgacaccaagggcggcccccccgagcccatgctgagcagatggccctgcaccagccccagacacagcagagactacgtggagggcgccagaagacccctggacagccccctgtgcaccagcctgggcttcgccagccccctgcacagcctggagatgagcaagaacctgagcgacgacatgaaggaggtggccttcagcgtgagaaacgccatctgcagcggccccggcgagctgcaggtgaaggacatggcctgccagaccaacggcagcagaaccatgggcacccagaccgtgcagaccatcagcgtgggcctgcagaccgaggccctgagaggcagcggcgtgaccagcagcccccacaagtgcctgacccccaaggccggcggcggcgccacccccgtgagcagccccagcagaagcctgagaagcagacaggtggcccccgccatcgagaaggtgcaggccaagttcgagagaacctgctgcagccccaagtacggcagccccaagctgcagagaaagcccctgcccaaggccgaccagcccaacaacagaaccagccccggcatggcccagaagggctacagcgagagcgcctgggccagaagcaccaccaccagagagagccccgtgcacaccaccatcaacgacggcctgagcagcctgttcaacatcatcgaccacagccccgtggtgcaggaccccttccagaagggcctgagagccggcagcagaagcagaagcgccgagcccagacccgagctgggccccggccaggagaccggcaccaacagcagaggcagaagccccagccccatcggcgtgggcagcgagatgtgcagagaggagggcggcgagggcacccccgtgaagcaggacctgagcgccccccccggctacaccctgaccgagaacgtggccagaatcctgaacaagaagctgctggagcacgccctgaaggaggagagaagacaggccgcccacggcccccccggcctgcacagcgacagccacagcctgggcgacaccgccgagcccggccccatggagaaccagaccgtgctgctgaccgccccctggggcctgtag

SEQ ID NO: 185217 - DNA, 4761 bp, Artificial Sequence
  derived and/or modified sequence
atggaagaaatgcgagattcctatctggaggaggatgtgtaccagctgcaagagctgcggcgcgagttagaccgggcgaataaaaattgccggattctgcaataccggctacggaaggccgagcagaagtccctaaaagtggctgaaactgggcaggtggatggcgagctcattcgctcactcgaacaggaccttaaagtggcaaaggacgtgagtgtgcgtcttcatcatgagcttaagacagtcgaggagaaacgcgccaaagcagaggatgaaaatgaaacattgagacagcagatgattgaggtcgagatttccaagcaagccctgcagaacgagttggaacgtcttaaagagtcttcactcaagagacgttcaacccgggagatgtacaaggaaaagaagacctttaatcaggatgacagcgcagatctccgctgccagctccagttcgctaaggaggaagccttcttgatgcgtaagaagatggccaaattaggccgcgagaaggacgagttagaacaggaactccagaaatacaagtccctgtatggcgatgtcgatagtcctctgccaactggagaggccggggggcccccctcgaccagagaggccgaactgaagttacgactgaagctcgtggaagaggaggcaaatatcctggggagaaagatcgtagagttagaggtggaaaatagggggttaaaagccgaaatggaggatatgaggggtcagcaggagagagaagggcccggcagggatcacgcaccatcaatcccaacctccccttttggagactctctcgagtcaagcactgaacttaggcgccatcttcagttcgtcgaagaggaagccgagctgttacgccggagtattagtgaaattgaggatcacaacagacagttaacccacgaattgagcaaattcaagtttgaacctccgcgcgaaccaggctggctgggtgagggggcgtcgccaggagccggagggggtgctcccctgcaggaagaattaaagtccgcccggcttcagatttccgagctctcagggaaggtcctaaaactgcaacacgagaatcatgctcttctgagcaatatccagcggtgtgatttggccgctcacttggggttacgcgccccttcaccccgcgattctgatgctgaaagcgatgccgggaaaaaagaatccgacggggaagagagtcgcctgccccagccaaaacgcgaagggcctgtgggcggcgagagcgactccgaagaaatgtttgaaaagacttcgggcttcggttcagggaagcccagcgaggcatctgagccttgtcccacagaactcctgaaagctcgggaagatagcgagtatttagtgaccctcaaacacgaggctcagagattagagcggactgtagaacgactgataaccgatacggacagtttcctgcacgatgcaggactccgcggaggtgctcctctccctggcccaggacttcaaggcgaggaggagcagggcgagggtgaccagcaggaaccgcaactgctcgggaccattaacgcaaaaatgaaggccttcaaaaaggagctgcaagctttcctcgaacaagtgaacagaatcggtgatggtctgagtcccctgcctcatctaactgaatcatcctctttcctgagcaccgtgaccagcgtgagccgggattcccctatcggtaatctcggcaaggagctaggacccgatctccagtctagactgaaggagcaactggagtggcaactagggccagcacgcggggatgagagagaatccctgagactccgagccgctcgggagttgcaccgaagggccgacggagatacgggtagccatgggctgggaggacagacttgcttttcactggaactgaggggccctcccgtgttaccggagcagagcgtcagcatcgaggagcttcaggggcagctggttcaggccgctaggctgcaccaagaggagacagaaacctttaccaacaagattcacaagatggaagaggaacatctctacgctctcaggtggaaagaactcgaaatgcactcattggcactgcaaaatacactgcatgaaaggacttggtcagatgaaaaaaatcttatgcagcaggagctgcgctcacttaaacaaaacattttcctattctatgttaagctcagatggctgctcaagcactggagacagggaaagcaaatggaagaggagggcgaggaattcaccgagggtgaacaccctgagacactctctcggctaggcgaactcggggttcaggggggtcaccaggccgacggtccagatcacgatagcgatcgtgggtgcgggttcccagtgggggagcattctccccattcaagagtgcaaatcggcgatcactccctaagattgcagaccgcagacagaggacaacctcacaagcaggttgtcgagaatcagcagctgttcagcgcatttaaagctcttctcgaggatttcagagccgagctccgagaggacgaacgtgcccgcctgcgcctgcagcagcagtacgcaagcgataaggcagcttgggatgtggaatgggctgtgcttaaatgtcgcctcgagcagctagaggagaagaccgagaataagcttggagaactgggctcgagcgccgagagtaaaggcgccctgaagaaggagagggaagtgcaccagaagctattggccgattcccactctttggttatggatctgaggtggcagattcatcactcagaaaaaaattggaatagagaaaaggtcgagcttttagaccggctggatcgcgatcgccaggaatgggaacggcagaaaaaagagttcttatggagaattgagcagctgcagaaggaaaacagccctcgacgcggaggctcattcttatgcgatcagaaggacggaaacgtgcggccgtttccacatcagggttctctacggatgccaaggcccgtcgcgatgtggccatgcgcggacgccgatagcattcccttcgaagataggccattaagcaaacttaaggagtctgaccggtgtagcgcaagcgagaatctgtatctggatgcactttcattagatgacgaacccgaggaaccacccgcccatagacccgagcgagaattcaggaacagacttcccgaggaggaagagaaccacaaggggaacctgcagagggcggtgtcagttagctccatgtccgaattccagcggctcatggacatttcaccttttctgcctgaaaagggattaccgtccacgagctcaaaagaggatgttacacctccgctgtccccagacgatctaaaatatattgaagagttcaataagtcgtgggactacacacccaaccgtggtcataatgggggtggaccagatctgtgggccgatcgtactgaagtgggtagggccggccacgaagattctacagaaccgtttcctgacagctcatggtacctcaccacatctgtgacaatgactacagatacaatgacctcacccgagcactgccagaaacagccattaaggtctcacgtcctgacagagcagtcagggctgcgcgtgctccactcccccccggctgtgcggcgcgtcgattctattaccgcggctggcggggaaggcccgttcccaacgtctcgcgcccgtggtagccccggcgatactaaaggcggcccacccgaaccgatgctatcaagatggccttgtacctctccgcgccatagcagggactacgttgaaggggcaagacgccctctcgactcccctctctgtaccagcctcggttttgcttctccactgcactcccttgagatgagcaaaaatctcagcgacgatatgaaggaagtcgccttttccgtaaggaatgcaatttgttctggtcctggagaattgcaagttaaagacatggcctgtcagaccaatggctctagaactatgggtacacagaccgttcagaccatctcggtgggtctccaaactgaggcactgaggggctccggagtcacttccagtcctcataaatgcctgactcccaaggcaggcgggggtgcaacccccgtcagtagcccttcccgttccttaaggtctcgtcaggtggcgccagctattgaaaaagtccaagcgaagttcgagagaacttgttgttcacctaaatacgggtcccctaaactccagcgcaaaccactgcccaaggccgatcaacctaataatcgcacttctcctggcatggcacaaaagggctacagcgaaagcgcttgggcccgttccacgacgaccagggaaagcccagtgcacaccactataaacgatggactgtccagcctatttaacataatcgatcatagtcctgtggttcaggacccgttccaaaagggcctacgcgccggctcacgaagtagaagtgcagaaccgaggcccgaactggggccgggacaggaaaccgggactaattctagaggtaggtccccttcccctattggagtcggatctgaaatgtgtagagaggaaggcggggagggcactcccgtcaagcaggatttgtctgcccctccagggtatacacttactgagaatgtagcccgaatcctgaataagaagctgctggagcatgcacttaaggaggagagacggcaggccgcacatggccctcccgggctgcattctgactctcacagcctgggtgatacggccgagccgggccctatggaaaatcagacagtcttgctcactgccccctggggtttgtag

SEQ ID NO: 185218 - DNA, 4761 bp, Artificial Sequence
  derived and/or modified sequence
atggaggagatgagggacagctacctggaggaggatgtgtaccagctgcaggagctgcggcgggagctggaccgggccaacaagaactgccgcatcctgcagtaccgcctgaggaaggccgagcagaagagcctgaaggtggccgagaccggccaggtggatggagagctgatccgcagcctggagcaggacctgaaggtggccaaggatgtgtctgtgcggctgcaccacgagctgaagacagtggaggagaagagggccaaggccgaggatgaaaatgagaccctgcggcagcagatgattgaggtggagatcagcaagcaggccctgcagaatgagctggagcggctgaaggagagcagcctgaagaggaggagcacccgggagatgtacaaggagaagaagaccttcaaccaggatgacagcgctgacctgcgctgccagctgcagtttgccaaggaggaggccttcctgatgaggaagaagatggccaagctgggccgggagaaggatgagctggagcaggagctgcagaagtacaagagcctgtatggagatgtggacagccccctgcccactggagaggccggcggcccccccagcacccgggaggccgagctgaagctgcggctgaagctggtggaggaggaggccaacatcctgggcaggaagatcgtggagctggaggtggagaacagaggcctgaaggccgagatggaggacatgaggggccagcaggagcgggagggccctggccgggaccacgcccccagcatccccaccagcccctttggagacagcctggagagcagcacagagctgcggcggcacctgcagtttgtggaggaggaggccgagctgctgcggcgcagcatcagcgagattgaggaccacaaccggcagctgacccatgagctgagcaagttcaagtttgagcccccccgggagcccggctggctgggggagggcgccagccctggggccggcggcggggcccccctgcaggaggagctgaagagcgcccggctgcagatcagcgagctgagcggcaaggtgctgaagctgcagcacgagaaccacgccctgctgagcaacatccagagatgtgacctggccgcccacctgggcctgcgggcccccagcccccgggacagtgatgctgagagtgatgctgggaagaaggagagtgatggagaggagagccggctgccccagcccaagcgggagggccctgtgggcggggagagtgacagcgaggagatgtttgagaagaccagcggcttcggcagcggcaagcccagcgaggccagcgagccctgccccacagagctgctgaaggccagagaagattctgagtacctggtgaccctgaagcatgaggcccagaggctggagaggacagtggagcggctcatcacagacacagacagcttcctgcatgatgctggcctgcggggcggggcccccctgcccggccctggcctgcagggcgaggaggagcagggcgagggggaccagcaggagccccagctgctgggcaccatcaatgccaagatgaaggccttcaagaaggagctgcaggccttcctggagcaggtgaacagaattggagatggcctgagccccctgccccacctgacagagagcagcagcttcctgagcacagtgacctctgtgtcccgggacagccccatcggcaacctgggcaaggagctgggccctgacctgcagagccggctgaaggagcagctggagtggcagctgggccctgcccggggagatgagcgggagagcctgcggctgcgggccgcccgggagctgcacagaagagcagatggagacaccggcagccacggcctgggcggccagacctgcttcagcctggagctgcggggcccccctgtgctgcctgagcagagcgtgtccattgaggagctgcagggccagctggtgcaggccgcccggctgcaccaggaggagacagagaccttcaccaacaagatccacaagatggaggaggagcacctgtatgccctgcgctggaaggagctggagatgcacagcctggccctgcagaacaccctgcacgagaggacctggagcgatgagaagaacctgatgcagcaggagctgcggagcctgaagcagaacatcttcctgttctacgtgaagctgcgctggctgctgaagcactggaggcagggcaagcagatggaggaggagggggaggagttcacagaaggagagcaccctgagaccctgagccggctgggggagctgggcgtgcagggcggccaccaggctgatggccctgaccatgacagcgaccggggctgcggcttccctgtgggggagcacagcccccacagccgggtgcagatcggggaccacagcctgcggctgcagacagctgaccggggccagccccacaagcaggtggtggagaaccagcagctgttcagcgccttcaaggccctgctggaggacttccgggcagagctgcgggaggatgagcgggcccggctgcggctgcagcagcagtatgccagtgacaaggccgcctgggatgtggagtgggccgtgctgaagtgccgcctggagcagctggaggagaagacagagaacaagctgggggagctgggcagcagcgctgagagcaaaggagccctgaagaaggagcgggaggtgcaccagaagctgctggccgacagccacagcctggtgatggacctgcgctggcagatccaccacagcgagaagaactggaaccgggagaaggtggagctgctggaccggctggaccgggaccggcaggagtgggagcggcagaagaaggagttcctgtggagaattgagcagctgcagaaggagaacagccccaggagaggaggcagcttcctgtgtgaccagaaggatggaaatgtgcggcccttcccccaccagggcagcctgaggatgcccaggcctgtggccatgtggccctgtgctgatgctgacagcatcccctttgaggaccggcccctgagcaagctgaaggagagtgaccgctgcagcgcctctgaaaatctctacctggatgccctgagcctggatgatgagcctgaggagcccccagcccacaggcctgagcgggagttcaggaaccggctgcctgaggaggaggagaaccacaagggcaacctgcagagagctgtgtctgtgtcctccatgtctgagttccagaggctgatggacatcagccccttcctgcctgagaagggcctgcccagcaccagcagcaaagaagatgtgaccccacccctgagcccagatgacctgaagtacatcgaggagttcaacaagtcctgggactacacccccaacagaggccacaatggaggcggccctgacctgtgggccgacagaacagaggtgggccgggccggccacgaggacagcacagagcccttcccagacagctcctggtacctgaccacctctgtgaccatgaccacagacaccatgaccagccctgagcactgccagaagcagcccctgcggagccacgtgctgacagagcagagcggcctgcgggtgctgcacagccccccagctgtgcggcgggtggacagcatcacagctgctggaggagagggccccttccccaccagccgggcccggggcagccctggggacaccaagggcggccccccagagcccatgctgagccgctggccctgcaccagccccaggcacagccgggactatgtggagggcgcccggcggcccctggacagccccctgtgcaccagcctgggctttgccagccccctgcacagcctggagatgagcaagaacctgagtgatgacatgaaggaggtggccttctctgtgagaaatgccatctgcagcggccctggagagctgcaggtgaaggacatggcctgccagaccaacggcagcaggaccatgggcacccagacagtgcagaccatctctgtgggcctgcagacagaggccctgcggggcagcggcgtgaccagcagcccccacaagtgcctgacccccaaggccggcggcggggccacccctgtgagcagccccagccgcagcctgcggagccggcaggtggccccagccatcgagaaggtgcaggccaagtttgagaggacctgctgcagccccaagtatggcagccccaagctgcagaggaagcccctgcccaaggctgaccagcccaacaacagaaccagccctggcatggcccagaagggctacagcgagagcgcctgggcccggagcaccaccacccgggagagccctgtgcacaccaccatcaatgatggcctgagcagcctcttcaacatcatcgaccacagccctgtggtgcaggaccccttccagaagggcctgcgggccggcagccgcagccgctctgctgagcccaggcctgagctgggccctggccaggagaccggcaccaacagccggggccgcagccccagccccatcggcgtgggcagcgagatgtgccgggaggagggcggggagggcacccctgtgaagcaggacctgagcgcccctcctggctacaccctgacagaaaatgtggcccgcatcctgaacaagaagctgctggagcacgccctgaaggaggagcggcggcaggccgcccacggccccccaggcctgcacagcgacagccacagcctgggggacacagctgagcccggccccatggagaaccagacagtgctgctgacagccccctggggcctgtag

SEQ ID NO: 185219 - DNA, 4761 bp, Artificial Sequence
  derived and/or modified sequence
atggaggagatgcgggacagctacctggaggaggacgtgtaccagctgcaggagctgagacgcgagctggacagagcgaataagaactgtcggatcctgcagtatagactccgcaaggcggaacagaagagcctaaaggtcgcagaaacaggccaagtggatggggagctgatcaggagtctggagcaggacctcaaagtggcaaaggacgtgtccgtgagactacatcacgaactgaagactgtggaagaaaaaagggccaaggccgaagacgagaatgagacactccggcagcagatgattgaagtggaaatttccaagcaggccctccagaacgaactggagagactgaaagagagcagtctcaagcggagaagtacacgcgaaatgtacaaggagaagaagaccttcaaccaagacgacagtgccgatcttcggtgtcagttgcagttcgcaaaggaagaggcgttcctgatgcgcaaaaagatggcaaaattgggaagggaaaaagatgagcttgaacaggagctccagaaatataagtctttatatggcgacgtagatagccccctccctactggcgaggccgggggtcccccatccacgcgtgaagcagagctgaagctacggctgaaacttgttgaagaagaagcaaatattctcggtagaaagatcgtggaactggaggttgaaaataggggactgaaagcagagatggaagatatgcgagggcagcaggaacgggagggacccggccgtgaccacgcgccttctattcccacctcaccctttggcgacagcctcgaatcctcgacagagttacggaggcacctgcagtttgtggaggaagaggctgaactcctccgccgaagcatctctgagatcgaggaccataacagacagctgacacacgagttatccaagttcaagtttgagcctcctcgagagcctggctggctgggcgaaggagctagtcctggggcaggcgggggcgctccactccaggaggagctgaaatcagcccggctgcagatctccgaactgtcaggcaaggtcttgaagctgcagcatgagaatcacgctttgttaagcaatatccagcgctgcgatttggccgcacatctcgggctgagagcgccgtcacctcgagatagtgacgctgagagcgatgctggtaagaaagagtcagatggagaagagagtaggctaccccaacccaagcgagaggggccggtggggggcgaatctgacagcgaagagatgttcgagaagaccagtgggttcggctctggaaagccgtccgaggcgagtgagccatgccctacagagctgttgaaggccagagaggattcagaatatcttgtaaccctcaagcatgaggcccagaggctggagaggaccgtggagcgattaattactgacactgattccttccttcacgacgccgggctgcgcgggggagcacccctgccgggcccgggcttgcagggggaggaggaacagggtgaaggcgatcaacaggaacctcagctgctgggaactatcaatgccaaaatgaaggctttcaaaaaggagctgcaagccttcttggaacaggtcaataggattggcgacggactttcccccttaccacatttgaccgagagctcctctttccttagcactgtcaccagcgtgtcccgggactcacccatcggaaatctgggcaaggagctgggaccagacctccagtcacgcctaaaggagcagctggagtggcagctggggcccgccaggggcgacgagagggagagcctgcggctccgggcggctagggaactgcatcgaagggcggatggggataccgggagccatgggctaggcgggcagacttgctttagccttgagttgcggggaccaccggtgctgcccgagcagagcgtgtctatcgaagagcttcagggtcagctggtgcaagccgcacgtttgcatcaagaagagactgagacttttactaataaaattcacaagatggaggaagagcatctctacgcactcaggtggaaagaattggagatgcattcacttgcactgcagaacaccctccatgagcgcacatggtccgacgagaaaaaccttatgcaacaggaactaagatccttaaagcaaaatattttcttgttctatgtcaaactaagatggttattaaaacactggagacagggtaaacagatggaggaggaaggcgaagagttcacagaaggggagcaccctgagacactctcccgcctgggggaactgggagtccagggtggccaccaggctgatggaccagaccatgatagcgacagaggttgcggattccctgtaggggagcactcaccacatagccgcgtgcagattggtgaccactcgttgcgactacagactgccgacagaggccagccgcacaagcaggtagttgaaaaccaacagctcttttccgctttcaaggccctcctggaagactttcgcgcagagcttcgagaggatgaacgggctcggctacgcctccagcaacagtacgctagcgacaaggccgcctgggatgtggaatgggcagtgctgaagtgtagacttgaacaactagaagaaaagacggagaacaaactgggagaactcggtagctctgctgagagtaagggagccttgaaaaaggaacgggaggtgcatcagaaattgctggctgatagccacagtctggttatggacctgagatggcagatccaccattctgaaaaaaattggaacagggagaaggtcgaacttttggaccggttggatagggaccgccaggagtgggaacggcagaaaaaggagttcctttggcgcattgagcaactgcagaaagaaaatagtccacggcggggcgggtcctttctctgcgaccagaaggacggcaacgtgagaccttttcctcaccaggggtctctccgcatgccacgcccagtagcaatgtggccctgcgccgatgctgattctataccatttgaagaccgtccactcagcaagttaaaggagtcagaccgatgcagtgcgtcggaaaatctgtaccttgacgccctgtctctcgatgacgagcccgaagagcccccggcccacagacccgaaagggagtttcggaacaggttacccgaggaggaggagaaccataaaggtaatcttcagagagccgtgtctgtctccagcatgagtgagttccagaggttaatggacatatccccttttctgccggaaaaaggtttaccttcaacgagctctaaagaggacgtcacaccccccctcagcccggacgacttaaagtacatcgaggaatttaataagagttgggactacacacccaatagaggccataatggcggcgggcccgacctctgggcggatcgaaccgaggtgggacgagctggccacgaagatagtactgaaccttttcctgatagctcatggtatttgacaacaagcgtcactatgaccactgacacaatgacaagtcctgagcattgccagaaacagccactgaggagccatgtcctgactgaacagagtgggctgagagtgctgcattccccccctgccgtgaggagagtcgattcgattacggccgctggtggagagggaccatttcccaccagcagagcaagaggaagccccggcgacaccaaaggaggtccacctgaacccatgcttagcagatggccatgcacctcaccaagacattccagagattatgttgaaggggcccggaggcctctggactcccccctgtgtaccagtctgggattcgcttctcccctgcattctttagaaatgtctaaaaacttgtcagatgacatgaaggaggtggcattctctgttagaaatgctatctgctcgggaccaggcgaactgcaggtgaaagatatggcctgtcagacgaatgggtccaggaccatgggcacccagactgttcaaaccatatctgtaggactgcaaacagaagcactgaggggttccggcgtgacgagttcaccacacaagtgtctgacacctaaagctggaggaggtgccactcctgtgtcctcacccagccggtctctgcgcagcaggcaggtggctcctgccatagaaaaagttcaggccaagttcgagcgcacgtgctgctcaccaaagtatggctcaccgaaactccagcggaaacctttgcctaaagctgatcaacctaacaaccgcactagtcccggcatggcccaaaagggatatagtgagtctgcttgggctagatcaacaaccacccgtgagagcccagtgcatactactatcaacgatgggctgtcatccctttttaacattattgatcatagtccggtggtccaggacccattccagaaaggcctccgcgccggttcccgcagtcgttctgccgagccgcgccccgagctgggaccaggtcaagagacaggtacaaactcacgcggccgtagcccttcccccattggcgtgggtagcgaaatgtgcagggaggaagggggagagggcaccccggtaaaacaagacctgtccgcgcctccggggtacacgctaaccgagaatgtggcccgaatcttgaacaagaagctcttggagcacgcgttaaaggaggagcgacggcaggccgcgcatggtcctccaggactgcactcggactcacactctcttggggacactgccgagcccggacctatggagaatcagaccgttttactcactgccccatggggtctgtag

SEQ ID NO: 185220 - DNA, 4761 bp, Artificial Sequence
  derived and/or modified sequence
atggaagagatgagggactcttacctggaagaggatgtctaccaactgcaagagctgcgcagggagctggatagggctaataagaactgtcggatcctgcagtacaggcttcgaaaggctgagcagaagagcctgaaagtagctgagaccgggcaggttgacggagagctgattcgcagcttggagcaggacctgaaagtggccaaagacgtgtcagtgaggctgcaccacgaactgaaaacagtggaggagaagcgcgcaaaggcggaagatgagaacgaaaccctccgccagcaaatgatcgaagtggagatttccaagcaggccctgcaaaatgaactagagagactgaaggagtcatctttgaaaaggagaagtacccgggaaatgtacaaagaaaagaaaactttcaaccaggatgacagcgctgacctgcggtgccagttgcagttcgctaaagaagaggctttcttgatgagaaaaaaaatggccaagctagggagagaaaaggatgagctggaacaggagttacaaaagtacaagagcttgtatggggatgtcgatagccccctgcctacaggcgaagccggaggccctccaagcactagggaagcggagctcaagctgcgcctgaagctggtggaggaggaggctaacattcttggcagaaagatcgtggaactggaagtggagaacaggggcctgaaagccgagatggaggatatgagggggcagcaggaacgagaaggaccaggacgggaccacgcccctagcatcccaacaagcccgtttggtgattccctggaatcctccacagaacttcgacgtcacctccagtttgtggaagaggaggcagaactgctccgcaggtcgatctctgagatcgaggaccacaacagacagcttacacacgagctctctaagttcaagttcgagcccccaagggagccaggttggctgggggagggcgcaagccctggcgctggaggcggtgccccactgcaagaggaactgaagtccgccagattacagatcagcgaactgtctggtaaagtgctcaagctgcagcacgagaatcacgccctcctcagtaacatacagaggtgcgatctggctgcacacctcggcctcagagctccaagtccgagagattctgatgccgaatcggatgcaggaaaaaaggagtctgacggggaggagtcacggctccctcaaccaaagcgcgaaggcccagtgggcggagaatccgacagcgaggaaatgtttgaaaagacttccggcttcggatccggaaagccaagtgaagcaagcgagccttgccctacagagctgcttaaggcacgcgaggacagcgagtacctggtgacgctgaagcatgaagcccaacgtctggaacgtacggttgagaggctgattacagataccgacagcttcctgcatgacgccggtcttaggggcggagcaccgttgccgggacctgggctccagggggaggaggaacagggcgaaggagaccagcaagagccccagttgttggggactattaatgcaaaaatgaaggcattcaagaaagagctccaagcatttctggaacaggtaaaccgcattggcgacggactcagtcccttaccacaccttacagagagcagcagctttctgtcaactgtgacatccgtttccagagactccccaattggcaacctcgggaaagaactcggccctgatctccagagccgcctgaaggagcagttggagtggcagcttggccctgccagaggtgatgagcgtgaatccttacgtctgcgggcagcccgtgaactccataggcgagccgatggggatacgggatcccatggactcggaggacagacctgtttttctctggagctccggggtccacctgttctccccgaacaaagcgttagtattgaagagttacagggccagctggtgcaggcagcccgattgcatcaggaagagaccgagaccttcacaaataaaatccacaagatggaagaagaacacctctacgccctcaggtggaaagagttggaaatgcactccttagcccttcagaacacattacacgagcgtacctggtccgatgaaaagaacctcatgcagcaggagctgcgaagcctcaagcagaacatctttttgttctacgtgaagctgagatggctgttaaaacattggaggcaaggcaaacaaatggaggaggaaggggaagaatttactgagggcgaacatcccgagacactctctagattgggagagctgggggtgcagggcggacaccaggctgatggacccgaccatgacagtgatcgtggctgtggtttcccagtcggcgaacactcgccccatagccgggtacagatcggagatcactctctgcgactgcagactgctgaccggggacagccccacaaacaggtggtggagaaccaacagctcttctcagcttttaaagccctgctggaagattttagggccgaactgcgcgaggatgagagagctcgcctcagactacaacagcagtatgcctctgacaaggcggcttgggacgtagaatgggccgtgctgaaatgtcgtctagaacagttggaagaaaagactgaaaacaagctcggggagctggggagtagcgctgagtcaaagggagccctgaaaaaagaacgagaggtgcatcaaaagttgctggctgactcccacagccttgtaatggatttgcggtggcagattcatcattcagagaagaattggaatagggaaaaggtagagctgctggatcggctggatagagatcgacaggagtgggaacggcagaaaaaggagttcctgtggcgtattgaacagttgcaaaaggagaacagtccccgtcgcggaggctcctttctgtgcgatcaaaaggacggcaacgtaagaccgttcccccatcaggggagcctccgcatgccaagaccagtagccatgtggccgtgtgccgacgcggactcaatcccattcgaggaccggccactgagcaagctgaaggagtcagaccggtgcagcgcatctgaaaatctctacctggatgcactgtccctagatgacgagcctgaggagccccctgcacataggcccgaacgggagtttaggaaccgcttgcctgaggaagaggagaaccataaggggaatctgcaacgcgcagttagcgtgagtagtatgtctgaattccagagactcatggacatcagtccatttctgccagagaaggggctcccctctacatcatccaaggaggacgttacgcctccactgtcccccgatgatcttaaatatatagaggaatttaataagagctgggactatactcctaatcggggtcacaatggcggtggacccgacctttgggccgataggaccgaggtcgggagagctggtcacgaggacagcaccgaacccttccctgattcttcatggtatctgactacctctgtcaccatgaccaccgatacaatgacaagtccagaacactgtcagaaacagcccttgaggagccatgtgctcaccgaacagagcggactgagagtgctgcattcgccgccagccgtgcggagggtcgactccattactgccgcaggcggtgagggcccatttccaacttcccgcgcaaggggctcccctggtgataccaaggggggaccacctgagccaatgctgtccaggtggccttgcactagccccaggcattctagggattacgtcgagggagcccgaagaccactcgatagccccctgtgcactagcttgggcttcgcctcccccctacacagtctggaaatgtccaaaaacttgtctgacgatatgaaggaggttgctttcagtgtccggaacgcaatctgctctgggcctggagaactccaagtcaaagacatggcctgccaaacgaacggctcaagaacgatgggcacacagacagtacagacaatctccgttgggctacaaaccgaggccctccgcggtagcggggtaacctcgtcgccccacaaatgtttaactcctaaggcaggaggtggcgcaaccccagtcagttctccatctaggtcccttcgaagtaggcaagtcgcgccagcaattgaaaaagtgcaggccaagttcgagagaacatgttgcagcccaaagtacggttctccaaagttgcaacgaaagcctctccccaaggccgatcagcctaataataggacgtcacccggaatggcccagaagggatacagtgaatcagcgtgggcacggtccactacgacgagggaatcccccgtgcacaccacaatcaacgatgggctctcatccctattcaacattattgatcattcccctgtggtgcaggacccatttcagaaggggttgagggccggatccaggtccaggtccgctgaaccaaggccagaactcggccctggacaggaaacagggactaatagcaggggacggagtccaagtcccattggggtggggtcggagatgtgcagggaggagggaggcgagggtacccctgtgaaacaggatctcagtgcaccgccaggctacaccctgacggagaacgtggcacgcatactgaacaagaaattgctggagcacgcacttaaggaagagagacgccaggccgctcatggcccacccggtctacactcagatagccactctctgggcgacactgcagagcctggaccaatggagaaccaaacggtactgctgacagcaccatggggcctgtag

SEQ ID NO: 185221 - protein, 653 aa, Artificial Sequence
  derived and/or modified sequence
MIPPQEASARRREIEDKLKQEEETLSFIRDSLEKSDQLTKNMVSILSSFESRLMKLENSIIPVHKQTENLQRLQENVEKTLSCLDHVISYYHVASDTEKIIREGPTGRLEEYLGSMAKIQKAVEYFQDNSPDSPELNKVKLLFERGKEALESEFRSLMTRHSKVVSPVLILDLISGDDDLEAQEDVTLEHLPESVLQDVIRISRWLVEYGRNQDFMNVYYQIRSSQLDRSIKGLKEHFHKSSSSSGVPYSPAIPNKRKDTPTKKPVKRPGRDDMLDVETDAYIHCVSAFVKLAQSEYQLLADIIPEHHQKKTFDSLIQDALDGLMLEGENIVSAARKAIVRHDFSTVLTVFPILRHLKQTKPEFDQVLQGTAASTKNKLPGLITSMETIGAKALEDFADNIKNDPDKEYNMPKDGTVHELTSNAILFLQQLLDFQETAGAMLASQETSSSATSYSSEFSKRLLSTYICKVLGNLQLNLLSKSKVYEDPALSAIFLHNNYNYILKSLEKSELIQLVAVTQKTAERSYREHIEQQIQTYQRSWLKVTDYIAEKNLPVFQPGVKLRDKERQIIKERFKGFNDGLEELCKIQKAWAIPDTEQRDRIRQAQKTIVKETYGAFLQKFGSVPFTKNPEKYIKYGVEQVGDMIDRLFDTSA

SEQ ID NO: 185222 - protein, 573 aa, Artificial Sequence
  derived and/or modified sequence
MIPPQEASARRREIEDKLKQEEETLSFIRDSLEKSDQLTKNMVSILSSFESRLMKLENSIIPVHKQTENLQRLQENVEKTLSCLDHVISYYHVISGDDDLEAQEDVTLEHLPESVLQDVIRISRWLVEYGRNQDFMNVYYQIRSSQLDRSIKGLKEHFHKSSSSSGVPYSPAIPNKRKDTPTKKPVKRPGRDDMLDVETDAYIHCVSAFVKLAQSEYQLLADIIPEHHQKKTFDSLIQDALDGLMLEGENIVSAARKAIVRHDFSTVLTVFPILRHLKQTKPEFDQVLQGTAASTKNKLPGLITSMETIGAKALEDFADNIKNDPDKEYNMPKDGTVHELTSNAILFLQQLLDFQETAGAMLASQETSSSATSYSSEFSKRLLSTYICKVLGNLQLNLLSKSKVYEDPALSAIFLHNNYNYILKSLEKSELIQLVAVTQKTAERSYREHIEQQIQTYQRSWLKVTDYIAEKNLPVFQPGVKLRDKERQIIKERFKGFNDGLEELCKIQKAWAIPDTEQRDRIRQAQKTIVKETYGAFLQKFGSVPFTKNPEKYIKYGVEQVGDMIDRLFDTSA

SEQ ID NO: 185223 - protein, 283 aa, Artificial Sequence
  derived and/or modified sequence
MIPPQEASARRREIEDKLKQEEETLSFIRDSLEKSDQLTKNMVSILSSFESRLMKLENSIIPVHKQTENLQRLQENVEKTLSCLDHVISYYHVASDTEKIIREGPTGRLEEYLGSMAKIQKAVEYFQDNSPDSPELNKVKLLFERGKEALESEFRSLMTRHSKVVSPVLILDLISGDDDLEAQEDVTLEHLPESVLQDVIRISRWLVEYGRNQDFMNVYYQIRSSQLDRSIKGLKEHFHKSSSSSGVPYSPAIPNKRKDTPTKKPVKRPGEPPSWPISATARG

SEQ ID NO: 185224 - DNA, 1962 bp, Artificial Sequence
  derived and/or modified sequence
atgatccccccccaggaggccagcgccagaagaagagagatcgaggacaagctgaagcaggaggaggagaccctgagcttcatcagagacagcctggagaagagcgaccagctgaccaagaacatggtgagcatcctgagcagcttcgagagcagactgatgaagctggagaacagcatcatccccgtgcacaagcagaccgagaacctgcagagactgcaggagaacgtggagaagaccctgagctgcctggaccacgtgatcagctactaccacgtggccagcgacaccgagaagatcatcagagagggccccaccggcagactggaggagtacctgggcagcatggccaagatccagaaggccgtggagtacttccaggacaacagccccgacagccccgagctgaacaaggtgaagctgctgttcgagagaggcaaggaggccctggagagcgagttcagaagcctgatgaccagacacagcaaggtggtgagccccgtgctgatcctggacctgatcagcggcgacgacgacctggaggcccaggaggacgtgaccctggagcacctgcccgagagcgtgctgcaggacgtgatcagaatcagcagatggctggtggagtacggcagaaaccaggacttcatgaacgtgtactaccagatcagaagcagccagctggacagaagcatcaagggcctgaaggagcacttccacaagagcagcagcagcagcggcgtgccctacagccccgccatccccaacaagagaaaggacacccccaccaagaagcccgtgaagagacccggcagagacgacatgctggacgtggagaccgacgcctacatccactgcgtgagcgccttcgtgaagctggcccagagcgagtaccagctgctggccgacatcatccccgagcaccaccagaagaagaccttcgacagcctgatccaggacgccctggacggcctgatgctggagggcgagaacatcgtgagcgccgccagaaaggccatcgtgagacacgacttcagcaccgtgctgaccgtgttccccatcctgagacacctgaagcagaccaagcccgagttcgaccaggtgctgcagggcaccgccgccagcaccaagaacaagctgcccggcctgatcaccagcatggagaccatcggcgccaaggccctggaggacttcgccgacaacatcaagaacgaccccgacaaggagtacaacatgcccaaggacggcaccgtgcacgagctgaccagcaacgccatcctgttcctgcagcagctgctggacttccaggagaccgccggcgccatgctggccagccaggagaccagcagcagcgccaccagctacagcagcgagttcagcaagagactgctgagcacctacatctgcaaggtgctgggcaacctgcagctgaacctgctgagcaagagcaaggtgtacgaggaccccgccctgagcgccatcttcctgcacaacaactacaactacatcctgaagagcctggagaagagcgagctgatccagctggtggccgtgacccagaagaccgccgagagaagctacagagagcacatcgagcagcagatccagacctaccagagaagctggctgaaggtgaccgactacatcgccgagaagaacctgcccgtgttccagcccggcgtgaagctgagagacaaggagagacagatcatcaaggagagattcaagggcttcaacgacggcctggaggagctgtgcaagatccagaaggcctgggccatccccgacaccgagcagagagacagaatcagacaggcccagaagaccatcgtgaaggagacctacggcgccttcctgcagaagttcggcagcgtgcccttcaccaagaaccccgagaagtacatcaagtacggcgtggagcaggtgggcgacatgatcgacagactgttcgacaccagcgcctag
